United States Patent Application Publication US 2023/0026259 A1 - sequence listing, part 80

SEQ ID NO: 184594 - DNA, 741 bp, Homo sapiens
  Payload ID: 16347
  Gene Symbol: SLC7A7
  Gene Name: solute carrier family 7 (amino acid transporter light chain, y+L system), member 7
  ENST ID: ENST00000554741
  CDS Start-End: 610-741
gtcaaatctctgctatatcagtactggctaaattaggtgttaaatgattgagcttcaagatgggcaaatcatgacttcggactacattcctccttgcctggcggctgggaaattcctgggagtgctgacagcaaacaaatgacaccgggaatggacaatatcactgggaagcatgttccaggcagggagaacaggagttgcaaaagctgtgaggcgggagcatgcttgctgtgcggccaccgcagggaagccagtgaagctggagtggagtggggaagacagcagggaggcccatgcagacaaggacagcttctctctttctaggacctcccttacgacttggacccgactccagagtgcaattaaggggccggcaagttgggtagcaggctgagagtgtctaaaggacactaaaatatctttggaataattcaggcatttgtctggccttcccttttactgctggctgggaaggaggagcatcagaccacagatcctggaaggcacttctctccctgactgctgctcacactgccgtgagaacctgcttatatccaggaccaaggaggcaatgccaggaagctggtgaagggtttcctctcctccaccatggttgacagcactgagtatgaagtggcctcccagcctgaggtggaaacctcccctttgggtgatggggccagcccagggccggagcaggtgaagctgaagaaggagatctcactgcttaacggcgtgtgc

SEQ ID NO: 184595 - DNA, 2272 bp, Homo sapiens
  Payload ID: 16347
  Gene Symbol: SLC7A7
  Gene Name: solute carrier family 7 (amino acid transporter light chain, y+L system), member 7
  Uniprot ID: Q9UM01
  ENST ID: ENST00000555702
  CDS Start-End: 349-1884
gttttcctgttttccatttcagtccccgttaccctctgctttttctgctcctcagagtcaacagctgttgcagcatgagcgatacgcttggttctcctaactagcaccttcccctctcccctgactcagctggtagcccctcctccccgcacctgcccaaaggtcactggacaggcatttgtctggccttcccttttactgctggctgggaaggaggagcatcagaccacagatcctggaaggcacttctctccctgactgctgctcacactgccgtgagaacctgcttatatccaggaccaaggaggcaatgccaggaagctggtgaagggtttcctctcctccaccatggttgacagcactgagtatgaagtggcctcccagcctgaggtggaaacctcccctttgggtgatggggccagcccagggccggagcaggtgaagctgaagaaggagatctcactgcttaacggcgtgtgcctgattgtggggaacatgatcggctcgggcatctttgtttcccccaagggtgtgctcatatacagtgcctcctttggtctctctctggtcatctgggctgtcgggggcctcttctccgtctttggggccctttgttatgcggaactgggcaccaccattaagaaatctggggccagctatgcctatatcctggaggcctttggaggattccttgctttcatcagactctggacctccctgctcatcattgagcccaccagccaggccatcattgccatcacctttgccaactacatggtacagcctctcttcccgagctgcttcgccccttatgctgccagccgcctgctggctgctgcctgcatttgtctcttaaccttcattaactgtgcctatgtcaaatggggaaccctggtacaagatattttcacctatgctaaagtattggcactgatcgcggtcatcgttgcaggcattgttagacttggccagggagcctctactcattttgagaattcctttgagggttcatcatttgcagtgggtgacattgccctggcactgtactcagctctgttctcctactcaggctgggacaccctcaactatgtcactgaagagatcaagaatcctgagaggaacctgcccctctccattggcatctccatgcccattgtcaccatcatctatatcttgaccaatgtggcctattatactgtgctagacatgagagacatcttggccagtgatgctgttgctgtgacttttgcagatcagatatttggaatatttaactggataattccactgtcagttgcattatcctgttttggtggcctcaatgcctccattgtggctgcttctaggcttttctttgtgggctcaagagaaggccatctccctgatgccatctgcatgatccatgttgagcggttcacaccagtgccttctctgctcttcaatggtatcatggcattgatctacttgtgcgtggaagacatcttccagctcattaactactacagcttcagctactggttctttgtggggctttctattgtgggtcagctttatctgcgctggaaggagcctgatcgacctcgtcccctcaagctcagcgttttcttcccgattgtcttctgcctctgcaccatcttcctggtggctgttccactttacagtgatactatcaactccctcatcggcattgccattgccctctcaggcctgcccttttacttcctcatcatcagagtgccagaacataagcgaccgctttacctccgaaggatcgtggggtctgccacaaggtacctccaggtcctgtgtatgtcagttgctgcagaaatggatttggaagatggaggagagatgcccaagcaacgggatcccaaatctaactaaacaccatctggaatcctgatgtggaaagcaggggtttctggtctactggctagagctaaggaagttgaaaaggaaagctcacttctttggaggcacctgtccagaagcctggcctaggcagcttcaacctttgaacttactttttgaaatgaaaagtaatttatttgttttgctacatactgttccagacttttaaaggggacaatgaaggtgactgtggggaggagcatgtcaggtttgggcttggttgttttagaagcacctgggtgtgcctacctactcctcttttcttttaaaagggcccacaatgctccaatttcctgtctcctttagagagacatgaaactatcacaggtgctggatgacaataaaagtttatgttcctaaa

SEQ ID NO: 184596 - DNA, 519 bp, Homo sapiens
  Payload ID: 16347
  Gene Symbol: SLC7A7
  Gene Name: solute carrier family 7 (amino acid transporter light chain, y+L system), member 7
  ENST ID: ENST00000555251
  CDS Start-End: 153-519
cattttcctctcagctgtctcctgttcggtgttttccagcatgtgctgcctggctgcagctgtctccctgccttggctcggggtgatatctctccagcagcaactctgggggcaatgccaggaagctggtgaagggtttcctctcctccaccatggttgacagcactgagtatgaagtggcctcccagcctgaggtggaaacctcccctttgggtgatggggccagcccagggccggagcaggtgaagctgaagaaggagatctcactgcttaacggcgtgtgcctgattgtggggaacatgatcggctcgggcatctttgtttcccccaagggtgtgctcatatacagtgcctcctttggtctctctctggtcatctgggctgtcgggggcctcttctccgtctttggggccctttgttatgcggaactgggcaccaccattaagaaatctggggccagctatgcctatatcctggaggcctttggaggattccttgctttcatcagactctggacct

SEQ ID NO: 184597 - DNA, 1158 bp, Homo sapiens
  Payload ID: 16347
  Gene Symbol: SLC7A7
  Gene Name: solute carrier family 7 (amino acid transporter light chain, y+L system), member 7
  ENST ID: ENST00000554517
  CDS Start-End: 384-1121
gttctcctaactagcaccttcccctctcccctgactcagctggtagcccctcctccccgcacctgcccaaaggtcactggacaggtctcttaaccttcattaactgtgcctatgtcaaatggggaaccctggtacaagatattttcacctatgctaaagtattggcactgatcgcggtcatcgttgcaggcattgttagacttggccagggagcctctactcattttgagaattcctttgagggttcatcatttgcagtgggtgacattgccctggcactgtactcagctctgttctcctactcaggctgggacaccctcaactatgtcactgaagagatcaagaatcctgagaggaacctgcccctctccattggcatctccatgcccattgtcaccatcatctatatcttgaccaatgtggcctattatactgtgctagacatgagagacatcttggccagtgatgctgttgctgtgacttttgcagatcagatatttggaatatttaactggataattccactgtcagttgcattatcctgttttggtggcctcaatgcctccattgtggctgcttctaggcttttctttgtgggctcaagagaaggccatctccctgatgccatctgcatgatccatgttgagcggttcacaccagtgccttctctgctcttcaatggtatcatggcattgatctacttgtgcgtggaagacatcttccagctcattaactactacagcttcagctactggttctttgtggggctttctattgtgggtcagctttatctgcgctggaaggagcctgatcgacctcgtcccctcaagctcagcgttttcttcccgattgtcttctgcctctgcaccatcttcctggtggctgttccactttacagtgatactatcaactccctcatcggcattgccattgccctctcaggcctgcccttttacttcctcatcatcagagtgccagaacataagcgaccgctttacctccgaaggatcgtggggtctgccacaaggtacctccaggtcctgtgtatgtcagttgctgcagaaatggatttggaagatggaggagagatgcccaagcaacgggatcccaaatctaactaaacaccatctggaatcctgatgtggaaagcaggggttt

SEQ ID NO: 184598 - DNA, 476 bp, Homo sapiens
  Payload ID: 16347
  Gene Symbol: SLC7A7
  Gene Name: solute carrier family 7 (amino acid transporter light chain, y+L system), member 7
  ENST ID: ENST00000555959
  CDS Start-End: 386-476
ttgcttaaatccataggcatttgtctggccttcccttttactgctggctgggaaggaggagcatcagaccacagatcctggaaggcacttctctccctgactgctgctcacactgccgtgagaacctgcttatatccaggaccaaggagtgagtggtgaagtgggtctacttgggctttgccagggctgaagactccagctaagggttaagggatgctctttgggcaggaggatggttgtgggtttccagcaggtttctgaagcctttagttttggcagacgtagagtccttggggaaaagagcagtgtcatgagacgctcccacagattagctgctggtaggggcaatgccaggaagctggtgaagggtttcctctcctccaccatggttgacagcactgagtatgaagtggcctcccagcctgaggtggaaacctcccctttgggtgatggggccagcccagggccggagcagg

SEQ ID NO: 184599 - DNA, 596 bp, Homo sapiens
  Payload ID: 16347
  Gene Symbol: SLC7A7
  Gene Name: solute carrier family 7 (amino acid transporter light chain, y+L system), member 7
  ENST ID: ENST00000555911
  CDS Start-End: 253-596
cctttccccctccctcactccttcctttgcgggctgcctcacctcctccacccttcttgcttaaatccataggcatttgtctggccttcccttttactgctggctgggaaggaggagcatcagaccacagatcctggaaggcacttctctccctgactgctgctcacactgccgtgagaacctgcttatatccaggaccaaggagtgagtggcaatgccaggaagctggtgaagggtttcctctcctccaccatggttgacagcactgagtatgaagtggcctcccagcctgaggtggaaacctcccctttgggtgatggggccagcccagggccggagcaggtgaagctgaagaaggagatctcactgcttaacggcgtgtgcctgattgtggggaacatgatcggctcgggcatctttgtttcccccaagggtgtgctcatatacagtgcctcctttggtctctctctggtcatctgggctgtcgggggcctcttctccgtctttggggccctttgttatgcggaactgggcaccaccattaagaaatctggggccagctatgcctatatcctggaggcctttggaggattcct

SEQ ID NO: 184600 - DNA, 9645 bp, Homo sapiens
  Payload ID: 16348
  Gene Symbol: SLC7A11
  Gene Name: solute carrier family 7 (anionic amino acid transporter light chain, xc- system), member 11
  Uniprot ID: Q9UPY5
  ENST ID: ENST00000280612
  CDS Start-End: 281-1786
ggtttgtaatgatagggcggcagcagcagcagcagcagcagtggtggaacgaggaggtggagaattgagagcacgatgcatacacaggtgtttctgagtagtaattagatcgctgtgaaggaaaaagcacacctttgagttttcacctgtgaacactatagcgctgagagagacagtctgaaagcagaggaagacatcgatcagtaacaccaagagacaccaaagttgaaagttttgttttctttccctctgttttatttttcccccgtgtgtccctactatggtcagaaagcctgttgtgtccaccatctccaaaggaggttacctgcagggaaatgttaacgggaggctgccttccctgggcaacaaggagccacctgggcaggagaaagtgcagctgaagaggaaagtcactttactgaggggagtctccattatcattggcaccatcattggagcaggaatcttcatctctcctaagggcgtgctccagaacacgggcagcgtgggcatgtctctgaccatctggacggtgtgtggggtcctgtcactatttggagctttgtcttatgctgaattgggaacaactataaagaaatctggaggtcattacacatatattttggaagtctttggtccattaccagcttttgtacgagtctgggtggaactcctcataatacgccctgcagctactgctgtgatatccctggcatttggacgctacattctggaaccattttttattcaatgtgaaatccctgaacttgcgatcaagctcattacagctgtgggcataactgtagtgatggtcctaaatagcatgagtgtcagctggagcgcccggatccagattttcttaaccttttgcaagctcacagcaattctgataattatagtccctggagttatgcagctaattaaaggtcaaacgcagaactttaaagacgccttttcaggaagagattcaagtattacgcggttgccactggctttttattatggaatgtatgcatatgctggctggttttacctcaactttgttactgaagaagtagaaaaccctgaaaaaaccattccccttgcaatatgtatatccatggccattgtcaccattggctatgtgctgacaaatgtggcctactttacgaccattaatgctgaggagctgctgctttcaaatgcagtggcagtgaccttttctgagcggctactgggaaatttctcattagcagttccgatctttgttgccctctcctgctttggctccatgaacggtggtgtgtttgctgtctccaggttattctatgttgcgtctcgagagggtcaccttccagaaatcctctccatgattcatgtccgcaagcacactcctctaccagctgttattgttttgcaccctttgacaatgataatgctcttctctggagacctcgacagtcttttgaatttcctcagttttgccaggtggctttttattgggctggcagttgctgggctgatttatcttcgatacaaatgcccagatatgcatcgtcctttcaaggtgccactgttcatcccagctttgttttccttcacatgcctcttcatggttgccctttccctctattcggacccatttagtacagggattggcttcgtcatcactctgactggagtccctgcgtattatctctttattatatgggacaagaaacccaggtggtttagaataatgtcggagaaaataaccagaacattacaaataatactggaagttgtaccagaagaagataagttatgaactaatggacttgagatcttggcaatctgcccaaggggagacacaaaatagggatttttacttcattttctgaaagtctagagaattacaactttggtgataaacaaaaggagtcagttatttttattcatatattttagcatattcgaactaatttctaagaaatttagttataactctatgtagttatagaaagtgaatatgcagttattctatgagtcgcacaattcttgagtctctgatacctacctattggggttaggagaaaagactagacaattactatgtggtcattctctacaacatatgttagcacggcaaagaaccttcaaattgaagactgagatttttctgtatatatgggttttgtaaagatggttttacacactatagatgtctatactgtgaaaagtgttttcaattctgaaaaaaagcatacatcatgattatggcaaagaggagagaaagaaatttattttacattgacattgcattgcttccccttagataccaatttagataacaaacactcatgctttaatggattatacccagagcactttgaacaaaggtcagtggggattgttgaatacattaaagaagagtttctaggggctactgtttatgagacacatccaggagttatgtttaagtaaaaatccttgagaatttattatgtcagatgttttttcattcattatcaggaagttttagttatctgtcatttttttttttcacatcagtttgatcaggaaagtgtataacacatcttagagcaagagttagtttggtattaaatcctcattagaacaaccacctgtttcactaataacttacccctgatgagtctatctaaacatatgcattttaagccttcaaattacattatcaacatgagagaaatcaccaacaaagaagatgttcaaaataatagtcccatatctgtaatcatatctacatgcaatgttagtaattctgaagttttttaaatttatggctatttttacacgatgatgaattttgacagtttgtgcattttctttatacattttatattcttctgttaaaatatctcttcagatgaaactgtccagattaattaggaaaaggcatatattaacataaaaattgcaaaagaaatgtcgctgtaaataagatttacaactgatgtttctagaaaatttccacttctatatctaggctttgtcagtaatttccacaccttaattatcattcaacttgcaaaagagacaactgataagaagaaaattgaaatgagaatctgtggataagtgtttgtgttcagaagatgttgttttgccagtattagaaaatactgtgagccgggcatggtggcttacatctgtaatcccagcactttgggaggctgagggggtggatcacctgaggtcgggagttctagaccagcctgaccaacatggagaaaccccatctctactaaaaatacaaaattagctgggcatggtggcacatgctggtaatctcagctattgaggaggctgaggcaggagaattgcttgaacccgggaggcggaggttgcagtgagccaagattgcaccactgtactccagcctgggtgacaaagtcagactccatctccaaaaaaaaaagattatatatatatatatatgtgtgtgtatgtgtgtgtgtgtgtgtgtgtgtatatatatatatatatatatacacacacacacacacactttttatatatatatatatatatatatagtggaacttacaaatgagagtaatataatgatgaaattttgaactgttatttataaacatctaaggtaaaatggttagtcatggccagagtatgtttcatcctttaatttttgtccatttgaaaataaggatttttgaaagaattataccaattaaaattattaaaggcaaacatagaattcataaaaaattgtccaaagtagaaatgatgacctataatttggagcatttccaattcagtaatttcaattttgctcttgaaaacatttaatatatatccaagactgacatttctttagctgaacctaacgtttgggtctctgagtgaatttataataactccttccttccttagcatagggttttcaaaatttgatttataattcctatttccagtaaatattgttcatttgtccacatctctccctatgatatgttgctggaggtaagaatttctttcatattcctattttttttttccccatagactaggctcatagaatttaaacaagcaaattttcctgagctttttcttgccaaatgaaagaagactggtaaattctcatagagaggtttgtgtagttcttggctcttcctggggttaatgtgcttatattcacagtggcaaattggtctcagactttaatttatttatttttgatttgaatttctctttaaaagtatcaatttaaaaggtaactagaattattctttctcattttcaaaagtgatttttgcattattaaatttccctgccattgtaatgccatttcacgcagaaaaaaagtcagccagtaattaagaaaaaaagtgatggagattaagtagtattttggcttatttttaggactcatcatgagaagacacagttcctttaatcaggaaattaatatccataattttcactcaaaattgcagtatgtaaagcagattctcaaaaactctcctgaacacttatttatatatatgtttttatataagtaaaatttttctcatatttttatacgatatgcacacacacacatacatgcacatactacttactacatgttctgtacttgtactttgtaccatgcatattcaaatgtttatatacataagtttattataacataaacagtaaaagtaatgaatactgtttaaaataactaatatagtattttttaatttttgtggggatggattctcaaatacttgtgattttaaaagattctaaagctaaaacacaacttgattttaaaaagaatgattctccttacacaattataaatatttgcagtaaatattttccttataatactgttttgaccccatttaaaaagtattagattatattcctttgatccaatgaaaactgaaccttataaatggttagctgaaagtagaccttattcttgtccttctttagaagagtaaagatttgtcctagggaagatggctgacttcggttcccaacatgcgtatgcatttagactgtagctcctcagccctgtggacacaaaatttggacagcttattaggttacgttagcaatgcatgacggtttctccaacactaagatattcacgttgaaacagatttcctgttcgtcttatgtgtctggtaaaattgtttccccaattacaatttgacatatcaatagagggttaacaagagtataattacataacagaattcctcatgaactgtaatcagtctacaggaaaatcattattttatcttgatttgcagatgaatatactgctaagaaagggagcaactctgacctttgttaaagttgatcttttgtaattgaggtataaggtatgaaaagataaaaaaccgaaggccagagaatcaggaaatgaaagatagtatggactgaaggtaacaatattttaatgttatgcaatatagtcagagaaatattaaaaattagttgtttgctgtgcataggtggatctcgcaggaagctaatgaaacctaagcttcagtgcctctcacttagacatgttccattcgaggtcctgaacctaactttgtattaggaattctgtactaattttgttgaagaagaccagcaaagttgtgtacacttctacccccacaaaatctgcattgtccatgtgagtaaagtaaaataattcctgttatttttttctgttagaaataagtatggaggatatgtttttaaaaatttatgagttaattgaaatatccatatataacaagtgactttctcacaatatatatgatgtgatatatagggagatagtttcactttcatcatattttatacgttgattctgaactatagaaaaataataaatgggattttaattatagctcttagttgggaaagaaatatagagagatgtgggatttgaatgcccatgaaagacattttattttacttgaatatattcttgcttcactttaccctccataatatgttgtacattagtgctgatcaagtttacagagttacattttgctttcctaaccattcagtcaggaattaaaatatggcattgtataacaactgggaagaagctcatagtggatataaattagagtagataatgggtcaccttgatagcctctgtttacattacttgtatatgggcaaaataattattacctatacgtgtatttaagcttaattttcatataaacagtatttttaatctatgttaaaatagataatatctaaaagtgtgatctctaggtagtccttagtttattagtactgtacttcaaaaagatttttaaataggtccggcacggtggctcatgcctgtaatcccagcactttgggaggctgaggcgggcgaatcacctgaggtcaggagttcgagatcagcctggccaacatggtgaaaccctgtctcaactaaaaatataaaaattagccgggcgtggtggcaggcgcctgtaatcccagctactcgggaggctgaggcaggagaatcacttgaacccaaggggcagaagctgcagttagccaagatcgcatcattgcactccagcctaggggacaagagcgcgagacttcatctcaaaaaaaaaaaaaaaaaaaaaaaaagatttttaaataatagctaaaggtatgctctctaggtcatccttagtttattagtactgtacttaaaaattattttttaatagtcaattttgggagataattatttctttccttatattttccaattagttggtgtctaaaaataaatgttttgtctaattttagatcaggtatacattcacaaaagcataaatcatagtctcacaggaaattcaccaattttccatatgtcgtgagataactgtcctttctacaacctcataacaatgaatttatataattacctagattttcttagtgtgaatctacccattagttttattttcttggtagttatttttttccctcctctctgttactattggccttaaaatacacagaggacggttacagtgtcctaatagctgttacatgtgtgtgtttcagcgtacttgaatcaagtgtacatttatagtaccaataaccgcctttacagctttacagttaacaattctctcacaaaactgtagagcattaggcatctgagagccatagagggccaactttgttccagagtgaacatgctttttttcctcaacatatacactactgattttttttaaaagtatgactttcaagtgaattaatgtattggttaggagaactgcttgctaagtccttattacctcttgttaaagcctcagaaggccgtgctgaaagccagaggggaaaaaaagagtaatgcacaggtatctcttttgcagtggtgactgtattttgagtaccttgtgtgacagggtattattacagcatcttgtgggaaaacctattaggcctttgcatgttaaagctgtataatttgttgggttgtgagtggtctgacttaaatgtgtattataaaatttagacatcaaattttcctactaactaactttattagatgcatacttggaagcacagtcatatcacactgggaggcaatgcaatgtggttacctggtcctaggtttgaactgtcttatttcaaaagatttctgaattaatttttccctagaatttctccttcattccaaagtacaaacatactttgaagaatgaaacagattgttcccatgaatgtatgctcatactcgactagaaacgatctatgttaaatgactgtgtatatgaattatttcaagtactaccccaaataactttcttattgctctgaaagaagaaaagcaatgtaaatcactatgattattgcacaaacaaccagaattctccaacaattttaagtaatctgatcctcttcttggagaaaattgttacctaatagtttttccttatgaatgttattactactggtataaatcaaatttctataaatttcctacttaagtcttaagaactgggttcttcctttgatgttattcatgttcagaaaggaaacaacactttactcttttaggacaattcctagaatctatagtagtatcaggatatattttgctttaaaatatattttggttattttgaatacagacattggctccaaattttcatctttgcacaatagtatgacttttcactagaacttctcaacatttgggaactttgcaaatatgagcatcatatgtgttaaggctgtatcatttaatgctatgagatacattgttttctccctatgccaaacaggtgaacaaacgtagttgttttttactgatactaaatgttggctacctgtgattttatagtatgcacatgtcagaaaaaggcaagacaaatggcctcttgtactgaatacttcggcaaacttattgggtcttcattttctgacagacaggatttgactcaatatttgtagagcttgcgtagaatggattacatggtagtgatgcactggtagaaatggtttttagttattgactcagaattcatctcaggatgaatcttttatgtctttttattgtaagcatatctgaatttactttataaagatggttttagaaagctttgtctaaaaatttggcctaggaatggtaacttcattttcagttgccaaggggtagaaaaataatatgtgtgttgttatgtttatgttaacatattattaggtactatctatgaatgtatttaaatatttttcatattctgtgacaagcatttataatttgcaacaagtggagtccatttagcccagtgggaaagtcttggaactcaggttacccttgaaggatatgctggcagccatctctttgatctgtgcttaaactgtaatttatagaccagctaaatccctaacttggatctggaatgcattagttatgaccttgtaccattcccagaatttcaggggcatcgtgggtttggtctagtgattgaaaacacaagaacagagagatccagctgaaaaagagtgatcctcaatatcctaactaactggtcctcaactcaagcagagtttcttcactctggcactgtgatcatgaaacttagtagaggggattgtgtgtattttatacaaatttaatacaatgtcttacattgataaaattcttaaagagcaaaactgcattttatttctgcatccacattccaatcatattagaactaagatatttatctatgaagatataaatggtgcagagagactttcatctgtggattgcgttgtttcttagggttcctagcactgatgcctgcacaagcatgtgatatgtgaaataaaatggattcttctatagctaaatgagttccctctggggagagttctggtactgcaatcacaatgccagatggtgtttatgggctatttgtgtaagtaagtggtaagatgctatgaagtaagtgtgtttgttttcatcttatggaaactcttgatgcatgtgcttttgtatggaataaattttggtgcaatatgatgtcattcaactttgcattgaattgaattttggttgtatttatatgtattatacctgtcacgcttctagttgcttcaaccattttataaccatttttgtacatattttacttgaaaatattttaaatggaaatttaaataaacatttgatagtttacataa

SEQ ID NO: 184601 - DNA, 797 bp, Homo sapiens
  Payload ID: 16348
  Gene Symbol: SLC7A11
  Gene Name: solute carrier family 7 (anionic amino acid transporter light chain, xc- system), member 11
  ENST ID: ENST00000509248
  CDS Start-End: 1-228
gcaattctgataattatagtccctggagttatgcagctaattaaaggtcaaacgcagaactttaaagacgccttttcaggaagagattcaagtattacgcggttgccactggctttttattatggaatgtatgcatatgctggctggttttacctcaactttgttactgaagaagtagaaaaccctgaaaaaccttttctgagcggctactgggaaatttctcattagcagttccgatctttgttgccctctcctgctttggctccatgaacggtggtgtgtttgctgtctccagcaccctttgacaatgataatgctcttctctggagacctcgacagtcttttgaatttcctcagttttgccaggtggctttttattgggctggcagttgctgggctgatttatcttcgatacaaatgcccagatatgcatcgtcctttcaaggtgccactgttcatcccagctttgttttccttcacatgcctcttcatggttgccctttccctctattcggacccatttagtacagggattggcttcgtcatcactctgactggagtccctgcgtattatctctttattatatgggacaagaaacccaggtggtttagaataatgtcggagaaaataaccagaacattacaaataatactggaagttgtaccagaagaagataagttatgaactaatggacttgagatcttggcaatctgcccaaggggagacacaaaatagggatttttacttcattttctgaaagtctagagaattacaactttggtgataaacaaaagga

SEQ ID NO: 184602 - DNA, 1878 bp, Homo sapiens
  Payload ID: 16349
  Gene Symbol: SLC7A13
  Gene Name: solute carrier family 7 (anionic amino acid transporter), member 13
  Uniprot ID: Q8TCU3
  ENST ID: ENST00000297524
  CDS Start-End: 105-1517
agaattattttatttcaggaatccatcaacatcctttgcagctacataggcaggaaaatctagaaattgtaatttatatagaattttaaaactcttcaattacaatggatagaggggagaaaatacagctcaagagagtgtttggatattggtggggcacaagttttttgcttattaatatcattggtgcaggaatttttgtgtcccccaaaggtgtgttggcatactcttgcatgaacgtgggagtctccctgtgcgtttgggctggctgtgccatactggccatgacatcaactctttgctctgcagagataagtataagcttcccatgcagtggagctcaatactattttctcaagagatactttggctccacggttgcttttttgaatctctggacatccttgtttctggggtcaggggtagttgctggccaagctctgctccttgctgagtacagcatccagcctttttttcccagctgctctgtcccaaagctgcctaagaaatgtctggcattggccatgttgtggattgtaggaattctgacttctcgtggtgtgaaagaagtgacttggcttcagatagctagctcagtgctgaaagtgtccatacttagcttcatttccctaactggagtagtgttcctgataagagggaaaaaggagaatgtagaacgatttcagaatgcttttgatgctgaacttccagatatctctcaccttatacaagccatcttccaaggatattttgcatattcaggcggggcatgctttacacttatagcaggggagctgaagaagcccagaacaacaattcccaaatgcatatttactgcgttacctctggtgactgtagtttatttactggttaacatttcctatctgactgttctgacacccagggaaattctctcttcagatgctgtagctatcacatgggctgatcgagcttttccctcattagcatggattatgccttttgctatttctacctcattatttagcaaccttctgatttctatatttaaatcatcgagaccaatatatcttgcaagccaagagggccagctgcctttgctatttaatacacttaatagtcactcttctccatttacagctgtgctactacttgtcactttgggatcccttgcaattatcttaacaagtctaattgatttgataaactatatttttttcacgggttcattatggtctatattattaatgataggaatactaaggcggagataccaggaacccaatctatctataccttataaggtgtttttgtcatttccattagcaacaatagtcatcgacgtgggcttggttgtgataccattggtaaagtctccaaatgtgcattatgtctacgtgcttctgttagttctcagcggattactattttacatacctttaatacattttaaaataagattggcttggtttgagaagatgacttgctatttacaattactatttaatatttgcctccctgatgtgtctgaggaatagatgtcggaagtgcaaactcttaaaaaattggccttctaaaaaacatatatcagattccaaatcaaggttaaacatatgatagaacattcatggtgaaattcctatggtaaatatttttttctcaaatgaaataagtaatgtatacaaaagtgcctaagacagtacctggcttcagagtcactaagaaattgctaaaagctctgcttcgcatggtaaaaaacttaagtcctggtttgcgtagcttgatagagtgattatacaacttccattctctcactttttttttctgtatcccaccccttttctactgaatttgtggggatcctataataaaagtgaatgactaaaaattttaaaagca

SEQ ID NO: 184603 - DNA, 1618 bp, Homo sapiens
  Payload ID: 16349
  Gene Symbol: SLC7A13
  Gene Name: solute carrier family 7 (anionic amino acid transporter), member 13
  Uniprot ID: Q8TCU3
  ENST ID: ENST00000419776
  CDS Start-End: 84-1385
tccatcaacatcctttgcagctacataggcaggaaaatctagaaattgtaatttatatagaattttaaaactcttcaattacaatggatagaggggagaaaatacagctcaagagagtgtttggatattggtggggcacaagttttttgcttattaatatcattggtgcaggaatttttgtgtcccccaaaggtgtgttggcatactcttgcatgaacgtgggagtctccctgtgcgtttgggctggctgtgccatactggccatgacatcaactctttgctctgcagagataagtataagcttcccatgcagtggagctcaatactattttctcaagagatactttggctccacggttgcttttttgaatctctggacatccttgtttctggggtcaggggtagttgctggccaagctctgctccttgctgagtacagcatccagcctttttttcccagctgctctgtcccaaagctgcctaagaaatgtctggcattggccatgttgtggattgtaggaattctgacttctcgtggtgtgaaagaagtgacttggcttcagatagctagctcagtgctgaaagtgtccatacttagcttcatttccctaactggagtagtgttcctgataagagggaaaaaggagaatgtagaacgatttcagaatgcttttgatgctgaacttccagatatctctcaccttatacaagccatcttccaaggatattttgcatattcaggggagctgaagaagcccagaacaacaattcccaaatgcatatttactgcgttacctctggtgactgtagtttatttactggttaacatttcctatctgactgttctgacacccagggaaattctctcttcagatgctgtagctatcacatgggctgatcgagcttttccctcattagcatggattatgccttttgctatttctacctcattatttagcaaccttctgatttctatatttaaatcatcgagaccaatatatcttgcaagccaagagggccagctgcctttgctatttaatacacttaatagtcactcttctccatttacagctgtgctactacttgtcactttgggatcccttgcaattatcttaacaagtctaattgatttgataaactatatttttttcacgggttcattatggtctatattattaatgataggaatactaaggcggagataccaggaacccaatctatctataccttataagagtctcattcttgtcgtccaggctggagaagctggagtgcagtggcatgatcttggcttgctgcaacctctgcttcctgggttcaagagattctcctgcctcagcctcccaagtagctgggattacaggtgtttttgtcatttccattagcaacaatagtcatcgacgtgggcttggttgtgataccattggtaaagtctccaaatgtgcattatgtctacgtgcttctgttagttctcagcggattactattttacatacctttaatacattttaaaataagattggcttggtttgagaagatgacttgctatttacaattactatttaatatttgcctccctgatgtgtctgaggaatagatgtcggaagtgcaaactctt

SEQ ID NO: 184604 - DNA, 7347 bp, Homo sapiens
  Payload ID: 16350
  Gene Symbol: SLC7A1
  Gene Name: solute carrier family 7 (cationic amino acid transporter, y+ system), member 1
  Uniprot ID: P30825
  ENST ID: ENST00000380752
  CDS Start-End: 388-2277
gcactgctgatgaaacctggcgccggaacccgccagccctcggcgcccattcagtccgcgcaggcaggtgtgagcagcgggtcaactacctggcaggcgcgcacgcggccgcgggctcccgctaaccgcagcctccactcctctccccgcgcgccgcgcccccgccccgccccgccccgcccggtctcgccggccgagcgtccgttggtccttgagcgcgtccgacagtctgtctgttcgcgatcctgccggagccccgccgccgccggcttggattctgaaaccttccttgtatccctcctgagacatctttgctgcaagatcgaggctgtcctctggtgagaaggtggtgaggcttcccgtcatattccagctctgaacagcaacatggggtgcaaagtcctgctcaacattgggcagcagatgctgcggcggaaggtggtggactgtagccgggaggagacgcggctgtctcgctgcctgaacacttttgatctggtggccctcggggtgggcagcacactgggtgctggtgtctacgtcctggctggagctgtggcccgtgagaatgcaggccctgccattgtcatctccttcctgatcgctgcgctggcctcagtgctggctggcctgtgctatggcgagtttggtgctcgggtccccaagacgggctcagcttacctctacagctatgtcaccgttggagagctctgggccttcatcaccggctggaacttaatcctctcctacatcatcggtacttcaagcgtagcgagggcctggagcgccaccttcgacgagctgataggcagacccatcggggagttctcacggacacacatgactctgaacgcccccggcgtgctggctgaaaaccccgacatattcgcagtgatcataattctcatcttgacaggacttttaactcttggtgtgaaagagtcggccatggtcaacaaaatattcacttgtattaacgtcctggtcctgggcttcataatggtgtcaggatttgtgaaaggatcggttaaaaactggcagctcacggaggaggattttgggaacacatcaggccgtctctgtttgaacaatgacacaaaagaagggaagcccggtgttggtggattcatgcccttcgggttctctggtgtcctgtcgggggcagcgacttgcttctatgccttcgtgggctttgactgcatcgccaccacaggtgaagaggtgaagaacccacagaaggccatccccgtggggatcgtggcgtccctcttgatctgcttcatcgcctactttggggtgtcggctgccctcacgctcatgatgccctacttctgcctggacaataacagccccctgcccgacgcctttaagcacgtgggctgggaaggtgccaagtacgcagtggccgtgggctccctctgcgctctttccgccagtcttctaggttccatgtttcccatgcctcgggttatctatgccatggctgaggatggactgctatttaaattcttagccaacgtcaatgataggaccaaaacaccaataatcgccacattagcctcgggtgccgttgctgctgtgatggccttcctctttgacctgaaggacttggtggacctcatgtccattggcactctcctggcttactcgttggtggctgcctgtgtgttggtcttacggtaccagccagagcagcctaacctggtataccagatggccagtacttccgacgagttagatccagcagaccaaaatgaattggcaagcaccaatgattcccagctgggctttttaccagaggcagagatgttctctttgaaaaccatactctcacccaaaaacatggagccttccaaaatctctgggctaattgtgaacatttcaaccagcctcatagctgttctcatcatcaccttctgcattgtgaccgtgcttggaagggaggctctcaccaaaggggcgctgtgggcagtctttctgctcgcagggtctgccctcctctgtgccgtggtcacgggcgtcatctggaggcagcccgagagcaagaccaagctctcatttaaggttcccttcctgccagtgctccccatcctgagcatcttcgtgaacgtctatctcatgatgcagctggaccagggcacctgggtccggtttgctgtgtggatgctgataggcttcatcatctactttggctatggcctgtggcacagcgaggaggcgtccctggatgccgaccaagcaaggactcctgacggcaacttggaccagtgcaagtgacgcacagccccgccccccggaggtggcagcagccccgagggacgcccccagaggaccgggaggcaccccaccctccccaccagtgcaacagaaaccacctgcgtccacaccctcactgcagccaaaggtgcaattacttgacctgcagccccagcccaccctcggctctgcagccggttctccgggccctggtcacctccagacagctgcctggccggggccactaggctgcggctggccactgtgtctcctcacttctctgaacaaagcagttcctcccctaccagctcagccccgagctgccgcagcctcaggcagaacggaggtcaccttctctccttatcttgggaaccaggccttcctcccggggactgttctgggattgaaattgtgcatactccaaactttcgcagccatcttcccgctcagccccagacacccagcaatcaagccagatgagtaccacaaaacagtgtgtccccagcagctccccaccccagagccaaatgacagtagtgcacttaaaaaggaaaatcaggcctgttgtccttctccggttgcattcagatgggtcattagggccggaccctgcctgccccttggcttctcagggctttgctctgacaccatgacagctgcccggggctgagggcagctggctccactcaaatgaggaagaagggatcactcccattagggcctgctttgcttatgcatgtgtgtgcacatgcatgtaaaccagggaccttcagctcacggcctccaggcctgggccagttcttgctgctcctgccgtctcccccgactggctgtgtcctgagtaactggaacatgagacagtatctgcaggactggccccatggtggccgagtcagaagtctgtttcctgtgagtcgccaccgttcactcagtcttgccctcccatgctttggagccagtctggtggctcctgtaaggttctcaaggctggtggcagctcagtctggggtcaggacatgtcggggtcatgcgtttctggccctgacataagctgtctggcctctctgtgacatgatgaaattgaaatcaatccacagtccatgaaattgtgacactccaccagattaagttagggcataacattaacttggaaatggccatgtcatcacccctgcggctgtcctatagctgagatgcgtgggtcgcaggggaggtgatttctaggcatattgctgtcccttttgtgtatctgtcatccggatgcttcggaccccacgcctctgcaagtgggagagacccgagcatcctccccacccccatagctccagtgcacgccacccccgtcttgcctgggtcggggcctgcggccagcaccatttcacacacactccttgtagatgggagccagaggaaacctgaacgtgggtggagcgttccactgagtctacttcaggagacagaaggcccatgctgatgggggaggaggagggatgtgggcattttggacaccaggggaaatggaaatgctgctttcaaaacttagtttcctttccatttcttcctagtctggcctttgacacaaatctggtagaaagaagcctgataaattgagggcacttgtaccctccctgtgcccccagaaggttcttggagagaagtgcaagaatttgtgaacacggcggtggagggcgggtggatggccatgggctgagcctccgtatcaggcctgctcaccttgctgggagctttattctgatctcattttgaatgttccagagggagcatcataagagcccagagctccgatttccaaagagtgatattgacatttatggagattggtgttgtaacatattttgataaatactaacttattttgttggggttttggttgtctcttgtcttaggacctggtagttatttgcttgatttttttttccgttattttctacataggcaaagagaattcgagggatagacagtctccaagaaaagtgaagtggtgggagagaattgcttttttcttttttttcttttctctagtttttctttctggctgagatttccgtgcaagacagcacccaatagactatttagagttgacatttgacattttaatgggcgccatggctcattttgtagattgagaaggtgcgtctcccctgctccaagtctcatcatgacagcgtgctgacagctgggagtctgtggccttcctcacgcagaggccttaaagctggacacagaagcacgcctaggctgggcagggatgggacccatgccccctccttagaggacgggcttcctggttaggaaaggacacgtgggggtgccttgcataatagttcactggtcaccgtgcttttatgagtagtgtttttgtgcacttgccaggggttttctctctgtgtgagaggggagtgatttaagcaatggtgtctggagtaagccttacaattttaatagactttttcttatcatatccctcatttctttccctgaaataaaaatacacacaagcaaaaaaaaaatgatagtttcacatctcttagttcccttgcccaaacaagaatattcttagttccactggccaggattttcctacatagtcagaacttacacattactagaggcacacccaccaaggagtattgtgtctacttttatctgtgcaccagccacaaatacccacattggaaagacccatttgtgatgggtaaacatcccttcctgtctcccacaacccctgtgactgccctgcatgtgttcatgacctccgaaggcccaaattcatgaagcagcaaacccagcagatctccacccccctgcctcaggacctctgctgaagagggggatgaagtgggtctccagggaggcagtgggggccttgttggcagctggctcgggagccggcttacaggagggcagctctgcagttgggaggggcaccgtccggaggagaccaggcctctacacaccccccactctacttatcatccctgctcacacacccttgtccaaggctttatgcatcggatttatttttccaaatcaagaggacagtgatagatgcattttccccaggctgtctcagaaaggtcgctaaatgtatactgttgtcagaattgctgagatctccccccacttttggtttttgcagcagtaaaaactctttccactgtgacttattttctctctcaggcagccagccacctggtcccttgtgctgactctagcacagtggccaggatccaatacgagtccaggggtgaccgcaggatggtgggggcagcgggcttctccacctaccccagccaccaaggccctgacgcactgcctcctgcaccttcagcacatccctgtgcacagctggaagggtgcatggcccgctcacctttgttcagatgggtggaaacgctgatgataccagctcctccctgccgtgcccctgccacggagcaggcattgtgaactggctggtgtttgcagtcccacgtggcatggcctccagcccaacccacagtggagactggagacagggcaatgagtctggtggggggcacgtggacatgccccataggggccccacccagacttaacaggcaaggtcctgggcattgcgcgacgcaggactcaatgctaaagcaagcctgcctggctctgtgccagggcccctcttctgattcacacatcccatttttacacagacccttccttcttaataaaggctgacagttctgttggcagccaagaacccacaccatgaagacagggagtgaggggcctttgtgcccaactccagcacagctgcgttctggggtgtgtgagaggcatgttcgtgtctgtgcgctggtggtctcgtgagacagttccgaggacggggaaattgcagggtggtgggggcgtgaggcttatatgtggaactgatgcagagttcgcctgcagacggatctggatatacactatgtataattgttacgtgtaatttaaaatatatctgtttgccatcgtcatgagaagattatatgtaaggctctgaagggagagggagatgtacattctgccaggctcctggggaccttatccgagtcatgaaattgattactgttgatccagtggtgcaagaagctacactccatgtgtcatcacgcttatgactcctaatgtatttttaaggcaaaaaatgtcagccgactccatcttcacccctcgattcctcgagtccagcctttctgtgccagtgcttcactgagccacaacgctctcgccatcgggacccggctgggcctggagtctcggggcacagttgccatggagccctcctgggtcattctacaaatgtgctgagtgccagctgaaaaccccacaggagatggagtaccttggccaagcttaaagagaagattttctcagggtatttattagtgtgtccagcagggtcaggaagcaggatggaaagatgcactcagactgttaatttattaacaaggcaaatgattttgtgtttcttgatgacagactattaagtttgggacttattttcccatttgagaagttataatatatatttaagatgataagtttcctgcttaagttgtgcctttcagcttcaatgagtttaaggagcactaagggtaatgataccaatgagggttggtttattatcaaacctgaatagctgtggtttctccagtaaatattttcttctactgaacatggagccattattaagagttgtgtgttttttattatgtacatttgtatatttttttgcttgtttgatgttctatttttctaatagttttcttttagtttcttaaagttgtgatactagatttagattctgatgctaactgcaaatcaggttggtctctgctgggtctctcctgcttttattttactttaaggacaagtgtagttgtcgtccaccacctttcaaaaaatgtgaaactgccctgcctcccctttttgctgacaacactgtgtacattgaccacttcctaccatactttatgttgtaaaatcaaactcttttgtggtacattatctcatgcttctgcaaattcgaataaattctatggcttccatgtg

SEQ ID NO: 184605 - DNA, 547 bp, Homo sapiens
  Payload ID: 16350
  Gene Symbol: SLC7A1
  Gene Name: solute carrier family 7 (cationic amino acid transporter, y+ system), member 1
  ENST ID: ENST00000450494
  CDS Start-End: 183-547
gatgtggccagtggtgtggatgtgaatattcatccctgtggaggaaaatagtggggtctctgagatttgattctgaaaccttccttgtatccctcctgagacatctttgctgcaagatcgaggctgtcctctggtgagaaggtggtgaggcttcccgtcatattccagctctgaacagcaacatggggtgcaaagtcctgctcaacattgggcagcagatgctgcggcggaaggtggtggactgtagccgggaggagacgcggctgtctcgctgcctgaacacttttgatctggtggccctcggggtgggcagcacactgggtgctggtgtctacgtcctggctggagctgtggcccgtgagaatgcaggccctgccattgtcatctccttcctgatcgctgcgctggcctcagtgctggctggcctgtgctatggcgagtttggtgctcgggtccccaagacgggctcagcttacctctacagctatgtcaccgttggagagctctgggccttcatcaccggctggaacttaatcctctcctacat

SEQ ID NO: 184606 - DNA, 7560 bp, Homo sapiens
  Payload ID: 16351
  Gene Symbol: SLC7A2
  Gene Name: solute carrier family 7 (cationic amino acid transporter, y+ system), member 2
  Uniprot ID: P52569
  ENST ID: ENST00000004531
  CDS Start-End: 49-2145
tcccaaaacagaaagagcagatgtctcaccacgaaactagcaactggaatgaagatagaaacaagtggttataactcagacaaactaatttgtcgagggtttattggaacacctgccccaccggtttgcgacagcaagtttctcctgtcgccttcgtcagacgtcagaatgattccttgcagagccgcgctgacctttgcccgatgtctgatccggagaaaaatcgtgaccctggacagtctagaagacaccaaattatgccgctgcttatccaccatggacctcattgccctgggcgttggaagcacccttggggccggggtttatgtcctcgctggggaggtggccaaggcagactcgggccccagcatcgtggtgtccttcctcattgctgccctggcttcagtgatggctggcctctgctatgccgaatttggggcccgtgttcccaagacggggtctgcatatttgtacacctacgtgactgtcggagagctgtgggccttcatcactggctggaatctcattttatcgtatgtgataggtacatcaagtgttgcaagagcctggagtggcacctttgatgaacttcttagcaaacagattggtcagtttttgaggacatacttcagaatgaattacactggtcttgcagaatatcccgatttttttgctgtgtgccttatattacttctagcaggtcttttgtcttttggagtaaaagagtctgcttgggtgaataaagtcttcacagctgttaatattctcgtccttctgtttgtgatggttgctgggtttgtgaaaggaaatgtggcaaactggaagattagtgaagagtttctcaaaaatatatcagcaagtgccagagagccaccttctgaaaacggaacaagtatctatggggctggtggctttatgccttatggctttacgggaacgttggctggtgctgcaacttgcttttatgcctttgtgggatttgactgcattgcaacaactggtgaagaagttcggaatccccagaaagctattcccattggaattgtgacgtctttgcttgtttgctttatggcctattttggggtctctgcagctttaacacttatgatgccgtactacctcctcgatgaaaaaagcccccttcctgtagcgtttgaatatgtgggatggggtcctgccaaatatgtcgtcgcagctggttctctctgcgccttgtcaacaagtcttcttggatccattttcccaatgcctcgtgtaatctatgctatggcggaggatgggttgcttttcaaatgtctagctcaaatcaattccaaaacgaagacaccaataattgctactttatcatcgggtgcagtggcagctttgatggcctttctgtttgacctgaaggcgcttgtggacatgatgtccattggcacactcatggcctactctctggtggcagcctgtgttctcatcctcaggtaccagcctggcttatcttacgaccagcccaaatgttctcctgagaaagatggtctgggatcgtctcccagggtaacctcgaagagtgagtcccaggtcaccatgctgcagagacagggcttcagcatgcggaccctcttctgcccctcccttctgccaacacagcagtcagcttctctcgtgagctttctggtaggattcctagctttcctcgtgttgggcctgagtgtcttgaccacttacggagttcatgccatcaccaggctggaggcctggagcctcgctctcctcgcgctgtttcttgttctcttcgttgccatcgttctcaccatctggaggcagccccagaatcagcaaaaagtagccttcatggttccattcttaccatttttgccagcgttcagcatcttggtgaacatttacttgatggtccagttaagtgcagacacttgggtcagattcagcatttggatggcaattggcttcctgatttacttttcttatggcattagacacagcctggagggtcatctgagagatgaaaacaatgaagaagatgcttatccagacaacgttcatgcagcagcagaagaaaaatctgccattcaagcaaatgaccatcacccaagaaatctcagttcacctttcatattccatgaaaagacaagtgaattctaacacttgcaggagcagagctggtcatcgtcttagcatacatatcctacactgagtaaaccgtaacgggatgtcatcagcatgctgggttgtcatgggtttgctgcatacatagttcaccctaatttatacttactcatctggacagcatctcctcagatggtgaattatgtgcacggggaaacctcctgagtggaagtttcattcatcagtgatgaatagcccccaaacagtgggagtgtgtatgtatgtgtgtatgtatgtatctatgtatatgcttgggaacatgagtgttacaagttagctggtgttttactattattgtgttacatttttccagtgtcgtcattaatcggtggcatatactgcacatactgaaatagagggaaatcactgaatgtaaagaggtttcatctatgccccctgcagttggggaaatactagtagctttaccttgtttgacttcattaatgtcagtttaggggatgccaaaaatgcagttactcatcatggtgtctgtcactggttaggggtaagatgaggggataaggaaagagacttttcaataagttgtgaatgccaacagtgggtttaatgcaaattttttttcctgtgaggtatgacagtttgctcaaacttcagccaacaggggtgtctgcttctgctgcactacacaggccaggagtggcattccatgccactagttggcatccttttgaacttttgtctcctttgcaaacagtggtcctaaaatacgaggtcttcacttgctgtgaatgacgtatccccagtcagggacttaagagaggcactgtgatatacttgggaccctttaaattaaaaagtgaagatagtcaccagggccagaaagctcatggagtggccgtaatgagaatatgtttgaagatcaaagagttagaccaatgcttgaataagtagaccccaagcatccttttctaaaaagtgacttaaaataagccaacagactctcccagaccacacaactagtggaatgattcctcctttttccattacttacttaatcacagtttagtttttttcttaacctcgtcaggcccagagttcacttctttgtttctctgtttcttttgtcttgtcttagagatgagggggctacagcagcatcatgcaaagagggaaagatgaagggatagaagaagagaaaatccccctgttctgataggaacggcctgttccattgttaaatggcaaatggcccaatttaagggctttggatctaatttgcctctgatgtttcctttggaaacatttaggaatatttttctccccctaccccataaattgtgtagcactttttattccatttgctttcaaatgactacactaagcctaataatacaagctccagtgttatacaataacccatcagtgattggggaatcaaacattttggtttaaaaaacatgattatttaaaactggaaactaaaaagaatcaaattgaattaaagctatataaacacagttaacccttgtaaatgagtaaacaaatttttacatgtaagattctctaattgtcatattttactttttaggattccctaatagtggactgtttatttgcagtgtatttgcttctcatgaactatttctcgtacaaatcattaaatagttcattggatgaggctgggtgacatttcccaggacagcatggtgaacattaccaggcatgctagctggcccgtgtaatcccaagacaaggaaaacattcgttttcctcatgggtcttccaagaaatgagctattttattgatgccattaaaaagcaagttgcgatggttttgtatagccaggagtttattgtgattaaacatcaaagaaacaggtagaaagcctgggtttctggctgctagcgttatagcatccatgacacagaactcattacggacattccacaacttccagggtgcacatggtaaaatctgaagcccagaattttctctcaagctgcgtggtttactggagagaaggagttggataagcacaggctcgggtattttggtagggactgtaggcatgctcataaatccttgctgttgtcacagtacgctgaaaacccgtttgattctatacccaatcaagaatagacccttcacacaggaaatgtgaacaattgttatatatgaacactcaaatcttttactgtaacgaaaccaagaaacttgtttagaatgtgataggcagctaaaactgttatgcccactgtgctcaatttgaagcagaatttagtgaaaaattatttttccacattgaaacactttgcagacacaaatatctatgaaaagatgctttgtcagccactgtgcctttttttctgtgaagactcaacggatgtgtgtgtttgtatgtttgttaacagttacatatgtttgtatgagtgtatatatatatctgtgtgtgtgtatctctaacgtcagtgtataagtaagttgggtttatggtgggctttgactatgtcattaggtgggtacaaaacccaactgatgtggagaaaaattgatgtttgatgttgatagatatgcttatacctaatttttagtttttaaactattttaaaatatactatgattttatatgtatatttcctatagactctttaagacgtatttataatgtttctaatatgaaatcactaaactctagtacattatagcaggtgctttgtaatctggaatggagaagaggtaggggcatttggggattcctgtttacttgctgctgccacaccttttccgactgatctgtcctggtaggtgtttattagcaaaagtcagtatcaccagctctttggcacctttctgtttctgcttgtgaattcataatgttttcaactaaattttttttttctttctcagaattacctaaatgttttgtagagttttgactagtaatcaatcaaaattatataaagtcttctccagtaattaagaaatacatatgcaaattcttttgtgattgagtaaaagcagcttaaattacttttcttttctacattaagaaatatattctcaacattttcagtgagaatttcttgtaatggcacctcaaattttatactcttaaaaaaaaacaataatttgtgaattaccaccaaaaggcaatggcagtcctacatttaagaatagagctatgcaaactctgttaaaaactatgaggaaaacttatattagaacttttgatatatactaaaatactgattatcttaatcacattttccccagagataaacattgagagaacgaaagccaaagtgtcatttaagagagatatatatgaaaaagtaacattaatatatagaactttaccatcaccagccgtagttgatagaaaatattagtttcagaattaccctcctttaaaaaataagagactatttgttttcttttaatttctatgaataaaagaaatttttaaaaactttaaaattttaaatattagtcaaaatactttttaagtcctgagtgcttacaggtagttgttaaaaaaattttaaggccaggcatggtggctcgctcacacctataatcctaggatcttgggaggtcgaggcaagctgatcgcttgagcccaggagtttaagaccggcctgagtagcatagcaagaccctgtctctacaaaaaaaacaaaaattagctgggcatggtggcatgcacatgtagtcagagctactgggggtgctgaggtgggaggatcgcttgagcccaggagagtgaggctgcagtgagctgagattacgccactgcactctagcctgggcaacggtgagaccctgcctcaaaaaaaataaaaataaaaataaaacactttaattagaatctatttttacctattttctaaatttatttaaatgcttagcaggaagcataaggaaaagccatcggcctccaatacccatgatgacagagggagcacttgagccttgccttccctcctcttaaatcagggtgtgttccgagattacagaacatcacaccttggcgtgatgaaatcatgccaagattctgactctccctttccggtgatactgctcatgatttctcctaatacgcttcaagcaactgttaccacaaaaaatacagtttccgcagggctttaaaggattgagtttagcatgtatatcatgcgttattaaagttcacgtgattcatgtgaaattaactgtcctttttgctagtgccaaaacagtgccttctctgcacactttacttgtttataaagttctcccacatgtccttaaatatcaagggggaaagtatggatattcgcgtagcaataatgccagcaaaggtcattttcattttttagtcatatagatatgaaaataagttcatatagatatgaaattgcttgactttattgttttggggagattttttttccttacatgattatattaaacactttaaaatagccttccggtttctggattttgagaagcctgatctgttattgttgtggttgttggtgtttgtaatattcattattgtttgtatatacacggtttagtcttactgatttcaaatgcattttgttattgctcaacccaactggtaacactgtttgctgggagcattatacttaactttgattcaccatggttgatgccactgccatgatcgctgggtcttaaagagctttccctagccactgacagccccgtggagatcataatcagggccccaggctggttccaggatcaggcagcctatagagtgtgagcatctatgtgtagctacccttgttgggtgggctcttagactgatggggtaggatatgaagtgaaagacttcaaatgcaagtaaggtagtttgggctccttaattccaaacatcccatgagtatatcaagatgaataaggaccaagggacctctgtgactcatagaagggctggctgaatcctgaagtagcatagtgggacctggtctacaatttatgcacatgcactgacagccttgctgtgccacgtgtctcaccaagacccagttgggaaagagcgtcatattgccaacaggttgggtttctctggcctacacctgattaatgggccctttatctttggtgtcccctaggagtgtccagttgttttattgctgtattttgttattgcagtacttaataaaaattgttgatagggcccaaaaccctacagaaattctatgtctgtaaaaaccaacaaaggcattggacttgtgtgaatgtacagggtttttttagtagtaattttaaatttaaatgttttaagtgatcatcagtgttcctttttacttataaagttggattcttttttagaatttgtaataaataaaaactgctgctttaccactgtaaaatatgctttctgatgtggtgtatttttaaaataaattttaatatgt

SEQ ID NO: 184607 - DNA, 7557 bp, Homo sapiens
  Payload ID: 16351
  Gene Symbol: SLC7A2
  Gene Name: solute carrier family 7 (cationic amino acid transporter, y+ system), member 2
  Uniprot ID: P52569
  ENST ID: ENST00000398090
  CDS Start-End: 49-2142
tcccaaaacagaaagagcagatgtctcaccacgaaactagcaactggaatgaagatagaaacaagtggttataactcagacaaactaatttgtcgagggtttattggaacacctgccccaccggtttgcgacagcaagtttctcctgtcgccttcgtcagacgtcagaatgattccttgcagagccgcgctgacctttgcccgatgtctgatccggagaaaaatcgtgaccctggacagtctagaagacaccaaattatgccgctgcttatccaccatggacctcattgccctgggcgttggaagcacccttggggccggggtttatgtcctcgctggggaggtggccaaggcagactcgggccccagcatcgtggtgtccttcctcattgctgccctggcttcagtgatggctggcctctgctatgccgaatttggggcccgtgttcccaagacggggtctgcatatttgtacacctacgtgactgtcggagagctgtgggccttcatcactggctggaatctcattttatcgtatgtgataggtacatcaagtgttgcaagagcctggagtggcacctttgatgaacttcttagcaaacagattggtcagtttttgaggacatacttcagaatgaattacactggtcttgcagaatatcccgatttttttgctgtgtgccttatattacttctagcaggtcttttgtcttttggagtaaaagagtctgcttgggtgaataaagtcttcacagctgttaatattctcgtccttctgtttgtgatggttgctgggtttgtgaaaggaaatgtggcaaactggaagattagtgaagagtttctcaaaaatatatcagcaagtgccagagagccaccttctgaaaacggaacaagtatctatggggctggtggctttatgccttatggctttacgggaacgttggctggtgctgcaacttgcttttatgcctttgtgggatttgactgcattgcaacaactggtgaagaagttcggaatccccagaaagctattcccattggaattgtgacgtctttgcttgtttgctttatggcctattttggggtctctgcagctttaacacttatgatgccgtactacctcctcgatgaaaaaagcccccttcctgtagcgtttgaatatgtgggatggggtcctgccaaatatgtcgtcgcagctggttctctctgcgccttgtcaacaagtcttctgggctctatgtttcctttaccccgaattctgtttgccatggcccgggatggcttactgtttagatttcttgccagagtgagtaagaggcagtcaccagttgctgccacgttgactgcaggggtcatttctgctttgatggcctttctgtttgacctgaaggcgcttgtggacatgatgtccattggcacactcatggcctactctctggtggcagcctgtgttctcatcctcaggtaccagcctggcttatcttacgaccagcccaaatgttctcctgagaaagatggtctgggatcgtctcccagggtaacctcgaagagtgagtcccaggtcaccatgctgcagagacagggcttcagcatgcggaccctcttctgcccctcccttctgccaacacagcagtcagcttctctcgtgagctttctggtaggattcctagctttcctcgtgttgggcctgagtgtcttgaccacttacggagttcatgccatcaccaggctggaggcctggagcctcgctctcctcgcgctgtttcttgttctcttcgttgccatcgttctcaccatctggaggcagccccagaatcagcaaaaagtagccttcatggttccattcttaccatttttgccagcgttcagcatcttggtgaacatttacttgatggtccagttaagtgcagacacttgggtcagattcagcatttggatggcaattggcttcctgatttacttttcttatggcattagacacagcctggagggtcatctgagagatgaaaacaatgaagaagatgcttatccagacaacgttcatgcagcagcagaagaaaaatctgccattcaagcaaatgaccatcacccaagaaatctcagttcacctttcatattccatgaaaagacaagtgaattctaacacttgcaggagcagagctggtcatcgtcttagcatacatatcctacactgagtaaaccgtaacgggatgtcatcagcatgctgggttgtcatgggtttgctgcatacatagttcaccctaatttatacttactcatctggacagcatctcctcagatggtgaattatgtgcacggggaaacctcctgagtggaagtttcattcatcagtgatgaatagcccccaaacagtgggagtgtgtatgtatgtgtgtatgtatgtatctatgtatatgcttgggaacatgagtgttacaagttagctggtgttttactattattgtgttacatttttccagtgtcgtcattaatcggtggcatatactgcacatactgaaatagagggaaatcactgaatgtaaagaggtttcatctatgccccctgcagttggggaaatactagtagctttaccttgtttgacttcattaatgtcagtttaggggatgccaaaaatgcagttactcatcatggtgtctgtcactggttaggggtaagatgaggggataaggaaagagacttttcaataagttgtgaatgccaacagtgggtttaatgcaaattttttttcctgtgaggtatgacagtttgctcaaacttcagccaacaggggtgtctgcttctgctgcactacacaggccaggagtggcattccatgccactagttggcatccttttgaacttttgtctcctttgcaaacagtggtcctaaaatacgaggtcttcacttgctgtgaatgacgtatccccagtcagggacttaagagaggcactgtgatatacttgggaccctttaaattaaaaagtgaagatagtcaccagggccagaaagctcatggagtggccgtaatgagaatatgtttgaagatcaaagagttagaccaatgcttgaataagtagaccccaagcatccttttctaaaaagtgacttaaaataagccaacagactctcccagaccacacaactagtggaatgattcctcctttttccattacttacttaatcacagtttagtttttttcttaacctcgtcaggcccagagttcacttctttgtttctctgtttcttttgtcttgtcttagagatgagggggctacagcagcatcatgcaaagagggaaagatgaagggatagaagaagagaaaatccccctgttctgataggaacggcctgttccattgttaaatggcaaatggcccaatttaagggctttggatctaatttgcctctgatgtttcctttggaaacatttaggaatatttttctccccctaccccataaattgtgtagcactttttattccatttgctttcaaatgactacactaagcctaataatacaagctccagtgttatacaataacccatcagtgattggggaatcaaacattttggtttaaaaaacatgattatttaaaactggaaactaaaaagaatcaaattgaattaaagctatataaacacagttaacccttgtaaatgagtaaacaaatttttacatgtaagattctctaattgtcatattttactttttaggattccctaatagtggactgtttatttgcagtgtatttgcttctcatgaactatttctcgtacaaatcattaaatagttcattggatgaggctgggtgacatttcccaggacagcatggtgaacattaccaggcatgctagctggcccgtgtaatcccaagacaaggaaaacattcgttttcctcatgggtcttccaagaaatgagctattttattgatgccattaaaaagcaagttgcgatggttttgtatagccaggagtttattgtgattaaacatcaaagaaacaggtagaaagcctgggtttctggctgctagcgttatagcatccatgacacagaactcattacggacattccacaacttccagggtgcacatggtaaaatctgaagcccagaattttctctcaagctgcgtggtttactggagagaaggagttggataagcacaggctcgggtattttggtagggactgtaggcatgctcataaatccttgctgttgtcacagtacgctgaaaacccgtttgattctatacccaatcaagaatagacccttcacacaggaaatgtgaacaattgttatatatgaacactcaaatcttttactgtaacgaaaccaagaaacttgtttagaatgtgataggcagctaaaactgttatgcccactgtgctcaatttgaagcagaatttagtgaaaaattatttttccacattgaaacactttgcagacacaaatatctatgaaaagatgctttgtcagccactgtgcctttttttctgtgaagactcaacggatgtgtgtgtttgtatgtttgttaacagttacatatgtttgtatgagtgtatatatatatctgtgtgtgtgtatctctaacgtcagtgtataagtaagttgggtttatggtgggctttgactatgtcattaggtgggtacaaaacccaactgatgtggagaaaaattgatgtttgatgttgatagatatgcttatacctaatttttagtttttaaactattttaaaatatactatgattttatatgtatatttcctatagactctttaagacgtatttataatgtttctaatatgaaatcactaaactctagtacattatagcaggtgctttgtaatctggaatggagaagaggtaggggcatttggggattcctgtttacttgctgctgccacaccttttccgactgatctgtcctggtaggtgtttattagcaaaagtcagtatcaccagctctttggcacctttctgtttctgcttgtgaattcataatgttttcaactaaattttttttttctttctcagaattacctaaatgttttgtagagttttgactagtaatcaatcaaaattatataaagtcttctccagtaattaagaaatacatatgcaaattcttttgtgattgagtaaaagcagcttaaattacttttcttttctacattaagaaatatattctcaacattttcagtgagaatttcttgtaatggcacctcaaattttatactcttaaaaaaaaacaataatttgtgaattaccaccaaaaggcaatggcagtcctacatttaagaatagagctatgcaaactctgttaaaaactatgaggaaaacttatattagaacttttgatatatactaaaatactgattatcttaatcacattttccccagagataaacattgagagaacgaaagccaaagtgtcatttaagagagatatatatgaaaaagtaacattaatatatagaactttaccatcaccagccgtagttgatagaaaatattagtttcagaattaccctcctttaaaaaataagagactatttgttttcttttaatttctatgaataaaagaaatttttaaaaactttaaaattttaaatattagtcaaaatactttttaagtcctgagtgcttacaggtagttgttaaaaaaattttaaggccaggcatggtggctcgctcacacctataatcctaggatcttgggaggtcgaggcaagctgatcgcttgagcccaggagtttaagaccggcctgagtagcatagcaagaccctgtctctacaaaaaaaacaaaaattagctgggcatggtggcatgcacatgtagtcagagctactgggggtgctgaggtgggaggatcgcttgagcccaggagagtgaggctgcagtgagctgagattacgccactgcactctagcctgggcaacggtgagaccctgcctcaaaaaaaataaaaataaaaataaaacactttaattagaatctatttttacctattttctaaatttatttaaatgcttagcaggaagcataaggaaaagccatcggcctccaatacccatgatgacagagggagcacttgagccttgccttccctcctcttaaatcagggtgtgttccgagattacagaacatcacaccttggcgtgatgaaatcatgccaagattctgactctccctttccggtgatactgctcatgatttctcctaatacgcttcaagcaactgttaccacaaaaaatacagtttccgcagggctttaaaggattgagtttagcatgtatatcatgcgttattaaagttcacgtgattcatgtgaaattaactgtcctttttgctagtgccaaaacagtgccttctctgcacactttacttgtttataaagttctcccacatgtccttaaatatcaagggggaaagtatggatattcgcgtagcaataatgccagcaaaggtcattttcattttttagtcatatagatatgaaaataagttcatatagatatgaaattgcttgactttattgttttggggagattttttttccttacatgattatattaaacactttaaaatagccttccggtttctggattttgagaagcctgatctgttattgttgtggttgttggtgtttgtaatattcattattgtttgtatatacacggtttagtcttactgatttcaaatgcattttgttattgctcaacccaactggtaacactgtttgctgggagcattatacttaactttgattcaccatggttgatgccactgccatgatcgctgggtcttaaagagctttccctagccactgacagccccgtggagatcataatcagggccccaggctggttccaggatcaggcagcctatagagtgtgagcatctatgtgtagctacccttgttgggtgggctcttagactgatggggtaggatatgaagtgaaagacttcaaatgcaagtaaggtagtttgggctccttaattccaaacatcccatgagtatatcaagatgaataaggaccaagggacctctgtgactcatagaagggctggctgaatcctgaagtagcatagtgggacctggtctacaatttatgcacatgcactgacagccttgctgtgccacgtgtctcaccaagacccagttgggaaagagcgtcatattgccaacaggttgggtttctctggcctacacctgattaatgggccctttatctttggtgtcccctaggagtgtccagttgttttattgctgtattttgttattgcagtacttaataaaaattgttgatagggcccaaaaccctacagaaattctatgtctgtaaaaaccaacaaaggcattggacttgtgtgaatgtacagggtttttttagtagtaattttaaatttaaatgttttaagtgatcatcagtgttcctttttacttataaagttggattcttttttagaatttgtaataaataaaaactgctgctttaccactgtaaaatatgctttctgatgtggtgtatttttaaaataaattttaatatgt

SEQ ID NO: 184608 - DNA, 7622 bp, Homo sapiens
  Payload ID: 16351
  Gene Symbol: SLC7A2
  Gene Name: solute carrier family 7 (cationic amino acid transporter, y+ system), member 2
  Uniprot ID: P52569
  ENST ID: ENST00000494857
  CDS Start-End: 219-2195
ctccttctgcagcgcggccggcgggcgctcctcttcgcgggaccagcgaggcggcggccgctgctccagcgtcccccagccgcgggcccccgacgcgctgcagccggcagcccaccgccgccttcttggcgcgaccccaacccagccccacaggagactctctgaagaccagcaggaaagcagtgagcccttacaggtcgccttcgtcagacgtcagaatgattccttgcagagccgcgctgacctttgcccgatgtctgatccggagaaaaatcgtgaccctggacagtctagaagacaccaaattatgccgctgcttatccaccatggacctcattgccctgggcgttggaagcacccttggggccggggtttatgtcctcgctggggaggtggccaaggcagactcgggccccagcatcgtggtgtccttcctcattgctgccctggcttcagtgatggctggcctctgctatgccgaatttggggcccgtgttcccaagacggggtctgcatatttgtacacctacgtgactgtcggagagctgtgggccttcatcactggctggaatctcattttatcgtatgtgataggtacatcaagtgttgcaagagcctggagtggcacctttgatgaacttcttagcaaacagattggtcagtttttgaggacatacttcagaatgaattacactggtcttgcagaatatcccgatttttttgctgtgtgccttatattacttctagcaggtcttttgtcttttggagtaaaagagtctgcttgggtgaataaagtcttcacagctgttaatattctcgtccttctgtttgtgatggttgctgggtttgtgaaaggaaatgtggcaaactggaagattagtgaagagtttctcaaaaatatatcagcaagtgccagagagccaccttctgaaaacggaacaagtatctatggggctggtggctttatgccttatggctttacgggaacgttggctggtgctgcaacttgcttttatgcctttgtgggatttgactgcattgcaacaactggtgaagaagttcggaatccccagaaagctattcccattggaattgtgacgtctttgcttgtttgctttatggcctattttggggtctctgcagctttaacacttatgatgccgtactacctcctcgatgaaaaaagcccccttcctgtagcgtttgaatatgtgggatggggtcctgccaaatatgtcgtcgcagctggttctctctgcgccttgtcaacaagtcttcttggatccattttcccaatgcctcgtgtaatctatgctatggcggaggatgggttgcttttcaaatgtctagctcaaatcaattccaaaacgaagacaccaataattgctactttatcatcgggtgcagtggcagctttgatggcctttctgtttgacctgaaggcgcttgtggacatgatgtccattggcacactcatggcctactctctggtggcagcctgtgttctcatcctcaggtaccagcctggcttatcttacgaccagcccaaatgttctcctgagaaagatggtctgggatcgtctcccagggtaacctcgaagagtgagtcccaggtcaccatgctgcagagacagggcttcagcatgcggaccctcttctgcccctcccttctgccaacacagcagtcagcttctctcgtgagctttctggtaggattcctagctttcctcgtgttgggcctgagtgtcttgaccacttacggagttcatgccatcaccaggctggaggcctggagcctcgctctcctcgcgctgtttcttgttctcttcgttgccatcgttctcaccatctggaggcagccccagaatcagcaaaaagtagccttcatggttccattcttaccatttttgccagcgttcagcatcttggtgaacatttacttgatggtccagttaagtgcagacacttgggtcagattcagcatttggatggcaattggcttcctgatttacttttcttatggcattagacacagcctggagggtcatctgagagatgaaaacaatgaagaagatgcttatccagacaacgttcatgcagcagcagaagaaaaatctgccattcaagcaaatgaccatcacccaagaaatctcagttcacctttcatattccatgaaaagacaagtgaattctaacacttgcaggagcagagctggtcatcgtcttagcatacatatcctacactgagtaaaccgtaacgggatgtcatcagcatgctgggttgtcatgggtttgctgcatacatagttcaccctaatttatacttactcatctggacagcatctcctcagatggtgaattatgtgcacggggaaacctcctgagtggaagtttcattcatcagtgatgaatagcccccaaacagtgggagtgtgtatgtatgtgtgtatgtatgtatctatgtatatgcttgggaacatgagtgttacaagttagctggtgttttactattattgtgttacatttttccagtgtcgtcattaatcggtggcatatactgcacatactgaaatagagggaaatcactgaatgtaaagaggtttcatctatgccccctgcagttggggaaatactagtagctttaccttgtttgacttcattaatgtcagtttaggggatgccaaaaatgcagttactcatcatggtgtctgtcactggttaggggtaagatgaggggataaggaaagagacttttcaataagttgtgaatgccaacagtgggtttaatgcaaattttttttcctgtgaggtatgacagtttgctcaaacttcagccaacaggggtgtctgcttctgctgcactacacaggccaggagtggcattccatgccactagttggcatccttttgaacttttgtctcctttgcaaacagtggtcctaaaatacgaggtcttcacttgctgtgaatgacgtatccccagtcagggacttaagagaggcactgtgatatacttgggaccctttaaattaaaaagtgaagatagtcaccagggccagaaagctcatggagtggccgtaatgagaatatgtttgaagatcaaagagttagaccaatgcttgaataagtagaccccaagcatccttttctaaaaagtgacttaaaataagccaacagactctcccagaccacacaactagtggaatgattcctcctttttccattacttacttaatcacagtttagtttttttcttaacctcgtcaggcccagagttcacttctttgtttctctgtttcttttgtcttgtcttagagatgagggggctacagcagcatcatgcaaagagggaaagatgaagggatagaagaagagaaaatccccctgttctgataggaacggcctgttccattgttaaatggcaaatggcccaatttaagggctttggatctaatttgcctctgatgtttcctttggaaacatttaggaatatttttctccccctaccccataaattgtgtagcactttttattccatttgctttcaaatgactacactaagcctaataatacaagctccagtgttatacaataacccatcagtgattggggaatcaaacattttggtttaaaaaacatgattatttaaaactggaaactaaaaagaatcaaattgaattaaagctatataaacacagttaacccttgtaaatgagtaaacaaatttttacatgtaagattctctaattgtcatattttactttttaggattccctaatagtggactgtttatttgcagtgtatttgcttctcatgaactatttctcgtacaaatcattaaatagttcattggatgaggctgggtgacatttcccaggacagcatggtgaacattaccaggcatgctagctggcccgtgtaatcccaagacaaggaaaacattcgttttcctcatgggtcttccaagaaatgagctattttattgatgccattaaaaagcaagttgcgatggttttgtatagccaggagtttattgtgattaaacatcaaagaaacaggtagaaagcctgggtttctggctgctagcgttatagcatccatgacacagaactcattacggacattccacaacttccagggtgcacatggtaaaatctgaagcccagaattttctctcaagctgcgtggtttactggagagaaggagttggataagcacaggctcgggtattttggtagggactgtaggcatgctcataaatccttgctgttgtcacagtacgctgaaaacccgtttgattctatacccaatcaagaatagacccttcacacaggaaatgtgaacaattgttatatatgaacactcaaatcttttactgtaacgaaaccaagaaacttgtttagaatgtgataggcagctaaaactgttatgcccactgtgctcaatttgaagcagaatttagtgaaaaattatttttccacattgaaacactttgcagacacaaatatctatgaaaagatgctttgtcagccactgtgcctttttttctgtgaagactcaacggatgtgtgtgtttgtatgtttgttaacagttacatatgtttgtatgagtgtatatatatatctgtgtgtgtgtatctctaacgtcagtgtataagtaagttgggtttatggtgggctttgactatgtcattaggtgggtacaaaacccaactgatgtggagaaaaattgatgtttgatgttgatagatatgcttatacctaatttttagtttttaaactattttaaaatatactatgattttatatgtatatttcctatagactctttaagacgtatttataatgtttctaatatgaaatcactaaactctagtacattatagcaggtgctttgtaatctggaatggagaagaggtaggggcatttggggattcctgtttacttgctgctgccacaccttttccgactgatctgtcctggtaggtgtttattagcaaaagtcagtatcaccagctctttggcacctttctgtttctgcttgtgaattcataatgttttcaactaaattttttttttctttctcagaattacctaaatgttttgtagagttttgactagtaatcaatcaaaattatataaagtcttctccagtaattaagaaatacatatgcaaattcttttgtgattgagtaaaagcagcttaaattacttttcttttctacattaagaaatatattctcaacattttcagtgagaatttcttgtaatggcacctcaaattttatactcttaaaaaaaaacaataatttgtgaattaccaccaaaaggcaatggcagtcctacatttaagaatagagctatgcaaactctgttaaaaactatgaggaaaacttatattagaacttttgatatatactaaaatactgattatcttaatcacattttccccagagataaacattgagagaacgaaagccaaagtgtcatttaagagagatatatatgaaaaagtaacattaatatatagaactttaccatcaccagccgtagttgatagaaaatattagtttcagaattaccctcctttaaaaaataagagactatttgttttcttttaatttctatgaataaaagaaatttttaaaaactttaaaattttaaatattagtcaaaatactttttaagtcctgagtgcttacaggtagttgttaaaaaaattttaaggccaggcatggtggctcgctcacacctataatcctaggatcttgggaggtcgaggcaagctgatcgcttgagcccaggagtttaagaccggcctgagtagcatagcaagaccctgtctctacaaaaaaaacaaaaattagctgggcatggtggcatgcacatgtagtcagagctactgggggtgctgaggtgggaggatcgcttgagcccaggagagtgaggctgcagtgagctgagattacgccactgcactctagcctgggcaacggtgagaccctgcctcaaaaaaaataaaaataaaaataaaacactttaattagaatctatttttacctattttctaaatttatttaaatgcttagcaggaagcataaggaaaagccatcggcctccaatacccatgatgacagagggagcacttgagccttgccttccctcctcttaaatcagggtgtgttccgagattacagaacatcacaccttggcgtgatgaaatcatgccaagattctgactctccctttccggtgatactgctcatgatttctcctaatacgcttcaagcaactgttaccacaaaaaatacagtttccgcagggctttaaaggattgagtttagcatgtatatcatgcgttattaaagttcacgtgattcatgtgaaattaactgtcctttttgctagtgccaaaacagtgccttctctgcacactttacttgtttataaagttctcccacatgtccttaaatatcaagggggaaagtatggatattcgcgtagcaataatgccagcaaaggtcattttcattttttagtcatatagatatgaaaataagttcatatagatatgaaattgcttgactttattgttttggggagattttttttccttacatgattatattaaacactttaaaatagccttccggtttctggattttgagaagcctgatctgttattgttgtggttgttggtgtttgtaatattcattattgtttgtatatacacggtttagtcttactgatttcaaatgcattttgttattgctcaacccaactggtaacactgtttgctgggagcattatacttaactttgattcaccatggttgatgccactgccatgatcgctgggtcttaaagagctttccctagccactgacagccccgtggagatcataatcagggccccaggctggttccaggatcaggcagcctatagagtgtgagcatctatgtgtagctacccttgttgggtgggctcttagactgatggggtaggatatgaagtgaaagacttcaaatgcaagtaaggtagtttgggctccttaattccaaacatcccatgagtatatcaagatgaataaggaccaagggacctctgtgactcatagaagggctggctgaatcctgaagtagcatagtgggacctggtctacaatttatgcacatgcactgacagccttgctgtgccacgtgtctcaccaagacccagttgggaaagagcgtcatattgccaacaggttgggtttctctggcctacacctgattaatgggccctttatctttggtgtcccctaggagtgtccagttgttttattgctgtattttgttattgcagtacttaataaaaattgttgatagggcccaaaaccctacagaaattctatgtctgtaaaaaccaacaaaggcattggacttgtgtgaatgtacagggtttttttagtagtaattttaaatttaaatgttttaagtgatcatcagtgttcctttttacttataaagttggattcttttttagaatttgtaataaataaaaactgctgctttaccactgtaaaatatgctttctgatgtggtgtatttttaaaataaattttaatatgtaataatatagaa

SEQ ID NO: 184609 - DNA, 7638 bp, Homo sapiens
  Payload ID: 16351
  Gene Symbol: SLC7A2
  Gene Name: solute carrier family 7 (cationic amino acid transporter, y+ system), member 2
  Uniprot ID: P52569
  ENST ID: ENST00000470360
  CDS Start-End: 118-2211
ggcgcgaccccaacccagccccacaggagactctctgaagaccagcaggaaagcagtgagcccttacagtcccaaaacagaaagagcagatgtctcaccacgaaactagcaactggaatgaagatagaaacaagtggttataactcagacaaactaatttgtcgagggtttattggaacacctgccccaccggtttgcgacagcaagtttctcctgtcgccttcgtcagacgtcagaatgattccttgcagagccgcgctgacctttgcccgatgtctgatccggagaaaaatcgtgaccctggacagtctagaagacaccaaattatgccgctgcttatccaccatggacctcattgccctgggcgttggaagcacccttggggccggggtttatgtcctcgctggggaggtggccaaggcagactcgggccccagcatcgtggtgtccttcctcattgctgccctggcttcagtgatggctggcctctgctatgccgaatttggggcccgtgttcccaagacggggtctgcatatttgtacacctacgtgactgtcggagagctgtgggccttcatcactggctggaatctcattttatcgtatgtgataggtacatcaagtgttgcaagagcctggagtggcacctttgatgaacttcttagcaaacagattggtcagtttttgaggacatacttcagaatgaattacactggtcttgcagaatatcccgatttttttgctgtgtgccttatattacttctagcaggtcttttgtcttttggagtaaaagagtctgcttgggtgaataaagtcttcacagctgttaatattctcgtccttctgtttgtgatggttgctgggtttgtgaaaggaaatgtggcaaactggaagattagtgaagagtttctcaaaaatatatcagcaagtgccagagagccaccttctgaaaacggaacaagtatctatggggctggtggctttatgccttatggctttacgggaacgttggctggtgctgcaacttgcttttatgcctttgtgggatttgactgcattgcaacaactggtgaagaagttcggaatccccagaaagctattcccattggaattgtgacgtctttgcttgtttgctttatggcctattttggggtctctgcagctttaacacttatgatgccgtactacctcctcgatgaaaaaagcccccttcctgtagcgtttgaatatgtgggatggggtcctgccaaatatgtcgtcgcagctggttctctctgcgccttgtcaacaagtcttctgggctctatgtttcctttaccccgaattctgtttgccatggcccgggatggcttactgtttagatttcttgccagagtgagtaagaggcagtcaccagttgctgccacgttgactgcaggggtcatttctgctttgatggcctttctgtttgacctgaaggcgcttgtggacatgatgtccattggcacactcatggcctactctctggtggcagcctgtgttctcatcctcaggtaccagcctggcttatcttacgaccagcccaaatgttctcctgagaaagatggtctgggatcgtctcccagggtaacctcgaagagtgagtcccaggtcaccatgctgcagagacagggcttcagcatgcggaccctcttctgcccctcccttctgccaacacagcagtcagcttctctcgtgagctttctggtaggattcctagctttcctcgtgttgggcctgagtgtcttgaccacttacggagttcatgccatcaccaggctggaggcctggagcctcgctctcctcgcgctgtttcttgttctcttcgttgccatcgttctcaccatctggaggcagccccagaatcagcaaaaagtagccttcatggttccattcttaccatttttgccagcgttcagcatcttggtgaacatttacttgatggtccagttaagtgcagacacttgggtcagattcagcatttggatggcaattggcttcctgatttacttttcttatggcattagacacagcctggagggtcatctgagagatgaaaacaatgaagaagatgcttatccagacaacgttcatgcagcagcagaagaaaaatctgccattcaagcaaatgaccatcacccaagaaatctcagttcacctttcatattccatgaaaagacaagtgaattctaacacttgcaggagcagagctggtcatcgtcttagcatacatatcctacactgagtaaaccgtaacgggatgtcatcagcatgctgggttgtcatgggtttgctgcatacatagttcaccctaatttatacttactcatctggacagcatctcctcagatggtgaattatgtgcacggggaaacctcctgagtggaagtttcattcatcagtgatgaatagcccccaaacagtgggagtgtgtatgtatgtgtgtatgtatgtatctatgtatatgcttgggaacatgagtgttacaagttagctggtgttttactattattgtgttacatttttccagtgtcgtcattaatcggtggcatatactgcacatactgaaatagagggaaatcactgaatgtaaagaggtttcatctatgccccctgcagttggggaaatactagtagctttaccttgtttgacttcattaatgtcagtttaggggatgccaaaaatgcagttactcatcatggtgtctgtcactggttaggggtaagatgaggggataaggaaagagacttttcaataagttgtgaatgccaacagtgggtttaatgcaaattttttttcctgtgaggtatgacagtttgctcaaacttcagccaacaggggtgtctgcttctgctgcactacacaggccaggagtggcattccatgccactagttggcatccttttgaacttttgtctcctttgcaaacagtggtcctaaaatacgaggtcttcacttgctgtgaatgacgtatccccagtcagggacttaagagaggcactgtgatatacttgggaccctttaaattaaaaagtgaagatagtcaccagggccagaaagctcatggagtggccgtaatgagaatatgtttgaagatcaaagagttagaccaatgcttgaataagtagaccccaagcatccttttctaaaaagtgacttaaaataagccaacagactctcccagaccacacaactagtggaatgattcctcctttttccattacttacttaatcacagtttagtttttttcttaacctcgtcaggcccagagttcacttctttgtttctctgtttcttttgtcttgtcttagagatgagggggctacagcagcatcatgcaaagagggaaagatgaagggatagaagaagagaaaatccccctgttctgataggaacggcctgttccattgttaaatggcaaatggcccaatttaagggctttggatctaatttgcctctgatgtttcctttggaaacatttaggaatatttttctccccctaccccataaattgtgtagcactttttattccatttgctttcaaatgactacactaagcctaataatacaagctccagtgttatacaataacccatcagtgattggggaatcaaacattttggtttaaaaaacatgattatttaaaactggaaactaaaaagaatcaaattgaattaaagctatataaacacagttaacccttgtaaatgagtaaacaaatttttacatgtaagattctctaattgtcatattttactttttaggattccctaatagtggactgtttatttgcagtgtatttgcttctcatgaactatttctcgtacaaatcattaaatagttcattggatgaggctgggtgacatttcccaggacagcatggtgaacattaccaggcatgctagctggcccgtgtaatcccaagacaaggaaaacattcgttttcctcatgggtcttccaagaaatgagctattttattgatgccattaaaaagcaagttgcgatggttttgtatagccaggagtttattgtgattaaacatcaaagaaacaggtagaaagcctgggtttctggctgctagcgttatagcatccatgacacagaactcattacggacattccacaacttccagggtgcacatggtaaaatctgaagcccagaattttctctcaagctgcgtggtttactggagagaaggagttggataagcacaggctcgggtattttggtagggactgtaggcatgctcataaatccttgctgttgtcacagtacgctgaaaacccgtttgattctatacccaatcaagaatagacccttcacacaggaaatgtgaacaattgttatatatgaacactcaaatcttttactgtaacgaaaccaagaaacttgtttagaatgtgataggcagctaaaactgttatgcccactgtgctcaatttgaagcagaatttagtgaaaaattatttttccacattgaaacactttgcagacacaaatatctatgaaaagatgctttgtcagccactgtgcctttttttctgtgaagactcaacggatgtgtgtgtttgtatgtttgttaacagttacatatgtttgtatgagtgtatatatatatctgtgtgtgtgtatctctaacgtcagtgtataagtaagttgggtttatggtgggctttgactatgtcattaggtgggtacaaaacccaactgatgtggagaaaaattgatgtttgatgttgatagatatgcttatacctaatttttagtttttaaactattttaaaatatactatgattttatatgtatatttcctatagactctttaagacgtatttataatgtttctaatatgaaatcactaaactctagtacattatagcaggtgctttgtaatctggaatggagaagaggtaggggcatttggggattcctgtttacttgctgctgccacaccttttccgactgatctgtcctggtaggtgtttattagcaaaagtcagtatcaccagctctttggcacctttctgtttctgcttgtgaattcataatgttttcaactaaattttttttttctttctcagaattacctaaatgttttgtagagttttgactagtaatcaatcaaaattatataaagtcttctccagtaattaagaaatacatatgcaaattcttttgtgattgagtaaaagcagcttaaattacttttcttttctacattaagaaatatattctcaacattttcagtgagaatttcttgtaatggcacctcaaattttatactcttaaaaaaaaacaataatttgtgaattaccaccaaaaggcaatggcagtcctacatttaagaatagagctatgcaaactctgttaaaaactatgaggaaaacttatattagaacttttgatatatactaaaatactgattatcttaatcacattttccccagagataaacattgagagaacgaaagccaaagtgtcatttaagagagatatatatgaaaaagtaacattaatatatagaactttaccatcaccagccgtagttgatagaaaatattagtttcagaattaccctcctttaaaaaataagagactatttgttttcttttaatttctatgaataaaagaaatttttaaaaactttaaaattttaaatattagtcaaaatactttttaagtcctgagtgcttacaggtagttgttaaaaaaattttaaggccaggcatggtggctcgctcacacctataatcctaggatcttgggaggtcgaggcaagctgatcgcttgagcccaggagtttaagaccggcctgagtagcatagcaagaccctgtctctacaaaaaaaacaaaaattagctgggcatggtggcatgcacatgtagtcagagctactgggggtgctgaggtgggaggatcgcttgagcccaggagagtgaggctgcagtgagctgagattacgccactgcactctagcctgggcaacggtgagaccctgcctcaaaaaaaataaaaataaaaataaaacactttaattagaatctatttttacctattttctaaatttatttaaatgcttagcaggaagcataaggaaaagccatcggcctccaatacccatgatgacagagggagcacttgagccttgccttccctcctcttaaatcagggtgtgttccgagattacagaacatcacaccttggcgtgatgaaatcatgccaagattctgactctccctttccggtgatactgctcatgatttctcctaatacgcttcaagcaactgttaccacaaaaaatacagtttccgcagggctttaaaggattgagtttagcatgtatatcatgcgttattaaagttcacgtgattcatgtgaaattaactgtcctttttgctagtgccaaaacagtgccttctctgcacactttacttgtttataaagttctcccacatgtccttaaatatcaagggggaaagtatggatattcgcgtagcaataatgccagcaaaggtcattttcattttttagtcatatagatatgaaaataagttcatatagatatgaaattgcttgactttattgttttggggagattttttttccttacatgattatattaaacactttaaaatagccttccggtttctggattttgagaagcctgatctgttattgttgtggttgttggtgtttgtaatattcattattgtttgtatatacacggtttagtcttactgatttcaaatgcattttgttattgctcaacccaactggtaacactgtttgctgggagcattatacttaactttgattcaccatggttgatgccactgccatgatcgctgggtcttaaagagctttccctagccactgacagccccgtggagatcataatcagggccccaggctggttccaggatcaggcagcctatagagtgtgagcatctatgtgtagctacccttgttgggtgggctcttagactgatggggtaggatatgaagtgaaagacttcaaatgcaagtaaggtagtttgggctccttaattccaaacatcccatgagtatatcaagatgaataaggaccaagggacctctgtgactcatagaagggctggctgaatcctgaagtagcatagtgggacctggtctacaatttatgcacatgcactgacagccttgctgtgccacgtgtctcaccaagacccagttgggaaagagcgtcatattgccaacaggttgggtttctctggcctacacctgattaatgggccctttatctttggtgtcccctaggagtgtccagttgttttattgctgtattttgttattgcagtacttaataaaaattgttgatagggcccaaaaccctacagaaattctatgtctgtaaaaaccaacaaaggcattggacttgtgtgaatgtacagggtttttttagtagtaattttaaatttaaatgttttaagtgatcatcagtgttcctttttacttataaagttggattcttttttagaatttgtaataaataaaaactgctgctttaccactgtaaaatatgctttctgatgtggtgtatttttaaaataaattttaatatgtaataatatagaa

SEQ ID NO: 184610 - DNA, 2274 bp, Homo sapiens
  Payload ID: 16351
  Gene Symbol: SLC7A2
  Gene Name: solute carrier family 7 (cationic amino acid transporter, y+ system), member 2
  Uniprot ID: P52569
  ENST ID: ENST00000522656
  CDS Start-End: 170-2146
cttctgcagcgcggccggcgggcgctcctcttcgcgggaccagcgaggcggcggccgctgctccagcgtcccccagccgcgggcccccgacgcgctgcagccggcagcccaccgccgccttcttggcgcgaccccaacccagccccagtcgccttcgtcagacgtcagaatgattccttgcagagccgcgctgacctttgcccgatgtctgatccggagaaaaatcgtgaccctggacagtctagaagacaccaaattatgccgctgcttatccaccatggacctcattgccctgggcgttggaagcacccttggggccggggtttatgtcctcgctggggaggtggccaaggcagactcgggccccagcatcgtggtgtccttcctcattgctgccctggcttcagtgatggctggcctctgctatgccgaatttggggcccgtgttcccaagacggggtctgcatatttgtacacctacgtgactgtcggagagctgtgggccttcatcactggctggaatctcattttatcgtatgtgataggtacatcaagtgttgcaagagcctggagtggcacctttgatgaacttcttagcaaacagattggtcagtttttgaggacatacttcagaatgaattacactggtcttgcagaatatcccgatttttttgctgtgtgccttatattacttctagcaggtcttttgtcttttggagtaaaagagtctgcttgggtgaataaagtcttcacagctgttaatattctcgtccttctgtttgtgatggttgctgggtttgtgaaaggaaatgtggcaaactggaagattagtgaagagtttctcaaaaatatatcagcaagtgccagagagccaccttctgaaaacggaacaagtatctatggggctggtggctttatgccttatggctttacgggaacgttggctggtgctgcaacttgcttttatgcctttgtgggatttgactgcattgcaacaactggtgaagaagttcggaatccccagaaagctattcccattggaattgtgacgtctttgcttgtttgctttatggcctattttggggtctctgcagctttaacacttatgatgccgtactacctcctcgatgaaaaaagcccccttcctgtagcgtttgaatatgtgggatggggtcctgccaaatatgtcgtcgcagctggttctctctgcgccttgtcaacaagtcttcttggatccattttcccaatgcctcgtgtaatctatgctatggcggaggatgggttgcttttcaaatgtctagctcaaatcaattccaaaacgaagacaccaataattgctactttatcatcgggtgcagtggcagctttgatggcctttctgtttgacctgaaggcgcttgtggacatgatgtccattggcacactcatggcctactctctggtggcagcctgtgttctcatcctcaggtaccagcctggcttatcttacgaccagcccaaatgttctcctgagaaagatggtctgggatcgtctcccagggtaacctcgaagagtgagtcccaggtcaccatgctgcagagacagggcttcagcatgcggaccctcttctgcccctcccttctgccaacacagcagtcagcttctctcgtgagctttctggtaggattcctagctttcctcgtgttgggcctgagtgtcttgaccacttacggagttcatgccatcaccaggctggaggcctggagcctcgctctcctcgcgctgtttcttgttctcttcgttgccatcgttctcaccatctggaggcagccccagaatcagcaaaaagtagccttcatggttccattcttaccatttttgccagcgttcagcatcttggtgaacatttacttgatggtccagttaagtgcagacacttgggtcagattcagcatttggatggcaattggcttcctgatttacttttcttatggcattagacacagcctggagggtcatctgagagatgaaaacaatgaagaagatgcttatccagacaacgttcatgcagcagcagaagaaaaatctgccattcaagcaaatgaccatcacccaagaaatctcagttcacctttcatattccatgaaaagacaagtgaattctaacacttgcaggagcagagctggtcatcgtcttagcatacatatcctacactgagtaaaccgtaacgggatgtcatcagcatgctgggttgtcatgggtttgctgcatacatagttcaccctaatttata

SEQ ID NO: 184611 - DNA, 2235 bp, Homo sapiens
  Payload ID: 16352
  Gene Symbol: SLC7A3
  Gene Name: solute carrier family 7 (cationic amino acid transporter, y+ system), member 3
  Uniprot ID: Q8WY07
  ENST ID: ENST00000298085
  CDS Start-End: 151-2010
ataaggggcgcttggcgcgcaacgaccccaagccgcagctttgaagcctgagcggccgaactcggcagctccaacccaactcggcttaactccgcctcaccgagcccagtccaagactctgtgctccctaggtttgcaacagctctctggatgccgtggcaagcatttcgcagatttggtcaaaagctggtacgcagacgtacactggagtcaggcatggctgagactcgccttgccagatgcctaagcaccctggatttagtggccctgggtgtgggcagcacattgggtgcaggcgtgtatgtcctagctggcgaggtggccaaagataaagcagggccatccattgtgatctgctttttggtggctgccctgtcttctgtgttggctgggctgtgctatgcggagtttggtgcccgggttccccgttctggttcggcatatctctacagctatgtcactgtgggtgaactctgggccttcaccactggctggaacctcatcctctcctatgtcattggtacagccagtgtggcccgggcctggagctctgcttttgacaacctgattgggaaccacatctctaagactctgcaggggtccattgcactgcacgtgccccatgtccttgcagaatatccagatttctttgctttgggcctcgtgttgctgctcactggattgttggctctcggggctagtgagtcggccctggttaccaaagtgttcacaggcgtgaaccttttggttcttgggttcgtcatgatctctggcttcgttaagggggacgtgcacaactggaagctcacagaagaggactacgaattggccatggctgaactcaatgacacctatagcttgggtcctctgggctctggaggatttgtgcctttcggcttcgagggaattctccgtggagcagcgacctgtttctatgcatttgttggtttcgactgtattgctaccactggagaagaagcccagaatccccagcgttccatcccgatgggcattgtgatctcactgtctgtctgctttttggcgtattttgctgtctcttctgcactcaccctgatgatgccttactaccagcttcagcctgagagccctttgcctgaggcatttctctacattggatgggctcctgcccgctatgttgtggctgttggctccctctgtgctctttctaccagcctcctgggctccatgttccccatgcctcgggtgatctacgcgatggcagaggatggcctcctgttccgtgtacttgctcggatccacaccggcacacgcaccccaatcatagccaccgtggtctctggcattattgcagcattcatggcattcctcttcaaactcactgatcttgtggacctcatgtcaattgggaccctgcttgcttactccctggtgtcgatttgtgttctcatcctcaggtatcaacctgatcaggagacaaagactggggaagaagtggagttgcaggaggaggcaataactactgaatcagagaagttgaccctatggggactatttttcccactcaactccatccccactccactctctggccaaattgtctatgtttgttcctcattgcttgctgtcctgctgactgctctttgcctggtgctggcccagtggtcagttccattgctttctggagacctgctgtggactgcagtggttgtgctgctcctgctgctcattattgggatcattgtggtcatctggagacagccacagagttccactccccttcactttaaggtgcctgctttgcctctcctcccactaatgagcatctttgtgaatatttaccttatgatgcagatgacagctggtacctgggcccgatttggggtctggatgctgattggctttgctatctacttcggctatgggatccagcacagcctggaagagattaagagtaaccaaccctcacgcaagtctagagccaaaactgtagaccttgatcccggcactctctatgtccactcagtttgacatcgtcacacctaaatgctgtctggtcccctgcacaataatggagagtactcctgaccccagtgacagctagccctcccctgtgatggtggtggtggatactaatacagttctgtacgatgtgaaggatgtgtctttgctatttcttgtctattttaacccgtctgcttctaaatgatgtctagctgcttaccaactttaaaaaatgatattaaaagaaagtag

SEQ ID NO: 184612 - DNA, 2236 bp, Homo sapiens
  Payload ID: 16352
  Gene Symbol: SLC7A3
  Gene Name: solute carrier family 7 (cationic amino acid transporter, y+ system), member 3
  Uniprot ID: Q8WY07
  ENST ID: ENST00000374299
  CDS Start-End: 146-2005
aagccgcagctttgaagcctgagcggccgaactcggcagctccaacccaactcggcttaactccgcctcaccgagcccagtccaagactctgtgctccctaggtttgcaacagctctctgatcatcttcttcaattcctgctaggatgccgtggcaagcatttcgcagatttggtcaaaagctggtacgcagacgtacactggagtcaggcatggctgagactcgccttgccagatgcctaagcaccctggatttagtggccctgggtgtgggcagcacattgggtgcaggcgtgtatgtcctagctggcgaggtggccaaagataaagcagggccatccattgtgatctgctttttggtggctgccctgtcttctgtgttggctgggctgtgctatgcggagtttggtgcccgggttccccgttctggttcggcatatctctacagctatgtcactgtgggtgaactctgggccttcaccactggctggaacctcatcctctcctatgtcattggtacagccagtgtggcccgggcctggagctctgcttttgacaacctgattgggaaccacatctctaagactctgcaggggtccattgcactgcacgtgccccatgtccttgcagaatatccagatttctttgctttgggcctcgtgttgctgctcactggattgttggctctcggggctagtgagtcggccctggttaccaaagtgttcacaggcgtgaaccttttggttcttgggttcgtcatgatctctggcttcgttaagggggacgtgcacaactggaagctcacagaagaggactacgaattggccatggctgaactcaatgacacctatagcttgggtcctctgggctctggaggatttgtgcctttcggcttcgagggaattctccgtggagcagcgacctgtttctatgcatttgttggtttcgactgtattgctaccactggagaagaagcccagaatccccagcgttccatcccgatgggcattgtgatctcactgtctgtctgctttttggcgtattttgctgtctcttctgcactcaccctgatgatgccttactaccagcttcagcctgagagccctttgcctgaggcatttctctacattggatgggctcctgcccgctatgttgtggctgttggctccctctgtgctctttctaccagcctcctgggctccatgttccccatgcctcgggtgatctacgcgatggcagaggatggcctcctgttccgtgtacttgctcggatccacaccggcacacgcaccccaatcatagccaccgtggtctctggcattattgcagcattcatggcattcctcttcaaactcactgatcttgtggacctcatgtcaattgggaccctgcttgcttactccctggtgtcgatttgtgttctcatcctcaggtatcaacctgatcaggagacaaagactggggaagaagtggagttgcaggaggaggcaataactactgaatcagagaagttgaccctatggggactatttttcccactcaactccatccccactccactctctggccaaattgtctatgtttgttcctcattgcttgctgtcctgctgactgctctttgcctggtgctggcccagtggtcagttccattgctttctggagacctgctgtggactgcagtggttgtgctgctcctgctgctcattattgggatcattgtggtcatctggagacagccacagagttccactccccttcactttaaggtgcctgctttgcctctcctcccactaatgagcatctttgtgaatatttaccttatgatgcagatgacagctggtacctgggcccgatttggggtctggatgctgattggctttgctatctacttcggctatgggatccagcacagcctggaagagattaagagtaaccaaccctcacgcaagtctagagccaaaactgtagaccttgatcccggcactctctatgtccactcagtttgacatcgtcacacctaaatgctgtctggtcccctgcacaataatggagagtactcctgaccccagtgacagctagccctcccctgtgatggtggtggtggatactaatacagttctgtacgatgtgaaggatgtgtctttgctatttcttgtctattttaacccgtctgcttctaaatgatgtctagctgcttaccaactttaaaaaatgatattaaaagaaagtagaaaaat

SEQ ID NO: 184613 - DNA, 1946 bp, Homo sapiens
  Payload ID: 16353
  Gene Symbol: SLC7A10
  Gene Name: solute carrier family 7 (neutral amino acid transporter light chain, asc system), member 10
  Uniprot ID: Q9NS82
  ENST ID: ENST00000253188
  CDS Start-End: 148-1719
agtcccgggcccggagccagcgcatgcgcccgcctgtgggcgctgtcccggctgcgagggccgtgagctcacggaccgacggaccgacgggcggccggccggacagacggggcagcgcagggagcggggacgcggcgggacagcgacatggccggccacacgcagcagccgagcgggcgcgggaaccccaggcctgcgccctcgccctccccagtcccagggaccgtccccggcgcctcggagcgggtggcgctcaagaaggagatcgggctgctgagcgcctgcaccatcatcatcgggaacatcatcggctcgggcatcttcatctcgcccaagggggtcctggagcactcaggctccgtgggtctggccctgttcgtctgggtcctgggtgggggcgtgacggctctgggctccctctgctatgcagagctgggagtcgccatccccaagtctggcggggactacgcctacgtcacagagatcttcgggggcctggctggctttctgctgctctggagcgccgtcctcatcatgtaccccaccagccttgctgtcatctccatgaccttctccaactacgtgctgcagcccgtgttccccaactgcatcccccccaccacagcctcccgggtgctgtccatggcctgcctgatgctcctgacatgggtgaacagctccagtgtgcgctgggccacgcgcatccaggacatgttcacaggcgggaagctgctggccttgtccctcatcatcggcgtgggccttctccagatcttccaaggacacttcgaggagctgaggcccagcaatgcctttgctttctggatgacgccctccgtgggacacctggccctggccttcctccagggctccttcgccttcagtggctggaacttcctcaactatgtcaccgaggagatggttgacgcccgaaagaacctacctcgcgccatcttcatctccatcccactggtgaccttcgtgtacacgttcaccaacattgcctacttcacggccatgtccccccaggagctgctctcctccaatgcggtggctgtgaccttcggggagaagctgctgggctacttttcttgggtcatgcctgtctccgtggctctgtcaaccttcggagggatcaatggttacctgttcacctactccaggctgtgcttctctggagcccgcgaggggcacctgcccagcctgctggccatgatccacgtcagacactgcacccccatccccgccctcctcgtctgttgcggggccacagccgtcatcatgctcgtgggcgacacgtacacgctcatcaactatgtgtccttcatcaactacctctgctacggcgtcaccatcctgggcctgctgctgctgcgctggaggcggcctgcactccacaggcccatcaaggtgaaccttctcatccccgtggcgtacttggtcttctgggccttcctgctggtcttcagcttcatctcagagcctatggtctgtggggtcggcgtcatcatcatccttacgggggtgcccattttctttctgggagtgttctggagaagcaaaccaaagtgtgtgcacagactcacagagtccatgacacactggggccaggagctgtgtttcgtggtctacccccaggacgcccccgaagaggaggagaatggcccctgcccaccctccctgctgcctgccacagacaagccctcgaagccacaatgagatttttgtagagactgaagcagttgtttctgtttacatgttgtttattgaggaggtgttttggcaaaaaagttttgttttgtttttttctggaaaaaaaagaaaaaagatacgactctcagaagcctgtttaaggaagccctaaaatgtggactgggtttcctgtcttagcactgccctgctagctcttcctgaaaaggcctataaataaacagggctggctgttc

SEQ ID NO: 184614 - DNA, 1641 bp, Homo sapiens
  Payload ID: 16353
  Gene Symbol: SLC7A10
  Gene Name: solute carrier family 7 (neutral amino acid transporter light chain, asc system), member 10
  ENST ID: ENST00000590036
  CDS Start-End: 96-1265
tgcgagggccgtgagctcacggaccgacggaccgacgggcggccggccggacagacggggcagcgcagggagcggggacgcggcgggacagcgacatggccggccacacgcagcagccgagcgggcgcgggaaccccaggcctgcgccctcgccctccccagtcccagggaccgtccccggcgcctcggagcgggtggcgctcaagaaggagatcgggctgctgagcgcctgcaccatcatcatcgggaacatcatcggctcgggcatcttcatctcgcccaagggggtcctggagcactcaggctccgtgggtctggccctgttcgtctgggtcctgggtgggggcgtgacggctctgggctccctctgctatgcagagctgggagtcgccatccccaagtctggcggggactacgcctacgtcacagagatcttcgggggcctggctggctttctgctgctctggagcgccgtcctcatcatgtaccccaccagccttgctgtcatctccatgaccttctccaactacgtgctgcagcccgtgttccccaactgcatcccccccaccacagcctcccgggtgctgtccatggcctgcctgatgctcctgacatgggtgaacagctccagtgtgcgctgggccacgcgcatccaggacatgttcacaggcgggaagctgctggccttgtccctcatcatcggcgtgggccttctccagatcttccaaggacacttcgaggagctgaggcccagcaatgcctttgctttctggatgacgccctccgtgggacacctggccctggccttcctccagggctccttcgccttcagtggctggaacttcctcaactatgtcaccgaggagatggttgacgcccgaaagaacctacctcgcgccatcttcatctccatcccactggtgaccttcgtgtacacgttcaccaacattgcctacttcacggccatgtccccccaggagctgctctcctccaatgcggtggctgtgaccttcggggagaagctgctgggctacttttcttgggtcatgcctgtctccgtggctctgtcaaccttcggagggatcaatggttacctgttcacctactccagtgcggggccacagccgtcatcatgctcgtgggcgacacgtacacgctcatcaactatgtgtccttcatcaactacctctgctacggcgtcaccatcctgggcctgctgctgctgcgctggaggcggcctgcactccacaggcccatcaaggtgaaccttctcatccccgtggcgtacttggtcttctgggccttcctgctggtcttcagcttcatctcagagcctatggtctgtggggtcggcgtcatcatcatccttacgggggtgcccattttctttctgggagtgttctggagaagcaaaccaaagtgtgtgcacagactcacagagtccatgacacactggggccaggagctgtgtttcgtggtctacccccaggacgcccccgaagaggaggagaatggcccctgcccaccctccctgctgcctgccacagacaagccctcgaagccacaatgagatttttgtagagactgaagcagttgtttctgtttacatgttgtttattgaggaggtgttttggcaaaaaa

SEQ ID NO: 184615 - DNA, 1431 bp, Homo sapiens
  Payload ID: 16353
  Gene Symbol: SLC7A10
  Gene Name: solute carrier family 7 (neutral amino acid transporter light chain, asc system), member 10
  ENST ID: ENST00000592596
  CDS Start-End: 96-311
tgcgagggccgtgagctcacggaccgacggaccgacgggcggccggccggacagacggggcagcgcagggagcggggacgcggcgggacagcgacatggccggccacacgcagcagccgagcgggcgcgggaaccccaggcctgcgccctcgccctccccagtcccagggaccgtccccggcgcctcggagcgggtggcgctcaagaaggagatcgggctgctgagcgcctgcaccatcatcatcgctttctgctgctctggagcgccgtcctcatcatgtaccccaccagccttgctgtcatctccatgaccttctccaactacgtgctgcagcccgtgttccccaactgcatcccccccaccacagcctcccgggtgctgtccatggcctgcctgatgctcctgacatgggtgaacagctccagtgtgcgctgggccacgcgcatccaggacatgttcacaggcgggaagctgctggccttgtccctcatcatcggcgtgggccttctccagatcttccaaggacacttcgaggagctgaggcccagcaatgcctttgctttctggatgacgccctccgtgggacacctggccctggccttcctccagggctccttcgccttcagtggctggaacttcctcaactatgtcaccgaggagatggttgacgcccgaaagtgagtggggcccccaactgggccctgggaagcagccaggccctctggtgggacaggcagcctctccgcccagccccactgccacccaaggctcgggctggtcctcggtggcccacgcctgttgccctgcaaaaatggccctgggaagaaagccggggggcttgcattctagcctggccctgttctctctggctatggacacgtcacagccccttgcagggcctcagaaaggctgaatatcatcatcctgctgtaaatagatccagagatttgcatttggcctaaaattatgcatatacacacaatatggtccctacaaatgaagccaatgactgcgtctgatgctcggccagggatctcgacagtaaacctttgcagctgagcgagctgggactggaaagttccaggaagactctgggtctgtggactgggctctggggccattttggggaattttccaggctgattttggctgtatgcgattttatctttctgcacagacatcagaccctgtcctcaggatgtgatggggcccctcccccatctcccatcctaccagcctgtgtccaggtgggggtggggcagggcagacaacagggtccctgtgtctcgggcagcaatgctgccccctttcctgccccaacatccccagcagacacaagagatggagactatgagctgctctcgtggctgggtctcgggggtcctgcaccctcaggagctgacgctgacgcactccactgcctgtcacca

SEQ ID NO: 184616 - DNA, 789 bp, Homo sapiens
  Payload ID: 16353
  Gene Symbol: SLC7A10
  Gene Name: solute carrier family 7 (neutral amino acid transporter light chain, asc system), member 10
  ENST ID: ENST00000587064
  CDS Start-End: 96-311
tgcgagggccgtgagctcacggaccgacggaccgacgggcggccggccggacagacggggcagcgcagggagcggggacgcggcgggacagcgacatggccggccacacgcagcagccgagcgggcgcgggaaccccaggcctgcgccctcgccctccccagtcccagggaccgtccccggcgcctcggagcgggtggcgctcaagaaggagatcgggctgctgagcgcctgcaccatcatcatcgctttctgctgctctggagcgccgtcctcatcatgtaccccaccagccttgctgtcatctccatgaccttctccaactacgtgctgcagcccgtgttccccaactgcatcccccccaccacagcctcccgggtgctgtccatggcctgcctgatgctcctgacatgggtgaacagctccagtgtgcgctgggccacgcgcatccaggacatgttcacaggcgggaagctgctggccttgtccctcatcatcggcgtgggccttctccagatcttccaaggacacttcgaggagctgaggcccagcaatgcctttgctttctggatgacgccctccgtgggacacctggccctggccttcctccagggctccttcgccttcagtggctggaacttcctcaactatgtcaccgaggagatggttgacgcccgaaagaacctacctcgcgccatcttcatctccatcccactggtgaccttcgtgtacacgttcaccaacattgcctacttcacggccatgtccccccaggagctgctctcctccaa

SEQ ID NO: 184617 - DNA, 10103 bp, Homo sapiens
  Payload ID: 16354
  Gene Symbol: SLC7A14
  Gene Name: solute carrier family 7, member 14
  Uniprot ID: Q8TBB6
  ENST ID: ENST00000231706
  CDS Start-End: 317-2632
atctgaataattgaggagctgttcagcagcagcggctgcctcctgccttcctttgccgccaccaccacttcccatcccagctagagagacagctccgcgcagtaagtgcggactgccagccaccagccttggcagccagctcgtcgcctccagccccgaccccgacattcatgcccaggagaaggctgcactgggtccctctgggcctttcctaaaagggagatccctgttcactagatgagttccagaaccatccactaaggctttgtagcccccttccatcagctgaccttcactgcatcccctatcgctcaagatgagtggcttcttcacctcgctggacccccggcgggtgcagtggggagctgcctggtatgcaatgcactccaggatcctacgcaccaaaccagtggagtccatgctagagggaactgggaccaccacggcacatggaactaagctagcccaggtactcaccacagtggacctcatctctcttggcgttggcagctgtgtgggcactggcatgtatgtggtctctggcctggtggccaaggaaatggcaggacctggtgtcattgtgtccttcatcattgcagccgtcgcatccatattatcaggcgtctgctatgcagagtttggagttcgagtccccaagaccacaggatctgcctacacctacagctatgtcactgttggggaatttgtggcatttttcattggctggaacctgatcctggagtacctgattggcactgcggccggagccagtgctctgagcagcatgtttgactcactagccaaccacaccatcagccgctggatggcggacagcgtgggaaccctcaatggcctggggaaaggtgaagaatcatacccagaccttctggctctgttgatcgcggtcatcgtgaccatcattgttgctctgggggtgaagaattccataggcttcaacaatgttctcaatgtgctgaacctggcagtatgggtgttcatcatgatcgcaggcctcttcttcatcaatgggaaatactgggcggagggccagttcttgccccacggctggtcaggggtgctgcaaggagcagcaacatgcttctacgctttcattggctttgacatcatcgccaccactggagaggaagccaagaatcccaacacgtccatcccttatgctatcactgcctccctggtcatctgcctgacagcatatgtgtctgtgagcgtgatcttaactctgatggtgccatattataccattgacacggaatccccactcatggagatgtttgtggctcatgggttctatgctgccaaattcgtagtggccattgggtcggttgcaggactgacagtcagcttgctggggtccctcttcccgatgccgagggtcatttatgccatggctggtgacgggctccttttcaggttcctggctcacgtcagctcctacacagagacaccagtggtggcctgcatcgtgtcggggttcctggcagcgctcctcgcactgttggtcagcttgagagacctgatagagatgatgtctatcggcacgctcctggcctacaccttggtctctgtctgtgtcttgctccttcgataccaacctgagagtgacattgatggttttgtcaagttcttgtctgaggagcacaccaagaagaaggagggcattctggctgactgtgagaaggaagcttgttctcctgtgagtgagggggatgagttttctggcccagccaccaacacatgtggggccaagaacttaccatccttgggagacaatgagatgctcatagggaaatcagacaagtcaacctacaacgtcaaccaccccaattacggcaccgtggacatgaccacaggcatagaagctgatgaatccgaaaatatttatctcatcaagttaaagaagctgattgggcctcattattacaccatgagaatccggctgggccttccaggcaaaatggaccggcccacagcagcgacggggcacacggtgaccatctgcgtgctcctgctcttcatcctcatgttcatcttctgctccttcatcatctttggttctgactacatctcagagcagagctggtgggccatccttctggttgttctgatggtgctgctgatcagcaccctggtgtttgtgatcctgcagcagccagagaaccccaagaagctgccctacatggccccttgcctcccctttgtgcctgcctttgccatgctggtgaacatctatctcatgctaaagctctccaccatcacatggatccggtttgcggtctggtgctttgtgggtctgctcatttattttggatatggcatctggaacagcaccctggaaatcagcgctcgagaagaggccctgcaccaaagcacgtaccaacgctacgacgtggatgaccccttctcagtggaggagggtttctcctacgccacagagggcgagagccaggaggactggggcgggcccactgaagacaaaggcttctattaccaacagatgtcagatgcgaaggcaaacggccggacaagtagcaaagcgaagagcaaaagcaaacacaaacagaactcagaggccctgattgcaaatgatgagttagattactctccagagtaggagaaacacacaagtgggtagaaatggtgatgactgattttcagtaacttaacctgtgggctagaaggtgaaaacttttttggctctcatttcacaaatccagccttccccaaattcaatccctagtcatagcctgtcatttgctacttttgctcttcaggatagttctgttgaagggcttaacctgggtcccctaactggtcgccttgttaaataaaataaataaataaacaagaggctatatgaaattccatcttaggtgcaaccaccagagctgatggtaccaaatgtttcctaggcctttgctttgctggttgaagcccaagcaggggctctgggcagaaggcagaatttcagtcacctgagacatggggacaaagctctgttcttggcatgtcaggctgagtgctgctccccgaggtcagggtgggtagatgggcattggcacttcctgagcaagcatcattttatcctgcaatctcacccaaaattaattcatggaaaagacacatgcttctttttattcaccaacattctcacagcttccaaactataattttaggatccagcaaagttcagggactctggaccattttcccaatggtttcagattcaccataaagcagtcaggcagacccagtgatatggtaagaagcaccatcaaagctctatgtaaatgcccagaagaaaattaaataaccatatcttgcggtaaaagccagaagggcattggcagaaattaactctctgtcatggcctctcttatatcagactgcagctcctggtgatatgatgaaagcgggcaaaggtggagcatgatttcatggcactgatatgccttgaaaaagtaggttgtttgttttataatcagataaaaatttttacaaggagaagtgagccagccactgagatcacattgcaaattctctttcatatttctaaaattataaattctaaagtttttgagataggcaaccacttgattggtgtgtgctactctgaaaacaaaataggctgaagtatagcgacttaggtagttgcattccatgagatcacatttcacttctgaaccttattccttggggctagctcactttcagaggtgtatttttttttcctgttatttcccagagtagtttcactgaagcccagagaaatatctacctggtaagatgtaaatttgggccataaaaggggctattaaaagaattttctcagaaatagaatagatgagagaatttgcaaaggaaaaaaacacacatgggctacaatataaattctactcttgggttacaagaattcctgtggctgcactgagatacgtacaaatgtatgtgaaggcacaatttgaatcaagctatcatagaattaaccaagctattaaaattaatcaagctattaataaaatctctgtgaggatttcctgaaagagggacaaaagaagaaattccttgtcctttctctcctggatgtatcagtatgccaaacgttttccagaacatattcgctagcactcaagtctgttctttctgaaaggctgaggctcatgccatcttggcatgctttaggattatggcaaggaggtaaaagtccattttttcattcaactaacactggttgagaatagacccaatgctaagtgacaggaatgaatagaagcatggcacttgcccttgggggctacagtccatggatgagcagcactggagcctggtaaatgcagataaaacaacaaacttgacaagtctccaggctgatgcactgggttttaacatacatataaagatgaattgaaactagtttttaaaaaatatgctttaaataaattacatatcgtaatcatagccaatgtataccattaaactaaaataactgcaattttctagatattttttattcttctgtagtcattgtttagaactctggtttcctgaggtcattttgtcattttaatatcatgcttgacaatgctatgttttctcttccctagagttaaccataaagatacagtgcctactctgtgaaatacagcattaggaattaattataaactaattatcagtcatcttttgaaaacaaagttttgaattggctataggactcaacaaatctgcctggtgtaaatagaatctgttaagcttgatacatatctagatagatgaggaggggttgtattcattaagcatgagaatagagaaataggagtgcaaaatggcaaaatcttaacgtgggtgaaagagcttccttttactagtgaggtttaagtattaaagtaacaatagcctggtggcagatgaatgcaatttctataggatgggaatggaaaatgtatgctttggttaacaccattgctgttgacttcatgcagattctattaagcactctcatttcaggagccatttttcccacatagtatattagtatattttaagcttagctccctttatttttctaaagttgataaatcacctccctagcaaccttagttttaaaaaaaaaatcactaagatagaaaaagtattttcaggtacatagacatgtttgtcctcaggtttacctgcttctgtgaacagtcccagattttacaatgcagttttcaaataccatcaatcactacaatgacaatattactattttcttaacaggtttctaaacgatgtatgtgtgggatcacattaaaagtaagatcaccttataattatcttagaaactttgccccttgaagggagtccaaggaagacctacattttattgaattctgaatagcaaaagctctccgagtgagatttcattgtgtggatttgtggtttggagccaattacttgattttcttcagattttattctacttatttattggtactctgcttcatttcaaaaggatttgaggcagctactaaaatatatataatacaaaacaaaaattaagtgaggaactcagagcaaacaaaaatagaaacagaaaggataagacaaaactagacgtatatttagtacataaatgcagaaccctgacatgctttactaaatttgccaatgagtgacaccatgaaaaataatagaattagtggtaatgacaagaagaagtacttctgcatgataagaacaaatctttccccatgcaggtagaggtttgaaatagcatagatcattaaaatccacaggtaagcttcaaacctagattttgctagctacatgtgcctggcatatagtgtgtattcaagaaatacctgatgattgacagaatgaatgaattggaggaaaatgaaatatttattcaacaattacttgtggagtgcctattatgtactatggcagatattgatatcgtaagtcagataaaaatccagctcttaagaagtagaggaaatagagcttggtgtggtggcatgtgcctatgatcccagatagttgagagactgagggaggaggatcacttgagcccaggagttcaaggctgcagtgagctatgatcacaccactgtactccagcctgggtaacagaagaataccctgtctcttaaaaaggaaaatcaaataggggaaatgggatatataaataaagaacaatagtgaatgtgtcaggtgagatgacggacttgtaatgtgctgtggggggtcaaatatgaagaaggccttcttcctctggaaaggtcataaagaatgtcacacttgtgttggaacttgtgaagtgggtagaattttatcaagtagaaatgagagaaaggcatgccaagcaaaggatcggcatgaataaggtctactagtttgtggtcctctggctaagaatttgtgctgtgcctccattaagagaaagcaaggagctagtttgcctggagcacatgatttatgcatgacttatacatgcaacaataagaaataatgctaggaaggcaggtgagggatcactcacagagagacttgaatgtcacactgagctgactggctttcctcgggtgagagagtgggaaataattggggaactgacgaaagtgtgaatccaggaaggctgaactttaagaaagctgagacggtggcttccttacctatgcaaggaactaacaagccacatatacactccaaattgatttaacaaattaaagagaaaaatagctgtactttgagtcctgtgtctgcattcatcattaacctaagaaaatacagccatttaatacgtggacaagcaacacaatttaacagccactttaaagttttcaacaataggtttcaacaactaaacctaacaactttttatatctatctaatctaaacagtaaaatctcagctccaggttttactgagcttgagtgctacttttttttttttagacagagtctcattctgtcacccaggctggagtgcagtggcatgatcttggctcactgcaaccttcacctcccgggttcaagctattctcctgcctcagcctcccaagcagctgggattataggcgtgtgccagttctacttcttagtaacaaactagtagctaatcaaatgcctacataatggtcatgataaatctgtttaaataaatggcgggcggaagggagttgttgaatttaacaatccatccttcttcagaatctataggtcagccagaatataaatctagtaattattgaaaaacaaaacacaaactccttcaaagaaatctctctcctctattctgctgaaaagggttggtaaacctgacatcctttcttttattggaagacaaatccaacatttgttagacatccaacatttgttggaagtctaccttacaagaaaccacctcttatctgcaacataaacagaagctacatcaggttgaaaatccacatagaagactggagaaaattgccgtcccctttcgcactaggttttaccaggggcccaagatgtcagaggaaagtccgcggagggccaaacacaggtttacctaattatgaatctcagattagaatgtcttattgtgtggaaaagtcagaactcaggaaatgtgtctgaagccagagcgggggtctgcttacggagtctacgcagcgggtaggggtccactattggagtataaacctcaggtcagtgagtagtgcagaggtgtccctaacttccaatggagggaaagagaggagagcaaaggaaacacatccagaagtcgccacgagggctgtgtgccagcgctccattttcatgctgtttggaacaagacgtgtcaaggaagatgtttctatccaaagtcttcatggagcctctgcttcccctgtacctgtgtagctccctgaaactgaggacccacgtgtctgcaaagacctctggagatcctaagagagagaggcaccagcaggtaaccagtggtggcctggccacgaaagagtatttgaaattcaacagtgagcaagtgcagaaacagcatcccaaaccgcaggccccaccacacgcaggaaccagaaagctgaagtttcaccaaggagtttacttagtatttctcgctgggaatggggatgggtagcaaaaagcccctttcatgtacataatggttggtcctatgtcctacttttattttctctaagagttttagaagaaaggctgttttaatttttttttctccttaagagcaacttcctttttaaaatgctttcctcttcttgtcctgcttgagtaatgcaggcatcattctgaaatcattctgaaacagctaggcagtcgccttttgccaaaattacttctctaagaaaatagagtgttcttttttttaggacttagaacccacaaggggtgagtggaagttttgtagcccatcaaaggtgaatatgtgttctgcagtatcaactaaaacagtgtacaaaatcattaaactgggccgggcgcagtggctcatgcctgtaatcccagcactttgggaggccgaggcgggtggatcacctgaggccaggagttcaagaccagcctgaccaacatggagaaaccccatctctactaaaaatacaaaattagccaggtgtggtgttgcatgcctgtaatcccagctattagggaggctgaggcaggagaatcgcttgaacccgggaggcagaggttgcagtgagtcgagatcacaccattgcactccagcctgggcaataagagcaaaactccgtctcaaaaataataataataataatttaactgtgttctgcacacacagaattacaaaatccctataggactttcacagatagctttgggcttaaggtcttcggacaacaggtagttctaatttcttactctttgggacatttagtacatgttggtacacataaggaaagaaaatggcttatattagagctaggaaacaggggcagcctggatttttatggtaggaactcactctgtgcttttttttttttctgttaagttttcttgacactgacttcggtaacattggctaaagggaattgtgagtcatgtgaatttcacctgcagtgcagactttaaaggactgtgttcattctgatttggggatgaagagaatgttccatgcacatctattgattggtcttggcagttgctgatacgcttgtctcattcacactcccaaaggcgaggatttaccctagaaatcataaacccccactttccaaagcaaagatgctgttaatgttatgatggtgcataaatacctcaactgtctgggctgagagagggggctgcaggtttttaagagagcagctatagtcctcattccatgtagtcacatcatctgatgacaggactccacattctagcttttctcactgtggaaaagaaacgttactgtttaattaatatccaaagttataaatacagcttgtaaattttactaacttgtttctttttcgtttcgtccttgagaagtacaacttgcatttacagatggtaattcctagtgttgttctctgctatctttttttggtatgaaattgctgtatttgttaaagtttgttcgttttgtggtttttaattcccattggtgtgctgtacaatgtagtgtatcatgaagaaagaaataatatgcagatgtattatgaaatgtgttttattttcaaatgtgtggtgttgacaatatattgatttatcaagatactaagggaaaattctaaatttaacaaaatgtgtatattttaataaatgcataaagctttattgtgtgcctttaaatttaaaaatgggtttataaagaaagtcagaaacaaaagtgtcttactataaaatatccatagtaatgtaaagcttttacacgagactaccaaaaaaaaagaaagaaaagaaaaaggagccttcccatattttgttaaccttaaccagtatctgaagtctgttactttttttccattcttaaatggagatgaataagtgaatttcgccttaagtgtttcaattgtcctttgtagaaaagccagataaatgagttcactttgaattgcattattgtggaaaattcattttcagaataaaacattttaaaaagta

SEQ ID NO: 184618 - DNA, 2313 bp, Homo sapiens
  Payload ID: 16355
  Gene Symbol: SLC7A4
  Gene Name: solute carrier family 7, member 4
  Uniprot ID: O43246
  ENST ID: ENST00000382932
  CDS Start-End: 69-1976
gcggaggcagcggctgcggcagcagcaggttccagtagctggctcggtgctcttctcggccacctgccatggcccgggggctgcccaccattgctagcctggcacgcttatgccagaagctgaaccgcctgaagccgctggaggactccaccatggagacgtcactgcggcgctgcctgtccacgctggacctgactcttctgggcgtgggtggcatggtgggctcgggtctctacgtgctcacaggtgccgtggccaaggaggtggctggccctgctgtgctcttgtccttcggtgtggccgctgtggcctccctgctggcagccctatgctatgcagaatttggggcacgtgtgccacgcacgggctctgcctacctgttcacctacgtatccatgggcgagctgtgggccttcctcatcggctggaatgttctcctcgaatacatcatcggtggcgccgccgtggcccgtgcctggagtggctacctggactctatgttcagccacagcatccgcaacttcactgagacccacgtgggttcttggcaggtgcccctcctgggccactacccggacttcctggctgctggcatcatcctcctggcctctgcctttgtctcctgtggagcccgcgtgtcctcctggctcaatcacaccttctcggccatcagcctgcttgtcattctcttcattgtcatcctgggcttcatcctggcccagcctcacaactggagcgctgacgaaggcggctttgcacccttcggcttctccggcgtcatggccggcactgcctcctgcttctatgctttcgtgggcttcgacgtcattgccgcctccagtgaggaggcccagaacccacggcggtctgtgcctctggccatcgccatctcgcttgccattgcagctggtgcctacatccttgtctccaccgtgctaaccctcatggtgccctggcacagcctggaccccgactcagcgcttgcagatgccttctaccagcggggctacaggtgggctggcttcatcgtggcagctggctccatctgcgccatgaacaccgtcctgctcagcctcctcttctccctgccacgcattgtctatgccatggccgccgatgggctcttcttccaggtgtttgcccatgtgcacccccggacacaggtgcctgtggcgggcaccctggcgttcgggctcctcacggccttcctggcactgctgctggacctggagtcgctggttcagttcctgtcccttggcacactcctggcctacacattcgtggccaccagtatcattgtgctgcgcttccagaagtcttccccgcccagctccccaggcccagccagccctggccccctgaccaagcagcagagctccttctcagaccacctacagctggtgggcactgtacacgcctccgtccctgagccaggggagctgaagccagccctgaggccctacctgggcttcttggatgggtacagccctggagcagtggtgacttgggcgcttggcgttatgttggcctcagccatcaccataggctgcgtgcttgtctttgggaactcgaccctgcacctcccacactggggttacatcctgctgctcctgctcaccagtgtcatgtttctgctcagcctccttgtcctgggggctcaccagcaacagtatcgggaagacttatttcagatccccatggttcccctgattccagccctgagcatcgtcctcaacatctgcctcatgctgaaacttagctatctgacctgggtgcgcttctccatctggctgctgatgggacttgcagtgtatttcggctatggcatccggcatagcaaggagaaccagcgggagctgccagggctgaactccacacactacgtggtattccccaggggcagcctggaggagacagtgcaggctatgcagccccccagccaggcaccagcacaggaccctggccatatggagtagctgatcagcccacacttgccccgccctcccacacctgcttgggaggccagagaggccagacaagccgagagccccttctgttgtgggcagcctgggtttgcaggcctgcacaggctggggagtcctcaggaccttaggaccttcatccaggggctgggcttcgggtcttcaggagtgggccttggctggtgctggtgccatggactctgcccagagccttcttgtttatgatcagctccagctacctgggcagttgtggtggggtggatgggaaggcccacagcccaagggatccataataataattgcttggccagccatgtggcctgctggcgta

SEQ ID NO: 184619 - DNA, 2307 bp, Homo sapiens
  Payload ID: 16355
  Gene Symbol: SLC7A4
  Gene Name: solute carrier family 7, member 4
  Uniprot ID: O43246
  ENST ID: ENST00000403586
  CDS Start-End: 63-1970
gcggctgcggcagcagcagcaggttccagtagctggctcggtgctcttctcggccacctgccatggcccgggggctgcccaccattgctagcctggcacgcttatgccagaagctgaaccgcctgaagccgctggaggactccaccatggagacgtcactgcggcgctgcctgtccacgctggacctgactcttctgggcgtgggtggcatggtgggctcgggtctctacgtgctcacaggtgccgtggccaaggaggtggctggccctgctgtgctcttgtccttcggtgtggccgctgtggcctccctgctggcagccctatgctatgcagaatttggggcacgtgtgccacgcacgggctctgcctacctgttcacctacgtatccatgggcgagctgtgggccttcctcatcggctggaatgttctcctcgaatacatcatcggtggcgccgccgtggcccgtgcctggagtggctacctggactctatgttcagccacagcatccgcaacttcactgagacccacgtgggttcttggcaggtgcccctcctgggccactacccggacttcctggctgctggcatcatcctcctggcctctgcctttgtctcctgtggagcccgcgtgtcctcctggctcaatcacaccttctcggccatcagcctgcttgtcattctcttcattgtcatcctgggcttcatcctggcccagcctcacaactggagcgctgacgaaggcggctttgcacccttcggcttctccggcgtcatggccggcactgcctcctgcttctatgctttcgtgggcttcgacgtcattgccgcctccagtgaggaggcccagaacccacggcggtctgtgcctctggccatcgccatctcgcttgccattgcagctggtgcctacatccttgtctccaccgtgctaaccctcatggtgccctggcacagcctggaccccgactcagcgcttgcagatgccttctaccagcggggctacaggtgggctggcttcatcgtggcagctggctccatctgcgccatgaacaccgtcctgctcagcctcctcttctccctgccacgcattgtctatgccatggccgccgatgggctcttcttccaggtgtttgcccatgtgcacccccggacacaggtgcctgtggcgggcaccctggcgttcgggctcctcacggccttcctggcactgctgctggacctggagtcgctggttcagttcctgtcccttggcacactcctggcctacacattcgtggccaccagtatcattgtgctgcgcttccagaagtcttccccgcccagctccccaggcccagccagccctggccccctgaccaagcagcagagctccttctcagaccacctacagctggtgggcactgtacacgcctccgtccctgagccaggggagctgaagccagccctgaggccctacctgggcttcttggatgggtacagccctggagcagtggtgacttgggcgcttggcgttatgttggcctcagccatcaccataggctgcgtgcttgtctttgggaactcgaccctgcacctcccacactggggttacatcctgctgctcctgctcaccagtgtcatgtttctgctcagcctccttgtcctgggggctcaccagcaacagtatcgggaagacttatttcagatccccatggttcccctgattccagccctgagcatcgtcctcaacatctgcctcatgctgaaacttagctatctgacctgggtgcgcttctccatctggctgctgatgggacttgcagtgtatttcggctatggcatccggcatagcaaggagaaccagcgggagctgccagggctgaactccacacactacgtggtattccccaggggcagcctggaggagacagtgcaggctatgcagccccccagccaggcaccagcacaggaccctggccatatggagtagctgatcagcccacacttgccccgccctcccacacctgcttgggaggccagagaggccagacaagccgagagccccttctgttgtgggcagcctgggtttgcaggcctgcacaggctggggagtcctcaggaccttaggaccttcatccaggggctgggcttcgggtcttcaggagtgggccttggctggtgctggtgccatggactctgcccagagccttcttgtttatgatcagctccagctacctgggcagttgtggtggggtggatgggaaggcccacagcccaagggatccataataataattgcttggccagccatgtggcctgctggcgta

SEQ ID NO: 184620 - DNA, 416 bp, Homo sapiens
  Payload ID: 16355
  Gene Symbol: SLC7A4
  Gene Name: solute carrier family 7, member 4
  ENST ID: ENST00000426145
  CDS Start-End: 172-416
agaaggtgggctgcggactttcagacgtggcccttaacctccccgaactgacctaggctagtcagtcagccggcggtctgaccttctccatctgtgactgagtcacagtcacagggcttccctagaccccggttccagtagctggctcggtgctcttctcggccacctgccatggcccgggggctgcccaccattgctagcctggcacgcttatgccagaagctgaaccgcctgaagccgctggaggactccaccatggagacgtcactgcggcgctgcctgtccacgctggacctgactcttctgggcgtgggtggcatggtgggctcgggtctctacgtgctcacaggtgccgtggccaaggaggtggctggccctgctgtgctcttgtccttcggtgtggccgctgtggcctc

SEQ ID NO: 184621 - DNA, 4189 bp, Homo sapiens
  Payload ID: 16356
  Gene Symbol: SLC7A6OS
  Gene Name: solute carrier family 7, member 6 opposite strand
  Uniprot ID: Q96CW6
  ENST ID: ENST00000263997
  CDS Start-End: 20-949
gtgctcagcggcagccactatggaggccgccaggaccgctgtactccgggtgaagcggaagcgcagtgcggagccggcggaggctcttgtgctcgcttgtaaacgcctccggagcgacgcggtcgagtcagcggcacagaagacgtcggagggtttggagagagcggcggagaataatgtcttccacttggtggccactgtgtgctcccaggaggaaccagtccagcctctcctgcgggaagttctgcgcccgtcacgggacagccagcagcgtgtccgccgtaatctccgcgcctcggctcgggaggtccggcaggagggccgctaccgggtgctttccagccgccgatccttggggaccacctcgagcggccaggagtccgagtacacgccggggaacccagaagccgccgggaactcgggctttcagttgttagaccttgtccacgaggagggagaacctgaagccgcctctgcaggctcctgcaaaacatctgacccagatgtgatcctctgcaattctgtagagttgatccgtgagcgattgactgtgtctgaggatggaccaggagtcaggcgccaggaagaacaaaaacacgatgactatgtgtatgacatttactacttggagacggccactccaggctggattgagaacatcctctccgtgcagccctacagccaagaatgggagctggtgaatgatgatcaagaaccagaggacatttacgacgatgaagatgacgagaacagtgagaataactggcgcaatgagtacccagaggaggagagcagtgatggagatgaggattccagaggctctgctgactacaacagcctgagtgaggaggaaagaggcagcagcagacagcggatgtggagcaagtaccctctggatgtgcagaaggagttcggctatgacagcccccacgacctggattcagactgatggtcttgtgatgtccatgaggttctgccacatgcccttgagggctctgagtccagagttaactgccctgctgacatcctgttaggtttcctagcttaacatgtggaaggaaaagcatatcaagcatatcgggcggcaccatcccaccacagtgaaaacttatgttaggggagtgagtcttttccacttacagtaggacccctttgcctcaatcaaaagtgaccctacagtttgaaagaaaaaaaaacgttgaaaaaaggaaggtttctttagctttagcttcttggcccaggaatttttcctggcattcaggttctgtgctgaaaccacaagggagggggaggttcccatttcattagcagtaagcttctgctgtgccataccaccaggctgcctgcctctaggaaaaccctgttccttttgatagaatctaaaaggggtaccagtgggtcccttgtagcaatacagactggatagtaatggccattagggcagaaagtagtctgagcagtgggagattttagttaacagctatttctgcttccaaactctgataacggttgtgaaattactgactgacttcctttggcagtggggccaagaaacaatatatatgaatgtgatacatgtgtttagtaaaatctagctttgaacatggaagaaagtaattctttgaaaaccttttaaatctgaatatctaaaacagggagcggtagtgaaatagaaggttcagcattgattataaataccaaggacttaaggcaagggaggaaaaacaaagtaccttctgaacttagctttccactgagtaatgtttactcttcacagcacccaccacaaaaacaaactactatcaacaggatcaattttattaacaacttgtatctcttctaagcagactctgtccgtatgcctttccaaaccatagctgccttaactgactgccttggtgtttattctagcgtaacattgtccagtagaactatctgcagtgatgatatgttctgtgtctgcactgtgtagtagtagacacgggtggctgctgagcacttgaaatgtgattagcgcaactgagaaactgagcttttaattttatttcattttaatgtaattagctacacgtggctagtagctgttgcagcggacaccacaggtctaaggaaacaacacagaacattcagctaggggtgtaccctcatagcctgtgagtgtctcttactcactgtcatgggggaaggtgagttacacagggaggtaccttcttgccgcctcttttaggatttcctaagtatctctccttcatcctacctgccatcattctttgactttatgtccattttctaaacctttgcctacacttgctcttatctacatggagttgttcaacctgccgaagtgattaaattctgtgtacacaggccgtatatattgcagctaattaaaacaacaaacatcctaggcatgcacaaaggtataattcaccgttataacaggcagcaacttgtatgtctaatattagacatcttgctttctgtctgtaggcatagaaacaaaggattgaaagccattctcatacagcaaccgggtgaaaaaaacaaaacactgtgctgttacaatgtgctccctgctatttatactcattaagtttccccaatattaaagggctgacaacttaataaactgtactcactgcaaaagggataataagcacaccaggaaaaggatttaaggagacagacaacaaagagctggcagaaattaattccaccatgaagcttgagtgctgtagggatcctctggcttcgctcccaaagagaggatcctgggagaagtctgtatccagcacagaggggaaaaatgctgtcaccatccaaaaatgaaaggaggatgacatggctcactaagcaagtactagggcacctggcatgtgaggtccttgctttccctagaagccactggtggggggcagcaaattcctgggattagctggttatctggtggagaaagctaaagctggggtcagggatctttaaaaggcaagcacattttgcttaaaggattagctccagaggagccctgggatgggtgccagcttagctcagacagaagtcatgttcttagcgttcaggcaagtcagcctttgcataagacaccctgtcgtcgggcaggaatttgccgttacaaatcccaaacccatgacagtaggaatgtcaccccatgcttcacatatgcattatgctctgaacccagggcaactatgaccatgcttccttcaatctttattgagcaaatatatggccaaggttattcccttatctgtgactgggtggagaagaatggtcaggaagggagactgcctcactgttgaccaattccaaaacctaaggataagcccatggggtatgtcaagctagcaggttcttctcggcccaggatgacagtgtctgggggcatcacaaaacagttgtacaatccaatgcagccgtcctgctcatacagtaagatccattaggccagagcaggcctaacttgggtggagagcccagcctgagcaccagaattagttgcttccacttgtgcagcctgctgaagagccggactcaggttgaagcagctttcctcccagtcttcactgatctccacagggagaaaacagaagtccccacaagtaccaagctcttcctgagactgcagccaccacacctcggggaaggggaggctggcaggagaggagtacactgtcccggtgacccacaccaaggtggctccaagtgtaaacaaagcctggtgccagggacagaagaggatgcagcctgatgtgaggttttcagaaaagtgaaatgacctagcaccaggttgggattgcttgggtctgcacagcagtccctcacactgcccttacagagaggaacaggttatttgatgacttgggcccatgagatgttctccaagccattgacagctgagagaattcaggtgatccacctgaatatcagaagtttcagccctcttagagttcgtaacagaaacccagagatttactgtcagctagaacaaagatgtaaggtctcaagtaaaataaaggattgtccttcaaaacagcaatattaacagacttctgactcaggaatttgttcatctgtccttgctggacctgagccaagtgcttgtaacgtgatctatgatctatctgtatgctaaagtgtaacaggtacgtgagtaaaaaaatctttaaggttc

SEQ ID NO: 184622 - DNA, 706 bp, Homo sapiens
  Payload ID: 16356
  Gene Symbol: SLC7A6OS
  Gene Name: solute carrier family 7, member 6 opposite strand
  ENST ID: ENST00000561590
  CDS Start-End: 1-360
tctgacccagatgtgatcctctgcaattctgtagagttgatccgtgagcgattgactgtgtctgaggatggaccaggagtcaggcgccaggaagaacaaaaacacgatgactatgtgtatgacatttactacttggagacggccactccaggctggattgagaacatcctctccgtgcagccctacagccaagaatgggagctggtgaatgatgatcaagaaccagaggacatttacgacgatgaagatgacgagaacagtgagaataactggcgcaatgagtacccagaggaggagagcagtgatggagatgaggattccagaggtgggtggcagccccagaccgggagggactggtaggatctgagactgaggtgcaggcatagttgacaggtgcatcttaattgcctttccttctctgtcattgagcgccagcagcccagccgcaactgagccatgctgtaggagacccaaagaccagtgtttcccaggggcctcctgggggtgtaataatccatcaggcctggattcaaatctgtagttgtcattactttgctgtggctcttgggcagttacttcacctcactgagcctcattttctctccaaatgagatggttctgcatgaattttagtggttgagattatgtaaaatatgtagctcattgtctcttcccctgccccagtcaagaaaccaatgaagagaga

SEQ ID NO: 184623 - DNA, 428 bp, Homo sapiens
  Payload ID: 16356
  Gene Symbol: SLC7A6OS
  Gene Name: solute carrier family 7, member 6 opposite strand
  ENST ID: ENST00000568315
  CDS Start-End: 1-118
aaaacacgatgactatgtgtatgacatttactacttggagacggccactccaggctggattgagaacatcctctccgtgcagccctacagccaagaatgggagctgatgtgtaggtgaatgatgatcaagaaccagaggacatttacgacgatgaagatgacgagaacagtgagaataactggcgcaatgagtacccagaggaggagagcagtgatggagatgaggattccagagctccaaggggaagagaagctgatacactcctcagacccactaactggcactgggtctcacttctgatccttctccttccttctatcctgccataaatgtcctacaggtttggtcctctctgtgcacaggtaaatattacacacagtggaaattcaactatgtgctaaactaatgaataaagaaggctgcttgt

SEQ ID NO: 184624 - DNA, 1187 bp, Homo sapiens
  Payload ID: 16356
  Gene Symbol: SLC7A6OS
  Gene Name: solute carrier family 7, member 6 opposite strand
  ENST ID: ENST00000619380
  CDS Start-End: 26-742
cccacagtgctcagcggcagccactatggaggccgccaggaccgctgtactccgggtgaagcggaagcgcagtgcggagccggcggaggctcttgtgctcgcttgtaaacgcctccggagcgacgcggtcgagtcagcggcacagaagacgtcggagggtttggagagagcggcggagaataatgtcttccacttggtggccactgtgtgctcccaggaggaaccagtccagcctctcctgcgggaagttctgcgcccgtcacgggacagccagcagcgtgtccgccgtaatctccgcgcctcggctcgggaggtccggcaggagggccgctaccgggtgctttccagccgccgatccttggggaccacctcgagcggccaggagtccgagtacacgccggggaacccagaagccgccgggaactcgggctttcagttgttagaccttgtccacgaggagggagaacctgaagccgcctctgcaggctcctgcaaaacatctgacccagatgtgatcctctgcaattctgtagagttgatccgtgagcgattgactgtgtctgaggatggaccaggagtcaggcgccaggaagaacaaaaacacgatgactatgtgtatgacatttactacttggagacggccactccaggctggattgagaacatcctctccgtgcagccctacagccaagaatgggagctggtgaatgatgatcaagaaccaggacatttacgacgatgaagatgacgagaacagtgagaataactggcgcaatgagtacccagaggaggagagcagtgatggagatgaggattccagaggctctgctgactacaacagcctgagtgaggaggaaagaggcagcagcagacagcggatgtggagcaagtaccctctggatgtgcagaaggagttcggctatgacagcccccacgacctggattcagactgatggtcttgtgatgtccatgaggttctgccacatgcccttgagggctctgagtccagagttaactgccctgctgacatcctgttaggtttcctagcttaacatgtggaaggaaaagcatatcaagcatatcgggcggcaccatcccaccacagtgaaaacttatgttaggggagtgagtcttttccacttacagtaggacccctttgcctcaatcaaaagtgaccctacagtttg

SEQ ID NO: 184625 - DNA, 910 bp, Homo sapiens
  Payload ID: 16356
  Gene Symbol: SLC7A6OS
  Gene Name: solute carrier family 7, member 6 opposite strand
  ENST ID: ENST00000568538
  CDS Start-End: 1-628
cgagtcagcggcacagaagacgtcggagggtttggagagagcggcggagaataatgtcttccacttggtggccactgtgtgctcccaggaggaaccagtccagcctctcctgcgggaagttctgcgcccgtcacgggacagccagcagcgtgtccgccgtaatctccgcgcctcggctcgggaggtccggcaggagggccgctaccgggtgctttccagccgccgatccttggggaccacctcgagcggccaggagtccgagtacacgccggggaacccagaagccgccgggaactcgggctttcagttgttagaccttgtccacgaggagggagaacctgaagccgcctctgcaggctcctgcaaaacatctgacccagatgtgatcctctgcaattctgtagagttgatccgtgagcgattgactgtgtctgaggatggaccaggagtcaggcgccaggaagaacaaaaacacgatgactatgtgtatgacatttactacttggagacggccactccaggctggattgagaacatcctctccgtgcagccctacagccaagaatgggagctggtaagggggcccatgagcagacggggcatgaggcatcctaagctcttaatctaatcagaatgctttgcttccctgggctccactcccgaacaacattgtccttagttcttttcctcctgaaaaggaagaaattattctaagtgccttttaggaacctgactttatagtacagggaatttggggaaagatcatcttagattgatcatttttacattaatgaatattttacaaggtttgcaacatcacctttattgtttatagctatccattcttaggggggaaatatgtatatggggcttatgataagataaagacgataaaatcagaaattcttaa

SEQ ID NO: 184626 - DNA, 2922 bp, Homo sapiens
  Payload ID: 16357
  Gene Symbol: SLC8A1
  Gene Name: solute carrier family 8 (sodium/calcium exchanger), member 1
  Uniprot ID: P32418
  ENST ID: ENST00000332839
  CDS Start-End: 1-2922
atgtacaacatgcggcgattaagtctttcacccaccttttcaatgggatttcatctgttagttactgtgagtctcttattttcccatgtggaccatgtaattgctgagacagaaatggaaggagaaggaaatgaaactggtgaatgtactggatcatattactgtaagaaaggggtgattttgcccatttgggaaccccaagacccttcttttggggacaaaattgctagagctactgtgtattttgtggccatggtctacatgtttcttggagtctctatcatagctgatcggttcatgtcctctatagaagtcatcacatctcaagaaaaagaaataaccataaagaaacccaatggagagaccaccaagacaactgtgaggatctggaatgaaacagtttctaacctgaccttgatggccctgggatcttctgctcctgagattctcctttcagtaattgaagtgtgtggccataacttcactgcaggagacctcggtcctagcaccatcgtgggaagtgctgcattcaatatgttcatcattattgcactctgtgtttatgtggtgcctgacggagagacaaggaagattaagcatttgcgtgtcttctttgtgacagcagcctggagcatctttgcctacacctggctttacattattttgtctgtcatatctcctggtgttgtggaggtctgggaaggtttgcttactttcttcttctttcccatctgtgttgtgttcgcttgggtagcggataggagacttctgttttacaagtatgtctacaagaggtatcgagctggcaagcagagggggatgattattgaacatgaaggagacaggccatcttctaagactgaaattgaaatggacgggaaagtggtcaattctcatgttgaaaatttcttagatggtgctctggttctggaggtggatgagagggaccaagatgatgaagaagctaggcgagaaatggctaggattctgaaggaacttaagcagaagcatccagataaagaaatagagcaattaatagaattagctaactaccaagtcctaagtcagcagcaaaaaagtagagcattttatcgcattcaagctactcgcctcatgactggagctggcaacattttaaagaggcatgcagctgaccaagcaaggaaggctgtcagcatgcacgaggtcaacactgaagtgactgaaaatgaccctgttagtaagatcttctttgaacaagggacatatcagtgtctggagaactgtggtactgtggcccttaccattatccgcagaggtggtgatttgactaacactgtgtttgttgacttcagaacagaggatggcacagcaaatgctgggtctgattatgaatttactgaaggaactgtggtgtttaagcctggtgatacccagaaggaaatcagagtgggtatcatagatgatgatatctttgaggaggatgaaaatttccttgtgcatctcagcaatgtcaaagtatcttctgaagcttcagaagatggcatactggaagccaatcatgtttctacacttgcttgcctcggatctccctccactgccactgtaactatttttgatgatgaccacgcaggcatttttacttttgaggaacctgtgactcatgtgagtgagagcattggcatcatggaggtgaaagtattgagaacatctggagctcgaggaaatgttatcgttccatataaaaccatcgaagggactgccagaggtggaggggaggattttgaggacacttgtggagagctcgaattccagaatgatgaaattgtcaaaacaatatcagtcaaggtaattgatgatgaggagtatgagaaaaacaagaccttcttccttgagattggagagccccgcctggtggagatgagtgagaagaaagccctgttattgaatgagcttggtggcttcacaataacaggaaaatacctgtttggccaacctgtcttcaggaaggttcatgctagagaacatccgattctctctactgtaatcaccattgcagacgaatatgatgacaagcagccactgaccagcaaagaggaagaggagaggcgcattgcagaaatggggcgccccatcctgggagagcacaccaagttggaagtgatcattgaagaatcctatgaattcaagagtactgtggacaaactcattaagaagacaaacctggcccttgtggttgggactaacagctggagagaacagttcattgaagctatcactgtcagtgctggggaagatgatgacgacgatgaatgtggggaagagaagctgccctcctgtttcgattacgtgatgcactttctgactgtgttctggaaggtcctgtttgccttcgtcccccctactgaatactggaatggctgggcgtgtttcattgtctccatcctcatgattggcctactgacagctttcattggagacctggcttcccactttggctgcaccattggcctgaaagattctgtgactgcagtcgtgttcgtcgcacttggaacatcagtgccagacacatttgccagcaaagtggcagccacccaggaccagtatgcagacgcctccataggtaacgtcacgggcagcaacgcggtgaatgtcttcctgggaatcggtgtggcctggtccatcgctgccatctaccacgcagccaatggggaacagttcaaagtgtcccctggcacactagctttctctgtcactctcttcaccatttttgctttcatcaatgtgggggtgctgctgtatcggcggaggccagaaatcggaggtgagctgggtgggccccggactgccaagctcctcacatcctgcctctttgtgctcctatggctcttgtacattttcttctcctccctggaggcctactgccacataaaaggcttctaa

SEQ ID NO: 184627 - DNA, 20987 bp, Homo sapiens
  Payload ID: 16357
  Gene Symbol: SLC8A1
  Gene Name: solute carrier family 8 (sodium/calcium exchanger), member 1
  Uniprot ID: P32418
  ENST ID: ENST00000406785
  CDS Start-End: 191-3004
ggcgctgcacggtagtcagcccgccgccgccgcctgctttgtgcttcccacagaagatgggagcgacctcttcctgatcgggagctgtttaaaaggagggagtgcgccgtattttctactagcgtggaggaacggaggaagaatccattcacactccccaaaccagtaggttgtgacagttggaagtgtcatgtacaacatgcggcgattaagtctttcacccaccttttcaatgggatttcatctgttagttactgtgagtctcttattttcccatgtggaccatgtaattgctgagacagaaatggaaggagaaggaaatgaaactggtgaatgtactggatcatattactgtaagaaaggggtgattttgcccatttgggaaccccaagacccttcttttggggacaaaattgctagagctactgtgtattttgtggccatggtctacatgtttcttggagtctctatcatagctgatcggttcatgtcctctatagaagtcatcacatctcaagaaaaagaaataaccataaagaaacccaatggagagaccaccaagacaactgtgaggatctggaatgaaacagtttctaacctgaccttgatggccctgggatcttctgctcctgagattctcctttcagtaattgaagtgtgtggccataacttcactgcaggagacctcggtcctagcaccatcgtgggaagtgctgcattcaatatgttcatcattattgcactctgtgtttatgtggtgcctgacggagagacaaggaagattaagcatttgcgtgtcttctttgtgacagcagcctggagcatctttgcctacacctggctttacattattttgtctgtcatatctcctggtgttgtggaggtctgggaaggtttgcttactttcttcttctttcccatctgtgttgtgttcgcttgggtagcggataggagacttctgttttacaagtatgtctacaagaggtatcgagctggcaagcagagggggatgattattgaacatgaaggagacaggccatcttctaagactgaaattgaaatggacgggaaagtggtcaattctcatgttgaaaatttcttagatggtgctctggttctggaggtggatgagagggaccaagatgatgaagaagctaggcgagaaatggctaggattctgaaggaacttaagcagaagcatccagataaagaaatagagcaattaatagaattagctaactaccaagtcctaagtcagcagcaaaaaagtagagcattttatcgcattcaagctactcgcctcatgactggagctggcaacattttaaagaggcatgcagctgaccaagcaaggaaggctgtcagcatgcacgaggtcaacactgaagtgactgaaaatgaccctgttagtaagatcttctttgaacaagggacatatcagtgtctggagaactgtggtactgtggcccttaccattatccgcagaggtggtgatttgactaacactgtgtttgttgacttcagaacagaggatggcacagcaaatgctgggtctgattatgaatttactgaaggaactgtggtgtttaagcctggtgatacccagaaggaaatcagagtgggtatcatagatgatgatatctttgaggaggatgaaaatttccttgtgcatctcagcaatgtcaaagtatcttctgaagcttcagaagatggcatactggaagccaatcatgtttctacacttgcttgcctcggatctccctccactgccactgtaactatttttgatgatgaccacgcaggcatttttacttttgaggaacctgtgactcatgtgagtgagagcattggcatcatggaggtgaaagtattgagaacatctggagctcgaggaaatgttatcgttccatataaaaccatcgaagggactgccagaggtggaggggaggattttgaggacacttgtggagagctcgaattccagaatgatgaaattgtgaagatcattaccattagaatatttgaccgtgaggaatatgagaaagagtgcagtttctcccttgtgcttgaggaaccaaaatggataagaagaggaatgaaaggtggcttcacaataacagacgaatatgatgacaagcagccactgaccagcaaagaggaagaggagaggcgcattgcagaaatggggcgccccatcctgggagagcacaccaagttggaagtgatcattgaagaatcctatgaattcaagagtactgtggacaaactcattaagaagacaaacctggcccttgtggttgggactaacagctggagagaacagttcattgaagctatcactgtcagtgctggggaagatgatgacgacgatgaatgtggggaagagaagctgccctcctgtttcgattacgtgatgcactttctgactgtgttctggaaggtcctgtttgccttcgtcccccctactgaatactggaatggctgggcgtgtttcattgtctccatcctcatgattggcctactgacagctttcattggagacctggcttcccactttggctgcaccattggcctgaaagattctgtgactgcagtcgtgttcgtcgcacttggaacatcagtgccagacacatttgccagcaaagtggcagccacccaggaccagtatgcagacgcctccataggtaacgtcacgggcagcaacgcggtgaatgtcttcctgggaatcggtgtggcctggtccatcgctgccatctaccacgcagccaatggggaacagttcaaagtgtcccctggcacactagctttctctgtcactctcttcaccatttttgctttcatcaatgtgggggtgctgctgtatcggcggaggccagaaatcggaggtgagctgggtgggccccggactgccaagctcctcacatcctgcctctttgtgctcctatggctcttgtacattttcttctcctccctggaggcctactgccacataaaaggcttctaaaggaactatcagatatagtaaatttatatatatacatatatatacataaaaattatgtataatggacagaggaaactgacatttgtcatgttcacttacctgctgatggaatccagcttcaagagcatactctgtactagggccgaagtaaaaaaccatcacctcccattcccaggggcatcatcatgttcaacaaggcatggaggcagggccatctttgcagctcagtctagaagggctgcactctctccaggttgataaatccttaaggctttgatttgttttgtttttggttttgttttcagtggagctggggaggtagttaatgtttggctttatttttgttattttgttttgttttgtttttttgggagagtcagggttgttgcttttctttgtggaaagtgaaaccatccaaatgtaaatgggttttggtaaaaatttaaatcattagtattccccctcacctcccccaatcactttaaaacttattttggattaagaaaaaatctgggcatggaagaagaaagaagcatgtcttcatcgtattaccaaagttcatgcttatctccggaatgtgagtggaggtgaagctgcctccaagaagaagcataaaagtggaatggagccaggaaatccgatggttctagaaatagtctgatatttaaacatgtgatacctggcagtctcgtttaacaggtacaaggaaaacgtgcctagattcccaggaacgtgcaaaatcctttctttcttatctctttagctctggactgtgattggcaaggtccttcttccagcattcagcccagctaagcccccaggtgccccatcccaaccctgttcctcctgtccacctgccatcccctatgcaaacagtaagaataaccccattcaaaaagcacatcatcgttttccatttgcattaacatgtgtctcagtcccatgttgccgttgcttgggattgtctgtcagttttattttcaaaggcatccatggcttgcacaatcctgttccagtcatgactgaacatttgctccttcttcatgtgccgttcggaaatgttgttgtgatacctgttacacagtgcatggtgaaaaacaaataaaacaaaacaaagagtatctgtatatagtagagtatagtacatactgttctcccatttggcaatgttgattggacattgaagacataagtgagttttcttttcacctgagttgttacttttgtgctgttattgagtttgattaattactagggataaaaggagaaaatggattattgttcacggttctgcacattcatttctaagaagcaataactgtcatgtggggagaagttaaagctattgagaggatagcaggcaaactacaaagatcttcatggaaaattagccatgtggaacacatcagaggcctctaaaaatcacccattaattcaggaaggccaaggagaaaggccttatagagacgttgatatgttggatgtgcctaggctttcagagccaccctttccacaacacccctccctgcaaagtatttatttcacatctgcactgtctggcacagatggtagatagtgctggtttgttcattttatttttttacttaaaaggctattttgagccctgtttctttcactgtccagtctagtcctctttgattatatcagtagttgctgagtaagaaagaagccagggtgaccaacgggcctttaaaagtgttgtctcctctacttatgctgaaagagaaggcaattaaataagactagtacctcccaggaggattggactgggatatttttaaccctttaaaaagaatagctgtttctatgttaaaataccaaagaacatggataaacccaacattccaaagtagtgagtccactaatgagaaaaataatagaatgactttggtcacctctcggagacttctgtgtctataaggaatcccaggctggagacattcctagccctctgtattgattcaaaaatacttaataaattaaagctgttgagacttattttttcttctgtcactcagtaaccatgatccttcctcatttaataaacatttggtgactgaatgagtaattaaatgctggttacccacttaatgtgccaggtagtatgatactttctggggactaagccatgaacaaaacagtctagatccctgccctcagaagggttacagtttatgtgattactattttcatgagtaaaagtgaagaaagccatatggaaagatttttatcttgcaagaaaaaacaattatgaaactcttttaacataaacacactgaaactgtatcaaagcaattgtccaaattgtatttatacccaagaatttctttaactaagagagcataaggcatatgtttggaaaaccaccctctttatctttgaccgacttgcagataaatatatctctccattttaaaccaagaagggcaatcatgttggtgatccagatcactgagaaagcccagtgtatcccatcttttatctttgttggcaatggaacttttctatggcccacactttacaattctttgtcattctaacccatccttcccatccttattttttttttttttgagaattgctaaatggaaagctagcctagaagcaccaagtaaatatattcaaggaatataagttgtttaaacattagaaaaatttttgcactcattttttagctgtattaggaatgtcaataatcctgtagcaaattttcacagagaactttaagaaattcttgcattggtcgatttcaatttgaaagctttttggtttgtttgctttttaaattttcatgttctaggaaactatgattctggttgttcaggattgttattattatagttgtgtaaaattattttattttgtgtgtattgtgcacagcttggggggggggcgggaaatgcactaattgtgctcttccttataaatggtacatattactgacacagacaaataaagtttctaattgtttctgatttaatcactagtgatacagcatattctgtatgaaatgttttctcctttctcattgtcatctacttcattttttgttttcatgttttgaagaaataaaaaccaaaatggtattattgtgcaactggtatcatcatccaaagaaaaaaacagacaccaagtattcaaactcttgcaaacgtcaacccttcggtcatgcaatgttctctttttaatgtcccaggagaacacagtgtcagaatatttgtctgtcctacagtgctgagatatatgttggacattcctccatttcactgattttttttacgttgcttagtatgactctatctacatcctttcctgcatccaggatcataagcccataaacagttacatgtcagacaactttttagcatgcagagtattacatcaaatcagtcgatcccaaaaaattccaatcccaaaattgatggtagtacagtttcttcccaaggggatgtttaagtaaatttctcttttagtttcatatgttatattcctcttgtagaacttctgcctcgcattaacgatttctgtctatatcttattaacttcatatatcatatagtcaaaacagtatagaaggaagtgatgtcagaaatggaataagcatttgtggggaaaaaatgtgacctctaaggtttgtgtacttatttgaagttgacatattagtggacttagttcttactataatagaatctgtccacatgtacaagtaaatgctactttattgatccgatcatctttaaaattttctttagtattcctcattatattctttatatggtcatatgtggtatactttcatgtatgaatgaaggaattatttaaatattttatagtatcaaactgtcaatatgtctcttgagtaccagcctttggtttaacacaaaatgagcagccaacctctatttctttatatagcaaaaagattaattcaatgaccagagctccttgaccgtctaacaacctttcagaaaaattctgtgacctgataattatcagtttcttacaagcaaattttaatgggttcaaatttcctgattccatccttcaaccagtgagtgttttataaaattttgctttttgtagttcatagcctaatagcactaattttttgttgcttttcaaacataaaatttttacaaaatattgttttagaaaccctgcaaaaattctgatgcatgcctttcccctgtggcctcactattaatgaaagctcaccactcacattgcattttccacaggggtcttgattcattggtgattccacagcaaaaggtccctgatcctaaactgtcaaaataaagtagcgagactgatatacatctgataactttgtggaagcaattagaaaattttctctggtagatgatgatgccctccatcctctaatagtggcagaactttgccttctcaagagaataaatcagcccctttaagacttcttttaatatttttgggctggggatatggagtctctctgttgattctgactttctgactatgattttgggcagttgcatgcagagcaagttctgagtgtagtttcataatctcaagaacgtttggccattttatgattgacagcatgtaatattggatctcacctgacctacaactggcattcagcttttatcattgtaatcacttcacttggccaaggcagttggtaaaactgagcaaagttaaatataaattccaatcattaaattggtgagtgcattatgcagaagatacagaatcctatttcagaaaaagaaacatgctattataagtggattccttagattttgttcagctctacctacggagttttgctaatagaatgtagttctgctattcttttttaccattatgtactcaccacttctaaccatcttgttgtcttcccatcacgcagtacatttcaaaatgctgggcggtcccgatggtattacacccacaaggacagcataggaagggtaaacaattgaaatagatatttcatgttgggagcttaattaggccatgattaatcgtctctcaaagcagagactgtcttatctataaaaggagcaaccactgagaggtggaactcccaaaggaaagcactgcaggtttccagcccacaagaaatggtacgtatttcactttctttgactttttccctgcctgtcaagatgtccaaatgtactcagaggctgtccacattttcagttttgtcaaaggttctctgattcaattttgtaagaaacatttaaatcagtggttatgtaaattattgtttattttgttttacttttaggaaagagcattactgtataacttcaaaaagcaatatgacttagtagttaaaattatgacccatattttttcaggaagacttgcttgcccaaaattgtcttgtctatctgttatcaatgtagtcattcatagctgcctcagtggttcacattttttagaattatgcttccctagcattttttcaaagagttggagagttttccccatgggaataaacagtcttaatatttcctttccctaatttcagcctttgcagttcttcggtgactactcccattatatccaactacccttagtgatgctcactattacctcccggcaatagggaaagagcttatgctataaagtgattgctcaagacatgtttttctgaaagtgaacttatcataggagaaatcaaatataatgacattccacctagataagagtcactaggacatagtatggaatctttgtaaatgagcgggacagatcatacctacagttacacatataatagtgttgtttattttatacctcttgaatcatatttattatgcttcagtgctgcccatcgacctagccttttattctatcaatatgtaggtgtggattgggaatgagaaccgacattcacatccctgatgctcatgagggtttctacaaaggtggagtatgtaaacatagaaaaacgtaacagatagcttccatgcctctaagaaatatgagtgggtcaaatgcttctctgtgggtactatttttctgctatgcaaatggtagaaaagttcacattaatagccaaacagaccaagagagaaattagctaacttcactgttaatctgtctactttgacagttaagatatagcccagccctcctaatttgttgactgcaaagacagatacgcctagttaaatccaagaatgcactgggggacggggggataaagttactagaataattatacaaccctccgtactaagattgcttattcgccaagaagaatcctgcccagagattttcagagacatttccttacattcccaaccttcttttaatttacacaactttttaattagaccccttgaagccacatagtaaaacaagagatgaattatctaaggagaacttttggccctccctctaatgtgaagatcacatacttgactgtatttcccattctttccaaatggaaagaacagtccaattaagtaaccaactatgtaaccactttttgacgtaattccacctaaaaaacaaagagtgaactaaattgtacaaacattaaacctaacagtgatatgaccagatggctagttttgagaaaaataatattttctgtagataccttgctctcccttcctgtactcatcctaatgctcaagtttgagaaatactccaaggaagaaatcttgaaagattgtacattcaaataatgctcatgtaattgagtaatatggcatttgggatgagaataagagcgtatttaaaaataagagaattggcacaaaaatgtgttaactaggattttattacaaattgccctaagatatttgcaagttattatatttaagtgaaataaatcccagtttccagaaacaacagtacaatttatattcgcaggttttatatgaaaatcaaagttgggcatacatactttttggctttggcaaccaaagaaaagcatgtttttggcacacgtttccaaattattgagttatttgtagaatacattggacctgtacaggtatctcattaaaattaccttcaataatttccctttcttcctttaagccatcaagtttctaaattttacaacttcacagtttagcaatttcatttatgaaaggctgattccattttgatgttgatttttacatttcagaatttttcatatataaatatttgatgcattagatgggatactgagcttgagtctggcccaaatgaaccacaaggcccagactgatctatcagtagttagaaggcttctaatacactggctttctaatgtacagtaaatactagcgttgttttcaatattctttcttttgactaaaagtttccattccaactggtgaaaaatttttaaaaaatatttataatgatagttagagaactgtttatatgaggatcagacattgtttcagcactggatctcctctgtcccctctcttgctacagcatacagcccagagacacacatgtaaaagtaggtgatctctgtaaacttcagctgcatttctgtatgtctaggattgtcctagtatcagatatcctttgagaaagagttggagaggcatggaaggaagcatattcctgacctcccccctttttagctaaagatacaaattcagagctgtttgaaaagggcttagaataatattaattaaacatattctataatacaaagagaagtacttttttaaaatacatttatttttctttcttttttagcaggcatttctgacagaaaatctttagggccaattagagtttctttctgacttttaattgccctctgccttttgggaaagtgttgaaaaaagctctggaaaaaaatatgctggtcaaggtcgaaccctggggaattaaaaacatgagatttttatattttccctccaaacatagcactgagcaggcaggttcccatgcctgttgttaatcggcattttcttttttttttttttttttttgagacggagtctcgctctgtcgcccaggctggagtgcagtggcgggatctcggctcactgcaagctccacctcccgggttcacgaatcggcattttctaaacacgtgttttggtgtgctgggagcagaggagtaggaggcccacccagtcccaccacacataccgggacatctttgaccacatgggtcctctgccgttcgtattttagcttagatgttcttaactgaactaacttccaattttcatatacactgatcatcttgtccctagcattttccctccaagatcctgctaacaggcaaactagccctttcaaacagttggtacctgagatttctcagagctctcttatcaagagtaaggagtgagattgcagaaggggcagtaatgtcaataccaagttattggaaactacttaaccagccactgcattacatactggagcccgtctaggacacttgcccttggaaatggtggaaagactttgttttatttctatttcatcaacagaacttttgtagcattgaatctaagcaaaggataacatcatattataatggaaagttatttttaactacaactgttattgttaaatttagaagaaaatattgtctttgaagtttcagtccaaaactctaaggagaacaaggtttttactgccatcggtaatcctgtgagaaatttgacactccagatcttatttgagacagataagtctatgataaatatatgtatgagacttaaaatattcttgatattctcaggttgttctcacaaattctgcatagatttagttgtttttttttttatgagaacctttcttatcaaaaaggattgaaaatttttccaacaactggttgttaaatgagtctagcacccaaagaagctgtgagcagttggttctaccagtgactcttctaggagctctttccaggttggtctcgaactcctgacctcaggtgatccgcctgccctggcttcccaaagtgctggtattacaggcatgagccactttgcccagcctgatagttctgactcaatccctagacacattcttcagaaacaactgtacatggtgagagaaaagtgaaaaggaaaaaagttttccttccttcaaaatacactaaatttgcttatcacctttaaaatttggactgaatgtttaaactttaaacacaaagcaaagggagatgctcttaaatgtgaaatctgaagcaaagattgcatttttgcaaagctatccagaagatgtgttaattattgagacatgggattcattaacacatcagcgcccaaccactgcctctcctgcccccattcacacattatccacaatcaaataagcagctaagcaggggaaacctatcactgttaatgtcataatcacatcaccactgaattaccagatgtggtcaggaactaggcaaagtaggtgggaccaatcctaggactggggccataccacaacctcagctcagccccttgtcggatacggtttctgaatttagtacaatgccagaagtattttttttctttcagctgtgaaccagcctgttttgtttgacaagcctttccagattcatgcagctcaatcacgtgcttgttgccagtttgagagtgaacctattatttcaaacttgttgccgtgaccaatttttacaaaactgaaagtagcactgtgaggtggattggacctagtgatgaggtgtctacacttgcatccttttcttccaagagaatattctgacactccaactctagaagtcatgtcattagtaaaatgaaaataataattgcttaatcactgtttagaattagttcatacttcttcagagcttgaagcctccacgactcaacatcagatccatggatagtattactatacctttacccaaagactggatttattttgtaaaaatatcagaatgggtctgggtccctttaaagcaactgacaaggtatttaacaacattttaaaacaatgaagaaaggatgattctgcagaggctgctgggttacagaggagggcagagcttttgtcagactctcttgatgttttgctcttcctggtaagtttttatctatcatggttcccagtggaatattctccatacacattctgtgggaggatattgacatggctctagactctgccttttattttctaattctccttggagaattagaacaggcattccagaacttgtaatatagaggggaagaaagaaaaaatggcagatgcctcattgatggatccacaagttttgtacaaaagcacacaccattctgattgtctctatattaacattgtactcaccaaacagctttctaaaggtgactggaacaagataaatatcaactggataattacctaaggaaaaagaataaaaaagaaatcaaaccaaaaaaaaagcaaaaaattggtcagtttagcaagcgtgttttccaggatcataggctcataaactatacagtcaagagagtgaaacaattttaaaatcaaaagttagagccttttatatttcttcagatgtacaatttcataaatcaagcatttattttgtgcaaagtattatattaggtaccctaaatggtatataaagaattcaaaacagagtaatttaagaaaattaacactagtctttgatttagtcaggaagagtccacttatggcattctaattaaattaaccttccattttggtctacattttatcaatttgagattgcttaatggggccattttgaaacctatcaagaaactttcctctaacagaaatagaaatattaattttcttaatttcacattctgtcttccactaataagataaatggattcagacccaacacacacatccagagattaccatgagccaagacctgtgtaagtttgatatagggtcttttattcaacatttcaagttgggaaaatcttattacaaagatcatttgcctcaccattgctgaattcttttactaggtgttgatgctaattcatcactggattttcttaactctgcctgttgctcttttggactttgaggcatgtggttctatttcagtgagttacaactccagctctcatcttttaacagcaaactagagaacatctcactcttcatctctgaggacacagtgttctcttcattttaacatcaaaaagtcaccagagagaagacccaaaggcttttctctttggaaaaggaatctttaattgtttcagagggtgaggaatcttcagctctctctggacttgattgtcctcatcattaaatgggaagactttacctttagcttgattttccagaacacatcaagccccgtatggtcagtgtttccctgttatcatccacttatgtgtatgggttgaaggtactttaagttgtgagccagctgctgcccatattgggtcaccaatgcacttgtcaagcccatgtaaccacatgaagtttgatagaaatataaacatttattttgaaataattccatgtgcacggttggaaaaacagtctcccttccctgagaggaatgagtaatttctcccttttcaagaagtgtacagtagaaaatgtaatgagattggaatggattccaaatcagtgacctttttaaggctgaaaccactattttaaatgaaaactttaagttcatacagtttcttatagtaattctacttttattttttagtcagtgtgcttaatcttttaggaaaaaaaactaaccagttattttttactaaagtatgtgaattacaaacaggatgtgcaatgaccaggcagaaagatatttaaaggtgtaattattctaaaggaagatgagaaaaaattcatctgctacagattcaactgtcttttaaatgcctcccttgtcatggagtaaatgactactcaaaaggatttcacaaaagacttaaatctcacccttagcaatcaaccggtcggccacagctcagatgcctcattagcaaaatgaaattgcacaacagacgaaacatagcaaaagaatgtagacatttccatggggtggaagaaaagaagaaagaaaaagcaaccatagtgaactctgcttgcataaacaaagaatgttttagtggaataaatgtaagctttctcttgaaggaatcccagttagaatgtcattggaaacggcaaaactatttcagcttcatagcagtaatatattccaactttattaccactgaggcacaaagctaaatttgtcagggggaaaggtaagcaaaaattactgacattgcaaccgataaaatgatcttgtgagactcaatattgagaaagaaaattaaaatagctaatatttctgttataattccagtgattactaagacttctgccaagggataaaattacttttccttctctcattataaatttctatatagagctattttaatgcagtaaggactgtattttcatattttaataaatccctcacgttgaatttgccccccatttcagatttgattaggaaatactaaattgagaaggcaggtttttccatctttttaaaaacaagtatgcaccataagcattttcagcggatgtctgccttaagcaatcttggtagagctgtcaatcagtggcaggtgcttgtttaaggaagagaacctgtgaatagatttagcctttcttcctcacagacagctgctcattcacacacgctcatctcgtcttcctcaacttcttgcaccaatcccgcctcttggattgacccacatccacctagcagttgaacaaactgcagattctaattacatgtcccgacagttgctcaacttaatttttcaccaactgaatttcatgcattgccccttgatgttccttccctctgttcactcttttctataagtccttgcatttgatatactttaaaatggatttgactaggaaaaaaaaaaaaaccaagtcagcaaacccttgtgttcattcaagaaattgtgaacaaatttagctgttatggtaataatcctgaggtgagagagaaaatatcacctaggtgacaagagatcattttaacgctattactaaaatagtattctatgaatagaggccatagaattttctacaaatagacttgtagggactcacattttgaatcatattttacttataggtttgctgtatatactgattaaacttctgaacctaaagattctctataattaaactagcacaaatataatctgtcccttacccacattgtaagaatgtctggtgggggaaatccaatattgaccttcacattccacatggaaaatctttgtccccagagtgcaattagggtgattaaaaataagccgcttttgtgagtctcaagtttgttccccaaacaagcagcatcagcaactggaaatttgttagacatgcaaattatccagtcccacctgagacttcagcccagatctatgaatcaaaaattttggagtgaccctggcaatatggactttaataagcccctaggatggttctgatgcatgctcaaatttgagaatcattgatctatgacacagcattctgagtggccaagaatgaacaatgtcacccactgcttaattatgctttcccttaagaaaaggtttaaatgcttaaaaggtaggttctttataaagataatgcattcagatatatgggagatatgtccaccattcagacttaaaatataattttaagggacattaatccttatgtctttttctggcataactgagtctgaggcagcctctccagtcagagatttctaatcagcttatctagttcttttaaaaccccacagctgatctactttgcctgacttccccggggcctagaaaatgaccctggacacctttctctaactgattagctctggctgatttgtcttaatgctaaaccactgtgtaacagtactaaattatacttaatgacacagtctactgttttgaagagtgctgtgtatgactgactgagctaaaaggattgctggctatgagtgagttttagttttagaattcattttcaaagactcacaaggctcaagaagcttgaaaaccacagatgatgtatacagtagctggagttccctggaggctcctttctagggtctctcatttgaattggtgcagaactgaaagcagagagtcagaaagtaactctgcttgtaaaaatggcttaggaaaaggaacttaagattgtgggttatatgtgtgtatgtgtgcacacacatgtatgtttcctgaattctaacctgaaaatatcacatttgtggatacttaaaatactcatatgcattttgatacacaaaagcaattcaaagtatgtaaaaggaggctggaaatgtaagcttaacagtgatattctggagaaaaatgttgtaactgtcactccaggcctcccttaggagaaaccaaacttgtcagatattttggaatggtagctctttttcaggaattagaataactgaagtatgatactgtgttccgtgtgctttaaaatctgtgaccctcccctgttgctggtcatagcttcagcatttgagtgtccattgtctgtcgctgaggacattttctcatcggctcttttccccattgtcccattcctctcactcacacctgattaccaaatagctctaacgaaatcacagtcactccttcctgtgtttccaccattgtgtacatcttcatttgcacaccctattttttaatcaaagttaaagcctcaccaacaaggtacttagaacaatcacccacttctggccacttcgtgacgggaaatacatctttgcaggggaaggagctggatcagactgacagggtttcactcagactatttcaaacaatgaggagccttgacctcattcccaacttttgccgtccatagtggttgatttcttgttttctctttctctctttttttaacagaaactcttaagctcaaggctaaattacagtggggacttgcctttgtctacagtccatggtttctgtattggctcaagccttgaaatcttgaaacaagcctaaattaaaattttctcttagcttaagaaaaaaagttacatattgtcaagacccttatgtgtgtggtccattaaaaaggtcttgatattagaagataacagcaaattgtttcttatcccacaacagctttgcctttcagtgtcctttgtggtggttttcgtaggtcagtggtacaattcaacactcttccaataagccataataataattgttggcacaactgttattacaacaggacttgcctgggttccatctattaatttttacagacagtaggaagctcacaccgaggagacattggtaacttcctggacaagggcaaagaaaggaactagcatattgtacatactgtgtacgtgcacagaacactggtctgtgcctttggagtgttctcagaggggcaggccagaagggaggattcaggtaggaaatgaatctaggacttctcttgcctttgatggttactgatggcaattgtgtttcccactgaataacttggtggacaattttgatagtaaactgaactcataccgagcaagcacaatagtcaatccataaagaaaagggtggcatatcataatgccagaaaccttgtctccctaagaggtgatcatgaatttcctatacagggcaaaaaagggaagaatagcctattcatattctgtattcacagtttgaaggacccatcacaaatgaccttcaaagactgacagggggcaggtagaagggaggcaaaaatgcagagaaaaagatgttaccttgaaaaatgaagtaagaaatcctaatattcccgtagttgatcctaaagtttgttcccatgtctacggttatttctaaataacttcactacactttgaaattccttagtggtggtttatcagtaatacttaactgaatttttccgtttctattctttgctgccaatgaatgtaatctccacgacttgccgttcgagtgcacgcacagacacacacacataatggtatatgcatcatatattactcattttgtgggaaacacaatgtattataatgaaaaagattccagcacattctttcagtgtgtttcagtgataaaattttgtgggggaatagaggtatacatactctctttgctgaccatattgttgaaattatgatcttaagcaacactgttagaaatgcttgcataaagtatcttctctagtattaatgagttgattcactctgaattgaaggttcaaaaaaatgcactaaacaaatatttttatatctgtggtattttcctattaactactcttagtgaacacgtgaccatatacctgatatcattaaaaaggaaaatggcctaaacgaaacgttaaaagtggaggtatttataaagtcttctgccaaagaccattgtttaatgatctgtaaaatgtagattatcttcttttattatgaatgtgattgtaagaaacaccctaacattctctaacttttgaaaatgaatattttgtatttctaaggaccaaggaaaatattttttaagccaatgtagtacacagaagccttgtaaatgagaggtacaatgacttggatcaactgcataatgctagattagaattccagcatttgatgataaatttatcaatctttcctataattcttatactgcactaaattacattttggaaattttagctaatcttttcaaattaaaggcaccaacattaatgacagatcttctctaatatgaaaagcatcaaaacattccctttcaagcactttgaatggatgaaaattgccatataattttcccacctacctaaccattccatgtaagttaactgagcagtctaacaatgttgtacagaaggttgacagactatgtgcaccaagaatatttaagttgtgcagttagcaagaactagccatttcaaatatactcaaatgttttgtaaataaaaattttgactcctataattttgttcaaactgatgtcttttaaaataattagattttatttgaattttaaaagtaatctgttgtaaattagatgttactttgttgactctgtgattcaatgtacactcagccatattcctgtggggaaatatcaatcttactgactttcatggcatgagccagagattcatagtttcctttaggactataagtatgaagacaaaacacaccaaaataaaatgctagtgaagaaattagaaacctattgtataaaatgtatttttaaaatcttaagatatatgtgatttacactgcctgttaatctagtctctttgtgattaaaaaaaaacataatatttgttaagactcagacaccaaatatttgtgatgtttgtatagcaccatcgttatatgtgatttcaaagggtaagcatctctgtcgtaatcatgtaagcccacagaagaataaattcctgaggttatgtacaaccaactctcagaattcagacttcctgcagctgccatatcaccaataaatgagaattgtgaaaaacaatttttaaagaattgagtttatgatcactgtgcattttgttaatgaatgatttcagagttttatttttaccagaaatgctctcagccagtaaacacaactgctgatttcaaccatactatcatttcaatggtttctatattcttgatctaactaccaaaaactggaagcttgttgcaaggtgtgtcctaacaaacatacaataaatgactcttcctgcatgctgcctgagatatgttgtaatttgaaatgtcttatcaaaaaattatacatgttataacccaaagttgaactggcaatatttttcatgtgtaaaattgatggtatgttaatatcaaaagcagaagcattgtttgtcatacatgtatgttatatgtgatgtttaatcgtgttaaactgtaatctgtgaagttttcattgcctgaactagtcaattctgtataaatcattgtcttaattgttttcctaatcttaccatatttcctaacactgaaatataaatgtttgtcaattagcca

SEQ ID NO: 184628 - DNA, 3178 bp, Homo sapiens
  Payload ID: 16357
  Gene Symbol: SLC8A1
  Gene Name: solute carrier family 8 (sodium/calcium exchanger), member 1
  Uniprot ID: P32418
  ENST ID: ENST00000403092
  CDS Start-End: 35-2956
aagcttgacagaggttgtgacagttggaagtgtcatgtacaacatgcggcgattaagtctttcacccaccttttcaatgggatttcatctgttagttactgtgagtctcttattttcccatgtggaccatgtaattgctgagacagaaatggaaggagaaggaaatgaaactggtgaatgtactggatcatattactgtaagaaaggggtgattttgcccatttgggaaccccaagacccttcttttggggacaaaattgctagagctactgtgtattttgtggccatggtctacatgtttcttggagtctctatcatagctgatcggttcatgtcctctatagaagtcatcacatctcaagaaaaagaaataaccataaagaaacccaatggagagaccaccaagacaactgtgaggatctggaatgaaacagtttctaacctgaccttgatggccctgggatcttctgctcctgagattctcctttcagtaattgaagtgtgtggccataacttcactgcaggagacctcggtcctagcaccatcgtgggaagtgctgcattcaatatgttcatcattattgcactctgtgtttatgtggtgcctgacggagagacaaggaagattaagcatttgcgtgtcttctttgtgacagcagcctggagcatctttgcctacacctggctttacattattttgtctgtcatatctcctggtgttgtggaggtctgggaaggtttgcttactttcttcttctttcccatctgtgttgtgttcgcttgggtagcggataggagacttctgttttacaagtatgtctacaagaggtatcgagctggcaagcagagggggatgattattgaacatgaaggagacaggccatcttctaagactgaaattgaaatggacgggaaagtggtcaattctcatgttgaaaatttcttagatggtgctctggttctggaggtggatgagagggaccaagatgatgaagaagctaggcgagaaatggctaggattctgaaggaacttaagcagaagcatccagataaagaaatagagcaattaatagaattagctaactaccaagtcctaagtcagcagcaaaaaagtagagcattttatcgcattcaagctactcgcctcatgactggagctggcaacattttaaagaggcatgcagctgaccaagcaaggaaggctgtcagcatgcacgaggtcaacactgaagtgactgaaaatgaccctgttagtaagatcttctttgaacaagggacatatcagtgtctggagaactgtggtactgtggcccttaccattatccgcagaggtggtgatttgactaacactgtgtttgttgacttcagaacagaggatggcacagcaaatgctgggtctgattatgaatttactgaaggaactgtggtgtttaagcctggtgatacccagaaggaaatcagagtgggtatcatagatgatgatatctttgaggaggatgaaaatttccttgtgcatctcagcaatgtcaaagtatcttctgaagcttcagaagatggcatactggaagccaatcatgtttctacacttgcttgcctcggatctccctccactgccactgtaactatttttgatgatgaccacgcaggcatttttacttttgaggaacctgtgactcatgtgagtgagagcattggcatcatggaggtgaaagtattgagaacatctggagctcgaggaaatgttatcgttccatataaaaccatcgaagggactgccagaggtggaggggaggattttgaggacacttgtggagagctcgaattccagaatgatgaaattgtcaaaacaatatcagtcaaggtaattgatgatgaggagtatgagaaaaacaagaccttcttccttgagattggagagccccgcctggtggagatgagtgagaagaaagccctgttattgaatgagcttggtggcttcacaataacaggaaaatacctgtttggccaacctgtcttcaggaaggttcatgctagagaacatccgattctctctactgtaatcaccattgcagacgaatatgatgacaagcagccactgaccagcaaagaggaagaggagaggcgcattgcagaaatggggcgccccatcctgggagagcacaccaagttggaagtgatcattgaagaatcctatgaattcaagagtactgtggacaaactcattaagaagacaaacctggcccttgtggttgggactaacagctggagagaacagttcattgaagctatcactgtcagtgctggggaagatgatgacgacgatgaatgtggggaagagaagctgccctcctgtttcgattacgtgatgcactttctgactgtgttctggaaggtcctgtttgccttcgtcccccctactgaatactggaatggctgggcgtgtttcattgtctccatcctcatgattggcctactgacagctttcattggagacctggcttcccactttggctgcaccattggcctgaaagattctgtgactgcagtcgtgttcgtcgcacttggaacatcagtgccagacacatttgccagcaaagtggcagccacccaggaccagtatgcagacgcctccataggtaacgtcacgggcagcaacgcggtgaatgtcttcctgggaatcggtgtggcctggtccatcgctgccatctaccacgcagccaatggggaacagttcaaagtgtcccctggcacactagctttctctgtcactctcttcaccatttttgctttcatcaatgtgggggtgctgctgtatcggcggaggccagaaatcggaggtgagctgggtgggccccggactgccaagctcctcacatcctgcctctttgtgctcctatggctcttgtacattttcttctcctccctggaggcctactgccacataaaaggcttctaaaggaactatcagatatagtaaatttatatatatacatatatatacataaaaattatgtataatggacagaggaaactgacatttgtcatgttcacttacctgctgatggaatccagcttcaagagcatactctgtactagggccgaagtaaaaaaccatcacctcccattcccaggggcatcatcatgttcaacaaggcatggaggcagggccatctttgca

SEQ ID NO: 184629 - DNA, 2898 bp, Homo sapiens
  Payload ID: 16357
  Gene Symbol: SLC8A1
  Gene Name: solute carrier family 8 (sodium/calcium exchanger), member 1
  Uniprot ID: P32418
  ENST ID: ENST00000408028
  CDS Start-End: 1-2898
atgtacaacatgcggcgattaagtctttcacccaccttttcaatgggatttcatctgttagttactgtgagtctcttattttcccatgtggaccatgtaattgctgagacagaaatggaaggagaaggaaatgaaactggtgaatgtactggatcatattactgtaagaaaggggtgattttgcccatttgggaaccccaagacccttcttttggggacaaaattgctagagctactgtgtattttgtggccatggtctacatgtttcttggagtctctatcatagctgatcggttcatgtcctctatagaagtcatcacatctcaagaaaaagaaataaccataaagaaacccaatggagagaccaccaagacaactgtgaggatctggaatgaaacagtttctaacctgaccttgatggccctgggatcttctgctcctgagattctcctttcagtaattgaagtgtgtggccataacttcactgcaggagacctcggtcctagcaccatcgtgggaagtgctgcattcaatatgttcatcattattgcactctgtgtttatgtggtgcctgacggagagacaaggaagattaagcatttgcgtgtcttctttgtgacagcagcctggagcatctttgcctacacctggctttacattattttgtctgtcatatctcctggtgttgtggaggtctgggaaggtttgcttactttcttcttctttcccatctgtgttgtgttcgcttgggtagcggataggagacttctgttttacaagtatgtctacaagaggtatcgagctggcaagcagagggggatgattattgaacatgaaggagacaggccatcttctaagactgaaattgaaatggacgggaaagtggtcaattctcatgttgaaaatttcttagatggtgctctggttctggaggtggatgagagggaccaagatgatgaagaagctaggcgagaaatggctaggattctgaaggaacttaagcagaagcatccagataaagaaatagagcaattaatagaattagctaactaccaagtcctaagtcagcagcaaaaaagtagagcattttatcgcattcaagctactcgcctcatgactggagctggcaacattttaaagaggcatgcagctgaccaagcaaggaaggctgtcagcatgcacgaggtcaacactgaagtgactgaaaatgaccctgttagtaagatcttctttgaacaagggacatatcagtgtctggagaactgtggtactgtggcccttaccattatccgcagaggtggtgatttgactaacactgtgtttgttgacttcagaacagaggatggcacagcaaatgctgggtctgattatgaatttactgaaggaactgtggtgtttaagcctggtgatacccagaaggaaatcagagtgggtatcatagatgatgatatctttgaggaggatgaaaatttccttgtgcatctcagcaatgtcaaagtatcttctgaagcttcagaagatggcatactggaagccaatcatgtttctacacttgcttgcctcggatctccctccactgccactgtaactatttttgatgatgaccacgcaggcatttttacttttgaggaacctgtgactcatgtgagtgagagcattggcatcatggaggtgaaagtattgagaacatctggagctcgaggaaatgttatcgttccatataaaaccatcgaagggactgccagaggtggaggggaggattttgaggacacttgtggagagctcgaattccagaatgatgaaattgtgaagatcattaccattagaatatttgaccgtgaggaatatgagaaagagtgcagtttctcccttgtgcttgaggaaccaaaatggataagaagaggaatgaaaggtggcttcacaataacaggaaaatacctgtttggccaacctgtcttcaggaaggttcatgctagagaacatccgattctctctactgtaatcaccattgcagacgaatatgatgacaagcagccactgaccagcaaagaggaagaggagaggcgcattgcagaaatggggcgccccatcctgggagagcacaccaagttggaagtgatcattgaagaatcctatgaattcaagagtactgtggacaaactcattaagaagacaaacctggcccttgtggttgggactaacagctggagagaacagttcattgaagctatcactgtcagtgctggggaagatgatgacgacgatgaatgtggggaagagaagctgccctcctgtttcgattacgtgatgcactttctgactgtgttctggaaggtcctgtttgccttcgtcccccctactgaatactggaatggctgggcgtgtttcattgtctccatcctcatgattggcctactgacagctttcattggagacctggcttcccactttggctgcaccattggcctgaaagattctgtgactgcagtcgtgttcgtcgcacttggaacatcagtgccagacacatttgccagcaaagtggcagccacccaggaccagtatgcagacgcctccataggtaacgtcacgggcagcaacgcggtgaatgtcttcctgggaatcggtgtggcctggtccatcgctgccatctaccacgcagccaatggggaacagttcaaagtgtcccctggcacactagctttctctgtcactctcttcaccatttttgctttcatcaatgtgggggtgctgctgtatcggcggaggccagaaatcggaggtgagctgggtgggccccggactgccaagctcctcacatcctgcctctttgtgctcctatggctcttgtacattttcttctcctccctggaggcctactgccacataaaaggcttctaa

SEQ ID NO: 184630 - DNA, 3065 bp, Homo sapiens
  Payload ID: 16357
  Gene Symbol: SLC8A1
  Gene Name: solute carrier family 8 (sodium/calcium exchanger), member 1
  Uniprot ID: P32418
  ENST ID: ENST00000402441
  CDS Start-End: 112-2925
ctttctggtaaatttagagaaggcatcatactgggatcttttttcacatccagcccatgcggactgagcagccaaagcttgacagagtaggttgtgacagttggaagtgtcatgtacaacatgcggcgattaagtctttcacccaccttttcaatgggatttcatctgttagttactgtgagtctcttattttcccatgtggaccatgtaattgctgagacagaaatggaaggagaaggaaatgaaactggtgaatgtactggatcatattactgtaagaaaggggtgattttgcccatttgggaaccccaagacccttcttttggggacaaaattgctagagctactgtgtattttgtggccatggtctacatgtttcttggagtctctatcatagctgatcggttcatgtcctctatagaagtcatcacatctcaagaaaaagaaataaccataaagaaacccaatggagagaccaccaagacaactgtgaggatctggaatgaaacagtttctaacctgaccttgatggccctgggatcttctgctcctgagattctcctttcagtaattgaagtgtgtggccataacttcactgcaggagacctcggtcctagcaccatcgtgggaagtgctgcattcaatatgttcatcattattgcactctgtgtttatgtggtgcctgacggagagacaaggaagattaagcatttgcgtgtcttctttgtgacagcagcctggagcatctttgcctacacctggctttacattattttgtctgtcatatctcctggtgttgtggaggtctgggaaggtttgcttactttcttcttctttcccatctgtgttgtgttcgcttgggtagcggataggagacttctgttttacaagtatgtctacaagaggtatcgagctggcaagcagagggggatgattattgaacatgaaggagacaggccatcttctaagactgaaattgaaatggacgggaaagtggtcaattctcatgttgaaaatttcttagatggtgctctggttctggaggtggatgagagggaccaagatgatgaagaagctaggcgagaaatggctaggattctgaaggaacttaagcagaagcatccagataaagaaatagagcaattaatagaattagctaactaccaagtcctaagtcagcagcaaaaaagtagagcattttatcgcattcaagctactcgcctcatgactggagctggcaacattttaaagaggcatgcagctgaccaagcaaggaaggctgtcagcatgcacgaggtcaacactgaagtgactgaaaatgaccctgttagtaagatcttctttgaacaagggacatatcagtgtctggagaactgtggtactgtggcccttaccattatccgcagaggtggtgatttgactaacactgtgtttgttgacttcagaacagaggatggcacagcaaatgctgggtctgattatgaatttactgaaggaactgtggtgtttaagcctggtgatacccagaaggaaatcagagtgggtatcatagatgatgatatctttgaggaggatgaaaatttccttgtgcatctcagcaatgtcaaagtatcttctgaagcttcagaagatggcatactggaagccaatcatgtttctacacttgcttgcctcggatctccctccactgccactgtaactatttttgatgatgaccacgcaggcatttttacttttgaggaacctgtgactcatgtgagtgagagcattggcatcatggaggtgaaagtattgagaacatctggagctcgaggaaatgttatcgttccatataaaaccatcgaagggactgccagaggtggaggggaggattttgaggacacttgtggagagctcgaattccagaatgatgaaattgtgaagatcattaccattagaatatttgaccgtgaggaatatgagaaagagtgcagtttctcccttgtgcttgaggaaccaaaatggataagaagaggaatgaaaggtggcttcacaataacagacgaatatgatgacaagcagccactgaccagcaaagaggaagaggagaggcgcattgcagaaatggggcgccccatcctgggagagcacaccaagttggaagtgatcattgaagaatcctatgaattcaagagtactgtggacaaactcattaagaagacaaacctggcccttgtggttgggactaacagctggagagaacagttcattgaagctatcactgtcagtgctggggaagatgatgacgacgatgaatgtggggaagagaagctgccctcctgtttcgattacgtgatgcactttctgactgtgttctggaaggtcctgtttgccttcgtcccccctactgaatactggaatggctgggcgtgtttcattgtctccatcctcatgattggcctactgacagctttcattggagacctggcttcccactttggctgcaccattggcctgaaagattctgtgactgcagtcgtgttcgtcgcacttggaacatcagtgccagacacatttgccagcaaagtggcagccacccaggaccagtatgcagacgcctccataggtaacgtcacgggcagcaacgcggtgaatgtcttcctgggaatcggtgtggcctggtccatcgctgccatctaccacgcagccaatggggaacagttcaaagtgtcccctggcacactagctttctctgtcactctcttcaccatttttgctttcatcaatgtgggggtgctgctgtatcggcggaggccagaaatcggaggtgagctgggtgggccccggactgccaagctcctcacatcctgcctctttgtgctcctatggctcttgtacattttcttctcctccctggaggcctactgccacataaaaggcttctaaaggaactatcagatatagtaaatttatatatatacatatatatacataaaaattatgtataatggacagaggaaactgacatttgtcatgttcacttacctgctgatggaatccagcttcaagagcatactctgtactag

SEQ ID NO: 184631 - DNA, 2965 bp, Homo sapiens
  Payload ID: 16357
  Gene Symbol: SLC8A1
  Gene Name: solute carrier family 8 (sodium/calcium exchanger), member 1
  Uniprot ID: P32418
  ENST ID: ENST00000405269
  CDS Start-End: 149-2962
tcttggttgctctcaccatgtgatacaccagctccacctttgccttctgctgtgactgtaagtttcctgaggcctctccagaagcagattctagcaccatgctgctcgcacagccttcaaaacttaggttgtgacagttggaagtgtcatgtacaacatgcggcgattaagtctttcacccaccttttcaatgggatttcatctgttagttactgtgagtctcttattttcccatgtggaccatgtaattgctgagacagaaatggaaggagaaggaaatgaaactggtgaatgtactggatcatattactgtaagaaaggggtgattttgcccatttgggaaccccaagacccttcttttggggacaaaattgctagagctactgtgtattttgtggccatggtctacatgtttcttggagtctctatcatagctgatcggttcatgtcctctatagaagtcatcacatctcaagaaaaagaaataaccataaagaaacccaatggagagaccaccaagacaactgtgaggatctggaatgaaacagtttctaacctgaccttgatggccctgggatcttctgctcctgagattctcctttcagtaattgaagtgtgtggccataacttcactgcaggagacctcggtcctagcaccatcgtgggaagtgctgcattcaatatgttcatcattattgcactctgtgtttatgtggtgcctgacggagagacaaggaagattaagcatttgcgtgtcttctttgtgacagcagcctggagcatctttgcctacacctggctttacattattttgtctgtcatatctcctggtgttgtggaggtctgggaaggtttgcttactttcttcttctttcccatctgtgttgtgttcgcttgggtagcggataggagacttctgttttacaagtatgtctacaagaggtatcgagctggcaagcagagggggatgattattgaacatgaaggagacaggccatcttctaagactgaaattgaaatggacgggaaagtggtcaattctcatgttgaaaatttcttagatggtgctctggttctggaggtggatgagagggaccaagatgatgaagaagctaggcgagaaatggctaggattctgaaggaacttaagcagaagcatccagataaagaaatagagcaattaatagaattagctaactaccaagtcctaagtcagcagcaaaaaagtagagcattttatcgcattcaagctactcgcctcatgactggagctggcaacattttaaagaggcatgcagctgaccaagcaaggaaggctgtcagcatgcacgaggtcaacactgaagtgactgaaaatgaccctgttagtaagatcttctttgaacaagggacatatcagtgtctggagaactgtggtactgtggcccttaccattatccgcagaggtggtgatttgactaacactgtgtttgttgacttcagaacagaggatggcacagcaaatgctgggtctgattatgaatttactgaaggaactgtggtgtttaagcctggtgatacccagaaggaaatcagagtgggtatcatagatgatgatatctttgaggaggatgaaaatttccttgtgcatctcagcaatgtcaaagtatcttctgaagcttcagaagatggcatactggaagccaatcatgtttctacacttgcttgcctcggatctccctccactgccactgtaactatttttgatgatgaccacgcaggcatttttacttttgaggaacctgtgactcatgtgagtgagagcattggcatcatggaggtgaaagtattgagaacatctggagctcgaggaaatgttatcgttccatataaaaccatcgaagggactgccagaggtggaggggaggattttgaggacacttgtggagagctcgaattccagaatgatgaaattgtgaagatcattaccattagaatatttgaccgtgaggaatatgagaaagagtgcagtttctcccttgtgcttgaggaaccaaaatggataagaagaggaatgaaaggtggcttcacaataacagacgaatatgatgacaagcagccactgaccagcaaagaggaagaggagaggcgcattgcagaaatggggcgccccatcctgggagagcacaccaagttggaagtgatcattgaagaatcctatgaattcaagagtactgtggacaaactcattaagaagacaaacctggcccttgtggttgggactaacagctggagagaacagttcattgaagctatcactgtcagtgctggggaagatgatgacgacgatgaatgtggggaagagaagctgccctcctgtttcgattacgtgatgcactttctgactgtgttctggaaggtcctgtttgccttcgtcccccctactgaatactggaatggctgggcgtgtttcattgtctccatcctcatgattggcctactgacagctttcattggagacctggcttcccactttggctgcaccattggcctgaaagattctgtgactgcagtcgtgttcgtcgcacttggaacatcagtgccagacacatttgccagcaaagtggcagccacccaggaccagtatgcagacgcctccataggtaacgtcacgggcagcaacgcggtgaatgtcttcctgggaatcggtgtggcctggtccatcgctgccatctaccacgcagccaatggggaacagttcaaagtgtcccctggcacactagctttctctgtcactctcttcaccatttttgctttcatcaatgtgggggtgctgctgtatcggcggaggccagaaatcggaggtgagctgggtgggccccggactgccaagctcctcacatcctgcctctttgtgctcctatggctcttgtacattttcttctcctccctggaggcctactgccacataaaaggcttctaaagg

SEQ ID NO: 184632 - DNA, 3139 bp, Homo sapiens
  Payload ID: 16357
  Gene Symbol: SLC8A1
  Gene Name: solute carrier family 8 (sodium/calcium exchanger), member 1
  Uniprot ID: P32418
  ENST ID: ENST00000405901
  CDS Start-End: 25-2931
taggttgtgacagttggaagtgtcatgtacaacatgcggcgattaagtctttcacccaccttttcaatgggatttcatctgttagttactgtgagtctcttattttcccatgtggaccatgtaattgctgagacagaaatggaaggagaaggaaatgaaactggtgaatgtactggatcatattactgtaagaaaggggtgattttgcccatttgggaaccccaagacccttcttttggggacaaaattgctagagctactgtgtattttgtggccatggtctacatgtttcttggagtctctatcatagctgatcggttcatgtcctctatagaagtcatcacatctcaagaaaaagaaataaccataaagaaacccaatggagagaccaccaagacaactgtgaggatctggaatgaaacagtttctaacctgaccttgatggccctgggatcttctgctcctgagattctcctttcagtaattgaagtgtgtggccataacttcactgcaggagacctcggtcctagcaccatcgtgggaagtgctgcattcaatatgttcatcattattgcactctgtgtttatgtggtgcctgacggagagacaaggaagattaagcatttgcgtgtcttctttgtgacagcagcctggagcatctttgcctacacctggctttacattattttgtctgtcatatctcctggtgttgtggaggtctgggaaggtttgcttactttcttcttctttcccatctgtgttgtgttcgcttgggtagcggataggagacttctgttttacaagtatgtctacaagaggtatcgagctggcaagcagagggggatgattattgaacatgaaggagacaggccatcttctaagactgaaattgaaatggacgggaaagtggtcaattctcatgttgaaaatttcttagatggtgctctggttctggaggtggatgagagggaccaagatgatgaagaagctaggcgagaaatggctaggattctgaaggaacttaagcagaagcatccagataaagaaatagagcaattaatagaattagctaactaccaagtcctaagtcagcagcaaaaaagtagagcattttatcgcattcaagctactcgcctcatgactggagctggcaacattttaaagaggcatgcagctgaccaagcaaggaaggctgtcagcatgcacgaggtcaacactgaagtgactgaaaatgaccctgttagtaagatcttctttgaacaagggacatatcagtgtctggagaactgtggtactgtggcccttaccattatccgcagaggtggtgatttgactaacactgtgtttgttgacttcagaacagaggatggcacagcaaatgctgggtctgattatgaatttactgaaggaactgtggtgtttaagcctggtgatacccagaaggaaatcagagtgggtatcatagatgatgatatctttgaggaggatgaaaatttccttgtgcatctcagcaatgtcaaagtatcttctgaagcttcagaagatggcatactggaagccaatcatgtttctacacttgcttgcctcggatctccctccactgccactgtaactatttttgatgatgaccacgcaggcatttttacttttgaggaacctgtgactcatgtgagtgagagcattggcatcatggaggtgaaagtattgagaacatctggagctcgaggaaatgttatcgttccatataaaaccatcgaagggactgccagaggtggaggggaggattttgaggacacttgtggagagctcgaattccagaatgatgaaattgtcaaaacaatatcagtcaaggtaattgatgatgaggagtatgagaaaaacaagaccttcttccttgagattggagagccccgcctggtggagatgagtgagaagaaagccctgttattgaatgagcttggtggcttcacaataacaggccaacctgtcttcaggaaggttcatgctagagaacatccgattctctctactgtaatcaccattgcagacgaatatgatgacaagcagccactgaccagcaaagaggaagaggagaggcgcattgcagaaatggggcgccccatcctgggagagcacaccaagttggaagtgatcattgaagaatcctatgaattcaagagtactgtggacaaactcattaagaagacaaacctggcccttgtggttgggactaacagctggagagaacagttcattgaagctatcactgtcagtgctggggaagatgatgacgacgatgaatgtggggaagagaagctgccctcctgtttcgattacgtgatgcactttctgactgtgttctggaaggtcctgtttgccttcgtcccccctactgaatactggaatggctgggcgtgtttcattgtctccatcctcatgattggcctactgacagctttcattggagacctggcttcccactttggctgcaccattggcctgaaagattctgtgactgcagtcgtgttcgtcgcacttggaacatcagtgccagacacatttgccagcaaagtggcagccacccaggaccagtatgcagacgcctccataggtaacgtcacgggcagcaacgcggtgaatgtcttcctgggaatcggtgtggcctggtccatcgctgccatctaccacgcagccaatggggaacagttcaaagtgtcccctggcacactagctttctctgtcactctcttcaccatttttgctttcatcaatgtgggggtgctgctgtatcggcggaggccagaaatcggaggtgagctgggtgggccccggactgccaagctcctcacatcctgcctctttgtgctcctatggctcttgtacattttcttctcctccctggaggcctactgccacataaaaggcttctaaaggaactatcagatatagtaaatttatatatatacatatatatacataaaaattatgtataatggacagaggaaactgacatttgtcatgttcacttacctgctgatggaatccagcttcaagagcatactctgtactagggccgaagtaaaaaaccatcacctcccattcccaggggcatcatcatgttcaacaaggcatggaggca

SEQ ID NO: 184633 - DNA, 2814 bp, Homo sapiens
  Payload ID: 16357
  Gene Symbol: SLC8A1
  Gene Name: solute carrier family 8 (sodium/calcium exchanger), member 1
  Uniprot ID: P32418
  ENST ID: ENST00000406391
  CDS Start-End: 1-2814
atgtacaacatgcggcgattaagtctttcacccaccttttcaatgggatttcatctgttagttactgtgagtctcttattttcccatgtggaccatgtaattgctgagacagaaatggaaggagaaggaaatgaaactggtgaatgtactggatcatattactgtaagaaaggggtgattttgcccatttgggaaccccaagacccttcttttggggacaaaattgctagagctactgtgtattttgtggccatggtctacatgtttcttggagtctctatcatagctgatcggttcatgtcctctatagaagtcatcacatctcaagaaaaagaaataaccataaagaaacccaatggagagaccaccaagacaactgtgaggatctggaatgaaacagtttctaacctgaccttgatggccctgggatcttctgctcctgagattctcctttcagtaattgaagtgtgtggccataacttcactgcaggagacctcggtcctagcaccatcgtgggaagtgctgcattcaatatgttcatcattattgcactctgtgtttatgtggtgcctgacggagagacaaggaagattaagcatttgcgtgtcttctttgtgacagcagcctggagcatctttgcctacacctggctttacattattttgtctgtcatatctcctggtgttgtggaggtctgggaaggtttgcttactttcttcttctttcccatctgtgttgtgttcgcttgggtagcggataggagacttctgttttacaagtatgtctacaagaggtatcgagctggcaagcagagggggatgattattgaacatgaaggagacaggccatcttctaagactgaaattgaaatggacgggaaagtggtcaattctcatgttgaaaatttcttagatggtgctctggttctggaggtggatgagagggaccaagatgatgaagaagctaggcgagaaatggctaggattctgaaggaacttaagcagaagcatccagataaagaaatagagcaattaatagaattagctaactaccaagtcctaagtcagcagcaaaaaagtagagcattttatcgcattcaagctactcgcctcatgactggagctggcaacattttaaagaggcatgcagctgaccaagcaaggaaggctgtcagcatgcacgaggtcaacactgaagtgactgaaaatgaccctgttagtaagatcttctttgaacaagggacatatcagtgtctggagaactgtggtactgtggcccttaccattatccgcagaggtggtgatttgactaacactgtgtttgttgacttcagaacagaggatggcacagcaaatgctgggtctgattatgaatttactgaaggaactgtggtgtttaagcctggtgatacccagaaggaaatcagagtgggtatcatagatgatgatatctttgaggaggatgaaaatttccttgtgcatctcagcaatgtcaaagtatcttctgaagcttcagaagatggcatactggaagccaatcatgtttctacacttgcttgcctcggatctccctccactgccactgtaactatttttgatgatgaccacgcaggcatttttacttttgaggaacctgtgactcatgtgagtgagagcattggcatcatggaggtgaaagtattgagaacatctggagctcgaggaaatgttatcgttccatataaaaccatcgaagggactgccagaggtggaggggaggattttgaggacacttgtggagagctcgaattccagaatgatgaaattgtgaagatcattaccattagaatatttgaccgtgaggaatatgagaaagagtgcagtttctcccttgtgcttgaggaaccaaaatggataagaagaggaatgaaaggtggcttcacaataacagacgaatatgatgacaagcagccactgaccagcaaagaggaagaggagaggcgcattgcagaaatggggcgccccatcctgggagagcacaccaagttggaagtgatcattgaagaatcctatgaattcaagagtactgtggacaaactcattaagaagacaaacctggcccttgtggttgggactaacagctggagagaacagttcattgaagctatcactgtcagtgctggggaagatgatgacgacgatgaatgtggggaagagaagctgccctcctgtttcgattacgtgatgcactttctgactgtgttctggaaggtcctgtttgccttcgtcccccctactgaatactggaatggctgggcgtgtttcattgtctccatcctcatgattggcctactgacagctttcattggagacctggcttcccactttggctgcaccattggcctgaaagattctgtgactgcagtcgtgttcgtcgcacttggaacatcagtgccagacacatttgccagcaaagtggcagccacccaggaccagtatgcagacgcctccataggtaacgtcacgggcagcaacgcggtgaatgtcttcctgggaatcggtgtggcctggtccatcgctgccatctaccacgcagccaatggggaacagttcaaagtgtcccctggcacactagctttctctgtcactctcttcaccatttttgctttcatcaatgtgggggtgctgctgtatcggcggaggccagaaatcggaggtgagctgggtgggccccggactgccaagctcctcacatcctgcctctttgtgctcctatggctcttgtacattttcttctcctccctggaggcctactgccacataaaaggcttctaa

SEQ ID NO: 184634 - DNA, 3434 bp, Homo sapiens
  Payload ID: 16357
  Gene Symbol: SLC8A1
  Gene Name: solute carrier family 8 (sodium/calcium exchanger), member 1
  ENST ID: ENST00000407929
  CDS Start-End: 1-1995
atgcggcgattaagtctttcacccaccttttcaatgggatttcatctgttagttactgtgagtctcttattttcccatgtggaccatgtaattgctgagacagaaatggaaggagaaggaaatgaaactggtgaatgtactggatcatattactgtaagaaaggggtgattttgcccatttgggaaccccaagacccttcttttggggacaaaattgctagagctactgtgtattttgtggccatggtctacatgtttcttggagtctctatcatagctgatcggttcatgtcctctatagaagtcatcacatctcaagaaaaagaaataaccataaagaaacccaatggagagaccaccaagacaactgtgaggatctggaatgaaacagtttctaacctgaccttgatggccctgggatcttctgctcctgagattctcctttcagtaattgaagtgtgtggccataacttcactgcaggagacctcggtcctagcaccatcgtgggaagtgctgcattcaatatgttcatcattattgcactctgtgtttatgtggtgcctgacggagagacaaggaagattaagcatttgcgtgtcttctttgtgacagcagcctggagcatctttgcctacacctggctttacattattttgtctgtcatatctcctggtgttgtggaggtctgggaaggtttgcttactttcttcttctttcccatctgtgttgtgttcgcttgggtagcggataggagacttctgttttacaagtatgtctacaagaggtatcgagctggcaagcagagggggatgattattgaacatgaaggagacaggccatcttctaagactgaaattgaaatggacgggaaagtggtcaattctcatgttgaaaatttcttagatggtgctctggttctggaggtggatgagagggaccaagatgatgaagaagctaggcgagaaatggctaggattctgaaggaacttaagcagaagcatccagataaagaaatagagcaattaatagaattagctaactaccaagtcctaagtcagcagcaaaaaagtagagcattttatcgcattcaagctactcgcctcatgactggagctggcaacattttaaagaggcatgcagctgaccaagcaaggaaggctgtcagcatgcacgaggtcaacactgaagtgactgaaaatgaccctgttagtaagatcttctttgaacaagggacatatcagtgtctggagaactgtggtactgtggcccttaccattatccgcagaggtggtgatttgactaacactgtgtttgttgacttcagaacagaggatggcacagcaaatgctgggtctgattatgaatttactgaaggaactgtggtgtttaagcctggtgatacccagaaggaaatcagagtgggtatcatagatgatgatatctttgaggaggatgaaaatttccttgtgcatctcagcaatgtcaaagtatcttctgaagcttcagaagatggcatactggaagccaatcatgtttctacacttgcttgcctcggatctccctccactgccactgtaactatttttgatgatgaccacgcaggcatttttacttttgaggaacctgtgactcatgtgagtgagagcattggcatcatggaggtgaaagtattgagaacatctggagctcgaggaaatgttatcgttccatataaaaccatcgaagggactgccagaggtggaggggaggattttgaggacacttgtggagagctcgaattccagaatgatgaaattgtcaaaacaatatcagtcaaggtaattgatgatgaggagtatgagaaaaacaagaccttcttccttgagattggagagccccgcctggtggagatgagtgagaagaaaggaagatcattaccattagaatatttgaccgtgaggaatatgagaaagagtgcagtttctcccttgtgcttgaggaaccaaaatggataagaagaggaatgaaaggtggcttcacaataacagacgaatatgatgacaagcagccactgaccagcaaagaggaagaggagaggcgcattgcagaaatggggcgccccatcctgggagagcacaccaagttggaagtgatcattgaagaatcctatgaattcaagagtactgtggacaaactcattaagaagacaaacctggcccttgtggttgggactaacagctggagagaacagttcattgaagctatcactgtcagtgctggggaagatgatgacgacgatgaatgtggggaagagaagctgccctcctgtttcgattacgtgatgcactttctgactgtgttctggaaggtcctgtttgccttcgtcccccctactgaatactggaatggctgggcgtgtttcattgtctccatcctcatgattggcctactgacagctttcattggagacctggcttcccactttggctgcaccattggcctgaaagattctgtgactgcagtcgtgttcgtcgcacttggaacatcagtgccagacacatttgccagcaaagtggcagccacccaggaccagtatgcagacgcctccataggtaacgtcacgggcagcaacgcggtgaatgtcttcctgggaatcggtgtggcctggtccatcgctgccatctaccacgcagccaatggggaacagttcaaagtgtcccctggcacactagctttctctgtcactctcttcaccatttttgctttcatcaatgtgggggtgctgctgtatcggcggaggccagaaatcggaggtgagctgggtgggccccggactgccaagctcctcacatcctgcctctttgtgctcctatggctcttgtacattttcttctcctccctggaggcctactgccacataaaaggcttctaaaggaactatcagatatagtaaatttatatatatacatatatatacataaaaattatgtataatggacagaggaaactgacatttgtcatgttcacttacctgctgatggaatccagcttcaagagcatactctgtactagggccgaagtaaaaaaccatcacctcccattcccaggggcatcatcatgttcaacaaggcatggaggcagggccatctttgcagctcagtctagaagggctgcactctctccaggttgataaatccttaaggctttgatttgttttgtttttggttttgttttcagtggagctggggaggtagttaatgtttggctttatttttgttattttgttttgttttgtttttttgggagagtcagggttgttgcttttctttgtggaaagtgaaaccatccaaatgtaaatgggttttggtaaaaatttaaatcattagtattccccctcacctcccccaatcactttaaaacttattttggattaagaaaaaatctgggcatggaa

SEQ ID NO: 184635 - DNA, 563 bp, Homo sapiens
  Payload ID: 16357
  Gene Symbol: SLC8A1
  Gene Name: solute carrier family 8 (sodium/calcium exchanger), member 1
  ENST ID: ENST00000455476
  CDS Start-End: 303-563
atcagtcgtggtgactgccctggttgcactgtaagtatggggggacgtctccacgaaaaaaaactaactttctgccttgtgctctgcaggtccctccttctcccaccttccccaagtagctgctcctgacccccccacacaccttggcaaacgacaccagtggccgatagcaactggtgttttaaaaatactaatttggagccccatttgagacctacaacgggagagtctgcatcagattcggcctcagattctacagcatctgactacattcccagtaggttgtgacagttggaagtgtcatgtacaacatgcggcgattaagtctttcacccaccttttcaatgggatttcatctgttagttactgtgagtctcttattttcccatgtggaccatgtaattgctgagacagaaatggaaggagaaggaaatgaaactggtgaatgtactggatcatattactgtaagaaaggggtgattttgcccatttgggaaccccaagacccttcttttggggacaaaattgctagagctactgtgtattttgtggccatggtctac

SEQ ID NO: 184636 - DNA, 561 bp, Homo sapiens
  Payload ID: 16357
  Gene Symbol: SLC8A1
  Gene Name: solute carrier family 8 (sodium/calcium exchanger), member 1
  ENST ID: ENST00000448531
  CDS Start-End: 301-561
ctttctggtaaatttagagaaggcatcatactgggatcttttttcacatccagcccatgcggactgagcagccaaagcttgacagaggtccctccttctcccaccttccccaagtagctgctcctgacccccccacacaccttggcaaacgacaccagtggccgatagcaactggtgttttaaaaatactaatttggagccccatttgagacctacaacgggagagtctgcatcagattcggcctcagattctacagcatctgactacattcccagtaggttgtgacagttggaagtgtcatgtacaacatgcggcgattaagtctttcacccaccttttcaatgggatttcatctgttagttactgtgagtctcttattttcccatgtggaccatgtaattgctgagacagaaatggaaggagaaggaaatgaaactggtgaatgtactggatcatattactgtaagaaaggggtgattttgcccatttgggaaccccaagacccttcttttggggacaaaattgctagagctactgtgtattttgtggccatggtctac

SEQ ID NO: 184637 - DNA, 583 bp, Homo sapiens
  Payload ID: 16357
  Gene Symbol: SLC8A1
  Gene Name: solute carrier family 8 (sodium/calcium exchanger), member 1
  ENST ID: ENST00000417271
  CDS Start-End: 364-583
agcgacctcttcctgatcgggagctgtttaaaaggagggagtgcgccgtattttctactagcgtggaggaacggaggaagaatccattcacactccccaaaccagggatgtcatggtctagaacacctatgctgaagtacaaggctgagcaagaaagatcactccactgcaactgagcaaagtgctgaaggagttgaaaggaagaagagaacattggacgtggtttcacggaggaggaagcattttaatttattcagaaagagtgaaaaggattttgaaagcaaataaggctagccacttttgaaacatgtcaaagagccccagcttatttacgacaagtaggttgtgacagttggaagtgtcatgtacaacatgcggcgattaagtctttcacccaccttttcaatgggatttcatctgttagttactgtgagtctcttattttcccatgtggaccatgtaattgctgagacagaaatggaaggagaaggaaatgaaactggtgaatgtactggatcatattactgtaagaaaggggtgattttgcccatttgggaaccccaagacccttcttttggggaca

SEQ ID NO: 184638 - DNA, 5234 bp, Homo sapiens
  Payload ID: 16358
  Gene Symbol: SLC8A2
  Gene Name: solute carrier family 8 (sodium/calcium exchanger), member 2
  Uniprot ID: Q9UPR5
  ENST ID: ENST00000236877
  CDS Start-End: 397-3162
acacaggagcgccctccggtgctgtcccctgcctctggtgctgaacccggaggctggggaggaggctcgggctccctgctcccccaggcccctccccgggcctccccccgcctcccgcaccgccttccctctgcccgcctccgcctcctccccctctctccggctcctccccctccctcgctccctcgccgcctccccctcccccgtgtccctcccctctcctcttctcctccctctatcccctctccctcccctcctccccggctctccctctcagtctcaggcttttctctctctcaatctctctctctctttcgggcggagtcgcccaccactgccagcccagcgctggggggacctgctccaggctgtagccgcaggaccccaccaccccccatggctcccctggccttggtgggggtcacactcctcctggcggctcccccatgctccggggcagccaccccaaccccctccctgccgcctcccccggccaatgacagcgacaccagcacagggggctgccaggggtcctaccgctgccagccgggggtgctgctgcccgtgtgggagcccgacgacccgtcgctgggtgacaaggcggcacgggcagtggtgtactttgtggccatggtctacatgtttctgggagtgtccatcatcgccgaccgtttcatggcggccatcgaggtcatcacgtcaaaagagaaggagatcaccatcaccaaggccaacggtgagaccagcgtgggcaccgttcgcatctggaatgagacggtgtccaacctcacgctcatggccctgggctcctccgcacctgagatcctgctgtcagtcatcgaagtctgcggccacaacttccaggcgggtgagctgggcccaggcaccatcgtgggcagcgctgccttcaacatgtttgtggtcatcgccgtgtgcatctacgtcatcccagccggcgagagccgcaagatcaagcacctgagagtcttctttgtcactgcctcttggagcatcttcgcctatgtctggctttatctcatccttgctgttttttcccccggtgtggtccaggtgtgggaggcgctgctgaccctggtcttcttcccggtgtgcgtggtattcgcctggatggccgacaagcggctgctcttctacaagtacgtgtacaagcgctaccgcaccgacccacgcagcggcatcatcataggcgccgagggcgaccccccgaagagcatcgagctggacggcacgttcgtgggcgccgaggccccaggtgagctgggcggcctgggcccgggccccgccgaggcgcgcgagctggacgccagccgccgcgaggtcatccagatcctcaaggacctcaagcagaagcacccggacaaggatctggagcagctggtgggcatcgccaactactacgcgctgctgcaccagcagaagagccgcgccttctaccgcatccaggccacgcggctgatgaccggcgccgggaacgtgctgcgcagacacgcggcggacgcctcgcgcagggcggcgccggccgagggcgcgggcgaggacgaagacgacggcgccagccgcatcttcttcgagcctagcctctaccactgcctggagaactgcggctccgtgctgctgtccgtcacgtgccagggcggcgagggcaacagcaccttctacgtggactaccgcactgaggacggctctgccaaggcgggctccgactacgagtacagcgagggcacgctggtgttcaaaccaggcgagacgcagaaggagctgcgcatcggcatcatcgacgacgacatcttcgaggaggacgagcatttcttcgtgcggctgctgaacctgcgcgtgggcgacgcgcagggcatgttcgagccggacggcggcgggcggcccaaggggcggctggtggcgccgctgctggccaccgtcaccatcctggacgacgaccacgcaggcatcttctccttccaggaccgcctgctgcacgtgagcgagtgcatgggcaccgtggacgtgcgcgtcgtgcgcagctcgggcgcgcgcggcaccgtgcgccttccctaccgcacggtggacggcacggcgcgcggcggcggcgtgcactacgaggacgcgtgcggagagctggagtttggcgacgacgagaccatgaaaactcttcaggtgaagatagttgatgacgaggaatatgagaaaaaggataatttcttcattgagctgggccagccccagtggcttaagcgagggatttcagctctgctactcaatcaaggggatggggacaggaagctaacagccgaggaggaggaggctcggaggatagcagagatgggcaagccagttcttggggagaactgccggctggaggtcatcatcgaggagtcatatgattttaagaacacggtggataaactcatcaagaaaacgaacttggccttggtaattgggacccattcatggagggagcagtttttagaggcaattacggtgagcgcaggggacgaggaggaggaggaggacgggtcccgggaggagcggctgccgtcgtgctttgactacgtgatgcacttcctgacggtgttctggaaggtgctcttcgcctgtgtgccccccaccgagtactgccacggctgggcctgctttggtgtctccatcctggtcatcggcctgctcaccgccctcattggggacctcgcctcccacttcggctgcaccgttggcctcaaggactctgtcaatgctgttgtcttcgttgccctgggcacctccatccctgacacgttcgccagcaaggtggcggcgctgcaggaccagtgcgccgacgcgtccatcggcaacgtgaccggctccaacgcggtgaacgtgttccttggcctgggcgtcgcctggtctgtggccgccgtgtactgggcggtgcagggccgccccttcgaggtgcgcactggcacgctggccttctccgtcacgctcttcaccgtcttcgccttcgtgggcattgccgtgctgctgtaccggcgccggccgcacatcggcggcgagctgggcggcccgcgcggacccaagctcgccaccaccgcgctcttcctgggcctctggctcctgtacatcctcttcgccagcctggaggcgtactgccacatccggggcttctagggcctcgcgcagagactcgtccccaccgcccgcccggggctagggactcggctgcacctgctcttggaccctggtctccttttccccccagactcggcctcctctcctgggactcggcctcccttctccgccccctcccctggctttgattgccctgttctgtgtccccagtagctcagccttccctcttcctctcgggagcctccccggttcctcccctgcggtgaccccaactccagcccatcctgttggtgaccgtctatatccctggggaaatttccaccccagtcccctccccagggaaccacccccagtaaccatcctggggagtttaaggtctctctccttggtcacccagcctggctttgcccccaaagtctcccttcccctagtgaccccccccccacttcaccccatgtcccagagcctcagaacccaccctccctgggggaccctcgaaggaggctgtcagaggccgtctcagctcccagcccttccccccagccctcagggagctccgctcagccccggcggggaggagcgggtgggtgtgcgcgcaaggaggccgcacaccgttccttccaatccctccactcgggttcttgggaggacactcattctccaggctcggagacgaggggagaagtttggggtttcagtcccagggcttagccggaggaagcacattttgaacctgcaacttcagacattccagctcccccactcgccctccactacctctgagagcccagccacgccttggagggaggggcttgtgtgtgtatatagtgtgtttgggggaggggggacgcgggagggtgcatgtcttgggaaaagggggtgacagacaacttttgagagggcagcagactccctcagccatgagaaccagctttggggaggaggccgggaatcaaagcgagtccagttgatctcccctgacaatctggaaggttccttttgccctcagtgccagccaatccgggcaggaccctcgaagaggagaccgagggtcccagaggaccaatgctacaagccagcaaatgctgccacatctctgcctgatggggggtggggatgggtggggggatgggactgggccaagggatctgggtgggcatttttaactttggaggccttccatctgtcggtaggccatctgcattttcttactgttgatgtttcctgcccaaaggacacatttgggcagtgccacccactccttgggcccctaggatgacccaactacccccataactttctgcttcccacaggttttcagcattctatcgtcctgttgtgctcagccccaacatcccagacccgttacccactacccttctctcccccagctcatcatcagtcgctgtctcttttctgtgatttctgtaaaagttgccataaaactttgaaattctgcctgaaaaacagtcccgtgggaagctgggattcaggaggagggggctaataaggtctctgactgagatttgggcaactgttaaaccaagtaatctgggtttttgcggcccgcggtcgtctgcgggacacacccacatatagcagcagcgccggggtccagccgccaagctcttccactcgccacgcccccatcagtaatgagcttccactagccacgcccccatccgtcagcctagctcttccactagccacacccccatccatcagtcatgggcttccacaagccacgcacctccactctccatgcccccattcgtcagtcgtgggtttccactaaccacgcccccattcatcagccaagctcctccacttgctacgcccgcatccgtcaattacgggtttccactaaccacgcccccattcatcagcctagctcttccactaatcacacccccacttatcagtcgtgcttcagccacgccttcctgcttcagtcaggggcttccactagccacgcccccatgcatgagccacaaactgtttctctttatgggcatcctgggaacacaaaagagagacgttcatttgcctgagccaaagagctggggttgatggggtttcctaaataaagcaagtaattttctcagatccta

SEQ ID NO: 184639 - DNA, 3603 bp, Homo sapiens
  Payload ID: 16358
  Gene Symbol: SLC8A2
  Gene Name: solute carrier family 8 (sodium/calcium exchanger), member 2
  ENST ID: ENST00000542837
  CDS Start-End: 142-2175
tcaatctctctctctctttcgggcggagtcgcccaccactgccagcccagcgctggggggacctgctccaggctgtagccgcaggtgtgggaggcgctgctgaccctggtcttcttcccggtgtgcgtggtattcgcctggatggccgacaagcggctgctcttctacaagtacgtgtacaagcgctaccgcaccgacccacgcagcggcatcatcataggcgccgagggcgaccccccgaagagcatcgagctggacggcacgttcgtgggcgccgaggccccaggtgagctgggcggcctgggcccgggccccgccgaggcgcgcgagctggacgccagccgccgcgaggtcatccagatcctcaaggacctcaagcagaagcacccggacaaggatctggagcagctggtgggcatcgccaactactacgcgctgctgcaccagcagaagagccgcgccttctaccgcatccaggccacgcggctgatgaccggcgccgggaacgtgctgcgcagacacgcggcggacgcctcgcgcagggcggcgccggccgagggcgcgggcgaggacgaagacgacggcgccagccgcatcttcttcgagcctagcctctaccactgcctggagaactgcggctccgtgctgctgtccgtcacgtgccagggcggcgagggcaacagcaccttctacgtggactaccgcactgaggacggctctgccaaggcgggctccgactacgagtacagcgagggcacgctggtgttcaaaccaggcgagacgcagaaggagctgcgcatcggcatcatcgacgacgacatcttcgaggaggacgagcatttcttcgtgcggctgctgaacctgcgcgtgggcgacgcgcagggcatgttcgagccggacggcggcgggcggcccaaggggcggctggtggcgccgctgctggccaccgtcaccatcctggacgacgaccacgcaggcatcttctccttccaggaccgcctgctgcacgtgagcgagtgcatgggcaccgtggacgtgcgcgtcgtgcgcagctcgggcgcgcgcggcaccgtgcgccttccctaccgcacggtggacggcacggcgcgcggcggcggcgtgcactacgaggacgcgtgcggagagctggagtttggcgacgacgagaccatgaaaactcttcaggtgaagatagttgatgacgaggaatatgagaaaaaggataatttcttcattgagctgggccagccccagtggcttaagcgagggatttcagctctgctactcaatcaaggggatggggacaggaagctaacagccgaggaggaggaggctcggaggatagcagagatgggcaagccagttcttggggagaactgccggctggaggtcatcatcgaggagtcatatgattttaagaacacggtggataaactcatcaagaaaacgaacttggccttggtaattgggacccattcatggagggagcagtttttagaggcaattacggtgagcgcaggggacgaggaggaggaggaggacgggtcccgggaggagcggctgccgtcgtgctttgactacgtgatgcacttcctgacggtgttctggaaggtgctcttcgcctgtgtgccccccaccgagtactgccacggctgggcctgctttggtgtctccatcctggtcatcggcctgctcaccgccctcattggggacctcgcctcccacttcggctgcaccgttggcctcaaggactctgtcaatgctgttgtcttcgttgccctgggcacctccatccctgacacgttcgccagcaaggtggcggcgctgcaggaccagtgcgccgacgcgtccatcggcaacgtgaccggctccaacgcggtgaacgtgttccttggcctgggcgtcgcctggtctgtggccgccgtgtactgggcggtgcagggccgccccttcgaggtgcgcactggcacgctggccttctccgtcacgctcttcaccgtcttcgccttcgtgggcattgccgtgctgctgtaccggcgccggccgcacatcggcggcgagctgggcggcccgcgcggacccaagctcgccaccaccgcgctcttcctgggcctctggctcctgtacatcctcttcgccagcctggaggcgtactgccacatccggggcttctagggcctcgcgcagagactcgtccccaccgcccgcccggggctagggactcggctgcacctgctcttggaccctggtctccttttccccccagactcggcctcctctcctgggactcggcctcccttctccgccccctcccctggctttgattgccctgttctgtgtccccagtagctcagccttccctcttcctctcgggagcctccccggttcctcccctgcggtgaccccaactccagcccatcctgttggtgaccgtctatatccctggggaaatttccaccccagtcccctccccagggaaccacccccagtaaccatcctggggagtttaaggtctctctccttggtcacccagcctggctttgcccccaaagtctcccttcccctagtgaccccccccccacttcaccccatgtcccagagcctcagaacccaccctccctgggggaccctcgaaggaggctgtcagaggccgtctcagctcccagcccttccccccagccctcagggagctccgctcagccccggcggggaggagcgggtgggtgtgcgcgcaaggaggccgcacaccgttccttccaatccctccactcgggttcttgggaggacactcattctccaggctcggagacgaggggagaagtttggggtttcagtcccagggcttagccggaggaagcacattttgaacctgcaacttcagacattccagctcccccactcgccctccactacctctgagagcccagccacgccttggagggaggggcttgtgtgtgtatatagtgtgtttgggggaggggggacgcgggagggtgcatgtcttgggaaaagggggtgacagacaacttttgagagggcagcagactccctcagccatgagaaccagctttggggaggaggccgggaatcaaagcgagtccagttgatctcccctgacaatctggaaggttccttttgccctcagtgccagccaatccgggcaggaccctcgaagaggagaccgagggtcccagaggaccaatgctacaagccagcaaatgctgccacatctctgcctgatggggggtggggatgggtggggggatgggactgggccaagggatctgggtgggcatttttaactttggaggccttccatctgtcggtaggccatctgcattttcttactgttgatgtttcctgcccaaaggacacatttgggcagtgccacccactccttgggcccctaggatgacccaactacccccataactttctgcttcccacaggttttcagcattctatcgtcctgttgtgctcagccccaacatcccagacccgttacccactacccttctctcccccagctcatcatcagtcgctgtctcttttctgtgatttctgtaaaagttgccataaaactttgaaattctgcctgaaaaa

SEQ ID NO: 184640 - DNA, 570 bp, Homo sapiens
  Payload ID: 16358
  Gene Symbol: SLC8A2
  Gene Name: solute carrier family 8 (sodium/calcium exchanger), member 2
  ENST ID: ENST00000597014
  CDS Start-End: 136-570
agtctcaggcttttctctctctcaatctctctctctctttcgggcggagtcgcccaccactgccagcccagcgctggggggacctgctccaggctgtagccgcaggcggcacgggcagtggtgtactttgtggccatggtctacatgtttctgggagtgtccatcatcgccgaccgtttcatggcggccatcgaggtcatcacgtcaaaagagaaggagatcaccatcaccaaggccaacggtgagaccagcgtgggcaccgttcgcatctggaatgagacggtgtccaacctcacgctcatggccctgggctcctccgcacctgagatcctgctgtcagtcatcgaagtctgcggccacaacttccaggcgggtgagctgggcccaggcaccatcgtgggcagcgctgccttcaacatgtttgtggtcatcgccgtgtgcatctacgtcatcccagccggcgagagccgcaagatcaagcacctgagagtcttctttgtcactgcctcttggagcatcttcgcctatgtctggctttatctcatccttgctgttttttcccccggtgtg

SEQ ID NO: 184641 - DNA, 581 bp, Homo sapiens
  Payload ID: 16358
  Gene Symbol: SLC8A2
  Gene Name: solute carrier family 8 (sodium/calcium exchanger), member 2
  ENST ID: ENST00000594353
  CDS Start-End: 104-581
tctctctctctctttcgggcggagtcgcccaccactgccagcccagcgctggggggacctgctccaggctgtagccgcagtgtccatcatcgccgaccgtttcatggcggccatcgaggtcatcacgtcaaaagagaaggagatcaccatcaccaaggccaacggtgagaccagcgtgggcaccgttcgcatctggaatgagacggtgtccaacctcacgctcatggccctgggctcctccgcacctgagatcctgctgtcagtcatcgaagtctgcggccacaacttccaggcgggtgagctgggcccaggcaccatcgtgggcagcgctgccttcaacatgtttgtggtcatcgccgtgtgcatctacgtcatcccagccggcgagagccgcaagatcaagcacctgagagtcttctttgtcactgcctcttggagcatcttcgcctatgtctggctttatctcatccttgctgttttttcccccggtgtggtccaggtgtgggaggcgctgctgaccctggtcttcttcccggtgtgcgtggtattcgcctggatggccgacaagcggctgctcttct

SEQ ID NO: 184642 - DNA, 2916 bp, Homo sapiens
  Payload ID: 16359
  Gene Symbol: SLC8A3
  Gene Name: solute carrier family 8 (sodium/calcium exchanger), member 3
  Uniprot ID: P57103
  ENST ID: ENST00000216568
  CDS Start-End: 328-1224
gagtatcaactcttccagcatggagccgaaaacctagggaatgacagctagaggcatccagacgataactggcagccaggagggtggataagtcaaaggaaggggtcaaggaaagaggggaaggaaagggaaccatcacttgctgagcctgctgcctgtgctttctcatgtcacccgcacgacaacccaatgtgaatgttatcatctccaggtaactgctgaagaaacggaagctcaaagaggaaaaccataagggttaaaatagtagatgaggaggaatacgaaaggcaagagaatttcttcattgcccttggtgaaccgaaatggatggaacgtggaatatcagatgtgacagacaggaagctgactatggaagaagaggaggccaagaggatagcagagatgggaaagccagtattgggtgaacaccccaaactagaagtcatcattgaagagtcctatgagttcaagactacggtggacaaactgatcaagaagacaaacctggccttggttgtggggacccattcctggagggaccagttcatggaggccatcaccgtcagtgcagcaggggatgaggatgaggatgaatccggggaggagaggctgccctcctgctttgactacgtcatgcacttcctgactgtcttctggaaggtgctgtttgcctgtgtgccccccacagagtactgccacggctgggcctgcttcgccgtctccatcctcatcattggcatgctcaccgccatcattggggacctggcctcgcacttcggctgcaccattggtctcaaagattcagtcacagctgttgttttcgtggcatttggcacctctgtcccagatacgtttgccagcaaagctgctgccctccaggatgtatatgcagacgcctccattggcaacgtgacgggcagcaacgccgtcaatgtcttcctgggcatcggcctggcctggtccgtggccgccatctactgggctctgcagggacaggagttccacgtgtcggccggcacactggccttctccgtcaccctcttcaccatctttgcatttgtctgcatcagcgtgctcttgtaccgaaggcggccgcacctgggaggggagcttggtggcccccgtggctgcaagctcgccacaacatggctctttgtgagcctgtggctcctctacatactctttgccacactagaggcctattgctacatcaaggggttctaagccacacaacagagcctccagcagggcaggcctaggacttctcctaagagaagggcacttccccaccagtgatctctcccgactgcactgccctggagaggcagcatcaggacctaagccccaggaacttcacccaacttaggccctggcaattaactgaaagggcaaagtcttaatcaatcaaacaatggaggaatcaccgactttacacagtatttaattgaatacaaacaagcaacagcaacaaatccacctccaccccatctccccctcatatccctgacccaaagcaaaggtcagagcctttcgcctccttctattccatcttttgattattcctttgcctctcatttctttggaagcagggtttctcctctctgcccaattccatatgtccctattatctcactcagctgacaagacgtgaaaatgagtcacattcatgtggctggggtggggttcttttttcattgtaatcattattgtggttgctttcgttttgccattaggttttgcttattattttgttttgtcttttttttctgaagtgagtgaaaaaggtgccacaaaggaattccaggtccgagccaacagagagaaacatgaatttttagacacatgctctcctgccacctcttggctccatcaagatccagttccccatctcactgttttctctgagttcttgggaggagtgatggtgttggggtagaaataagctcactcacccacgcagggtactaaagatcttacaggagcttcaactggagcaggaggagctttttatgcttatgttgaatcaagtcagatacaaaaagcaattgtccctctttgcccaagcctttccaattctgtgtgtcttgttgtgtcagtgtccacttgtgtatccttctgcaggaagacccgccaaatagaagagatgggacaaaaataggaatggtgtgtgacgacaaagggctactggaagaacaaaagggatacaggccttcttgattatctttggctttgtacctgaggcaggagagaagagatgtccaaccagtgagatctttaagagaaaagtttgtattttaaatgtcaatgtgcctgagaaatgtcagcttcaccacgctcttgcttcctaatgctctatacaaagagggctgactatatttcttgaagtggtgtaaaaacttagagattttataagagaaccaggggctcccttcacctctcctggtccctcaggtcacatatgaaagcatttttacaagataggaactggaattcctcatttctcccatgttcctgcttgttcttaaacttcatgaagctatttttccagcctatggggtagttcttgctccagtaagaggaatcttagttgtcataatcccttggagcctgggtttttggagaaagagatctccgtgccctacagaccttttctcaacgaatgtgggaaggacctggctttaaaacacgcacacaaacacacaaataaacagacataagatgtcatcacgaaactgcccacggatctttaggctttctgcattgacataaatacattttctaagggggggggggaagaaattaaaaaacacctgttaattttaaacacattttttaagaaaaaaataattaaaaaagaaacagtgctcatgtcataagctatgttgacagttgccagtggaaatgttgggttggttc

SEQ ID NO: 184643 - DNA, 5250 bp, Homo sapiens
  Payload ID: 16359
  Gene Symbol: SLC8A3
  Gene Name: solute carrier family 8 (sodium/calcium exchanger), member 3
  Uniprot ID: P57103
  ENST ID: ENST00000356921
  CDS Start-End: 755-3520
cggcgctgtctcccagctgatagggtgacgttccgtttggaggcttggagattggctttttgatttggcttcttccggcagcttaatgggcaaagctctccgctcgcccagaaaccagcctctccgcgcgtcccctctgcgcgcggcgaggccgagacgtctcccgcggtgacagcgtgcaaggcggagacccggcgcgctcccagcccagggaaagcccaggcgacgcgaccgcaagcccgagcccaggtccctcggagccgccagggcgcgccgggctgcttgccttcctgccccttcctgcaggaatcccccgccgcccgcggccgggactccgggcctctcccgggcgtagattccagtcaccgctctgggtcggggtttccctctttctgaaatccgtgcggaaggacccctcccggggcccctcgccctggccccagacaccctccctcccagaccccgcgctccagatgcgctgccccgcagctccctgacagctgcgagcccacgaaccccggcgggagggcggcggcggcggactgacatgccccggacgcggctgcggccggcgggcagcccgcgggggcgatgagccgctgcgaccggtgaggcgccgggcggcgggggcatcgcgtaccttcctcacccccctcccttgcccactccgctcgggaggccgagaggaaacggtctctggcctatcaggaggacaactggtgctgcaatagaagccagtggctaagtctcgtgtatggcgtggttaaggttgcagcctctcacctctgccttcctccattttgggctggttacctttgtgctcttcctgaatggtcttcgagcagaggctggtggctcaggggacgtgccaagcacagggcagaacaatgagtcctgttcagggtcatcggactgcaaggagggtgtcatcctgccaatctggtacccggagaacccttcccttggggacaagattgccagggtcattgtctattttgtggccctgatatacatgttccttggggtgtccatcattgctgaccgcttcatggcatctattgaagtcatcacctctcaagagagggaggtgacaattaagaaacccaatggagaaaccagcacaaccactattcgggtctggaatgaaactgtctccaacctgacccttatggccctgggttcctctgctcctgagatactcctctctttaattgaggtgtgtggtcatgggttcattgctggtgatctgggaccttctaccattgtagggagtgcagccttcaacatgttcatcatcattggcatctgtgtctacgtgatcccagacggagagactcgcaagatcaagcatctacgagtcttcttcatcaccgctgcttggagtatctttgcctacatctggctctatatgattctggcagtcttctcccctggtgtggtccaggtttgggaaggcctcctcactctcttcttctttccagtgtgtgtccttctggcctgggtggcagataaacgactgctcttctacaaatacatgcacaaaaagtaccgcacagacaaacaccgaggaattatcatagagacagagggtgaccaccctaagggcattgagatggatgggaaaatgatgaattcccattttctagatgggaacctggtgcccctggaagggaaggaagtggatgagtcccgcagagagatgatccggattctcaaggatctgaagcaaaaacacccagagaaggacttagatcagctggtggagatggccaattactatgctctttcccaccaacagaagagccgtgccttctaccgtatccaagccactcgtatgatgactggtgcaggcaatatcctgaagaaacatgcagcagaacaagccaagaaggcctccagcatgagcgaggtgcacaccgatgagcctgaggactttatttccaaggtcttctttgacccatgttcttaccagtgcctggagaactgtggggctgtactcctgacagtggtgaggaaagggggagacatgtcaaagaccatgtatgtggactacaaaacagaggatggttctgccaatgcaggggctgactatgagttcacagagggcacggtggttctgaagccaggagagacccagaaggagttctccgtgggcataattgatgacgacatttttgaggaggatgaacacttctttgtaaggttgagcaatgtccgcatagaggaggagcagccagaggaggggatgcctccagcaatattcaacagtcttcccttgcctcgggctgtcctagcctccccttgtgtggccacagttaccatcttggatgatgaccatgcaggcatcttcacttttgaatgtgatactattcatgtcagtgagagtattggtgttatggaggtcaaggttctgcggacatcaggtgcccggggtacagtcatcgtcccctttaggacagtagaagggacagccaagggtggcggtgaggactttgaagacacatatggggagttggaattcaagaatgatgaaactgtgaaaaccataagggttaaaatagtagatgaggaggaatacgaaaggcaagagaatttcttcattgcccttggtgaaccgaaatggatggaacgtggaatatcagatgtgacagacaggaagctgactatggaagaagaggaggccaagaggatagcagagatgggaaagccagtattgggtgaacaccccaaactagaagtcatcattgaagagtcctatgagttcaagactacggtggacaaactgatcaagaagacaaacctggccttggttgtggggacccattcctggagggaccagttcatggaggccatcaccgtcagtgcagcaggggatgaggatgaggatgaatccggggaggagaggctgccctcctgctttgactacgtcatgcacttcctgactgtcttctggaaggtgctgtttgcctgtgtgccccccacagagtactgccacggctgggcctgcttcgccgtctccatcctcatcattggcatgctcaccgccatcattggggacctggcctcgcacttcggctgcaccattggtctcaaagattcagtcacagctgttgttttcgtggcatttggcacctctgtcccagatacgtttgccagcaaagctgctgccctccaggatgtatatgcagacgcctccattggcaacgtgacgggcagcaacgccgtcaatgtcttcctgggcatcggcctggcctggtccgtggccgccatctactgggctctgcagggacaggagttccacgtgtcggccggcacactggccttctccgtcaccctcttcaccatctttgcatttgtctgcatcagcgtgctcttgtaccgaaggcggccgcacctgggaggggagcttggtggcccccgtggctgcaagctcgccacaacatggctctttgtgagcctgtggctcctctacatactctttgccacactagaggcctattgctacatcaaggggttctaagccacacaacagagcctccagcagggcaggcctaggacttctcctaagagaagggcacttccccaccagtgatctctcccgactgcactgccctggagaggcagcatcaggacctaagccccaggaacttcacccaacttaggccctggcaattaactgaaagggcaaagtcttaatcaatcaaacaatggaggaatcaccgactttacacagtatttaattgaatacaaacaagcaacagcaacaaatccacctccaccccatctccccctcatatccctgacccaaagcaaaggtcagagcctttcgcctccttctattccatcttttgattattcctttgcctctcatttctttggaagcagggtttctcctctctgcccaattccatatgtccctattatctcactcagctgacaagacgtgaaaatgagtcacattcatgtggctggggtggggttcttttttcattgtaatcattattgtggttgctttcgttttgccattaggttttgcttattattttgttttgtcttttttttctgaagtgagtgaaaaaggtgccacaaaggaattccaggtccgagccaacagagagaaacatgaatttttagacacatgctctcctgccacctcttggctccatcaagatccagttccccatctcactgttttctctgagttcttgggaggagtgatggtgttggggtagaaataagctcactcacccacgcagggtactaaagatcttacaggagcttcaactggagcaggaggagctttttatgcttatgttgaatcaagtcagatacaaaaagcaattgtccctctttgcccaagcctttccaattctgtgtgtcttgttgtgtcagtgtccacttgtgtatccttctgcaggaagacccgccaaatagaagagatgggacaaaaataggaatggtgtgtgacgacaaagggctactggaagaacaaaagggatacaggccttcttgattatctttggctttgtacctgaggcaggagagaagagatgtccaaccagtgagatctttaagagaaaagtttgtattttaaatgtcaatgtgcctgagaaatgtcagcttcaccacgctcttgcttcctaatgctctatacaaagagggctgactatatttcttgaagtggtgtaaaaacttagagattttataagagaaccaggggctcccttcacctctcctggtccctcaggtcacatatgaaagcatttttacaagataggaactggaattcctcatttctcccatgttcctgcttgttcttaaacttcatgaagctatttttccagcctatggggtagttcttgctccagtaagaggaatcttagttgtcataatcccttggagcctgggtttttggagaaagagatctccgtgccctacagaccttttctcaacgaatgtgggaaggacctggctttaaaacacgcacacaaacacacaaataaacagacataagatgtcatcacgaaactgcccacggatctttaggctttctgcattgacataaatacattttctaagggggggggggaagaaattaaaaaacacctgttaattttaaacacattttttaagaaaaaaataattaaaaaagaaacagtgctcatgtcataagctatgttgacagttgccagtggaaatgttgggttggttcaaaaaaaaaataaaagctatactatatctctctacata

SEQ ID NO: 184644 - DNA, 5259 bp, Homo sapiens
  Payload ID: 16359
  Gene Symbol: SLC8A3
  Gene Name: solute carrier family 8 (sodium/calcium exchanger), member 3
  Uniprot ID: P57103
  ENST ID: ENST00000357887
  CDS Start-End: 755-3532
cggcgctgtctcccagctgatagggtgacgttccgtttggaggcttggagattggctttttgatttggcttcttccggcagcttaatgggcaaagctctccgctcgcccagaaaccagcctctccgcgcgtcccctctgcgcgcggcgaggccgagacgtctcccgcggtgacagcgtgcaaggcggagacccggcgcgctcccagcccagggaaagcccaggcgacgcgaccgcaagcccgagcccaggtccctcggagccgccagggcgcgccgggctgcttgccttcctgccccttcctgcaggaatcccccgccgcccgcggccgggactccgggcctctcccgggcgtagattccagtcaccgctctgggtcggggtttccctctttctgaaatccgtgcggaaggacccctcccggggcccctcgccctggccccagacaccctccctcccagaccccgcgctccagatgcgctgccccgcagctccctgacagctgcgagcccacgaaccccggcgggagggcggcggcggcggactgacatgccccggacgcggctgcggccggcgggcagcccgcgggggcgatgagccgctgcgaccggtgaggcgccgggcggcgggggcatcgcgtaccttcctcacccccctcccttgcccactccgctcgggaggccgagaggaaacggtctctggcctatcaggaggacaactggtgctgcaatagaagccagtggctaagtctcgtgtatggcgtggttaaggttgcagcctctcacctctgccttcctccattttgggctggttacctttgtgctcttcctgaatggtcttcgagcagaggctggtggctcaggggacgtgccaagcacagggcagaacaatgagtcctgttcagggtcatcggactgcaaggagggtgtcatcctgccaatctggtacccggagaacccttcccttggggacaagattgccagggtcattgtctattttgtggccctgatatacatgttccttggggtgtccatcattgctgaccgcttcatggcatctattgaagtcatcacctctcaagagagggaggtgacaattaagaaacccaatggagaaaccagcacaaccactattcgggtctggaatgaaactgtctccaacctgacccttatggccctgggttcctctgctcctgagatactcctctctttaattgaggtgtgtggtcatgggttcattgctggtgatctgggaccttctaccattgtagggagtgcagccttcaacatgttcatcatcattggcatctgtgtctacgtgatcccagacggagagactcgcaagatcaagcatctacgagtcttcttcatcaccgctgcttggagtatctttgcctacatctggctctatatgattctggcagtcttctcccctggtgtggtccaggtttgggaaggcctcctcactctcttcttctttccagtgtgtgtccttctggcctgggtggcagataaacgactgctcttctacaaatacatgcacaaaaagtaccgcacagacaaacaccgaggaattatcatagagacagagggtgaccaccctaagggcattgagatggatgggaaaatgatgaattcccattttctagatgggaacctggtgcccctggaagggaaggaagtggatgagtcccgcagagagatgatccggattctcaaggatctgaagcaaaaacacccagagaaggacttagatcagctggtggagatggccaattactatgctctttcccaccaacagaagagccgtgccttctaccgtatccaagccactcgtatgatgactggtgcaggcaatatcctgaagaaacatgcagcagaacaagccaagaaggcctccagcatgagcgaggtgcacaccgatgagcctgaggactttatttccaaggtcttctttgacccatgttcttaccagtgcctggagaactgtggggctgtactcctgacagtggtgaggaaagggggagacatgtcaaagaccatgtatgtggactacaaaacagaggatggttctgccaatgcaggggctgactatgagttcacagagggcacggtggttctgaagccaggagagacccagaaggagttctccgtgggcataattgatgacgacatttttgaggaggatgaacacttctttgtaaggttgagcaatgtccgcatagaggaggagcagccagaggaggggatgcctccagcaatattcaacagtcttcccttgcctcgggctgtcctagcctccccttgtgtggccacagttaccatcttggatgatgaccatgcaggcatcttcacttttgaatgtgatactattcatgtcagtgagagtattggtgttatggaggtcaaggttctgcggacatcaggtgcccggggtacagtcatcgtcccctttaggacagtagaagggacagccaagggtggcggtgaggactttgaagacacatatggggagttggaattcaagaatgatgaaactgtcaaaacaattcacatcaaggtaattgatgatgaggcatatgagaaaaacaagaattacttcattgagatgatgggcccccgcatggtggatatgagttttcagaaagcgctcctgttatctccagacaggaagctgactatggaagaagaggaggccaagaggatagcagagatgggaaagccagtattgggtgaacaccccaaactagaagtcatcattgaagagtcctatgagttcaagactacggtggacaaactgatcaagaagacaaacctggccttggttgtggggacccattcctggagggaccagttcatggaggccatcaccgtcagtgcagcaggggatgaggatgaggatgaatccggggaggagaggctgccctcctgctttgactacgtcatgcacttcctgactgtcttctggaaggtgctgtttgcctgtgtgccccccacagagtactgccacggctgggcctgcttcgccgtctccatcctcatcattggcatgctcaccgccatcattggggacctggcctcgcacttcggctgcaccattggtctcaaagattcagtcacagctgttgttttcgtggcatttggcacctctgtcccagatacgtttgccagcaaagctgctgccctccaggatgtatatgcagacgcctccattggcaacgtgacgggcagcaacgccgtcaatgtcttcctgggcatcggcctggcctggtccgtggccgccatctactgggctctgcagggacaggagttccacgtgtcggccggcacactggccttctccgtcaccctcttcaccatctttgcatttgtctgcatcagcgtgctcttgtaccgaaggcggccgcacctgggaggggagcttggtggcccccgtggctgcaagctcgccacaacatggctctttgtgagcctgtggctcctctacatactctttgccacactagaggcctattgctacatcaaggggttctaagccacacaacagagcctccagcagggcaggcctaggacttctcctaagagaagggcacttccccaccagtgatctctcccgactgcactgccctggagaggcagcatcaggacctaagccccaggaacttcacccaacttaggccctggcaattaactgaaagggcaaagtcttaatcaatcaaacaatggaggaatcaccgactttacacagtatttaattgaatacaaacaagcaacagcaacaaatccacctccaccccatctccccctcatatccctgacccaaagcaaaggtcagagcctttcgcctccttctattccatcttttgattattcctttgcctctcatttctttggaagcagggtttctcctctctgcccaattccatatgtccctattatctcactcagctgacaagacgtgaaaatgagtcacattcatgtggctggggtggggttcttttttcattgtaatcattattgtggttgctttcgttttgccattaggttttgcttattattttgttttgtcttttttttctgaagtgagtgaaaaaggtgccacaaaggaattccaggtccgagccaacagagagaaacatgaatttttagacacatgctctcctgccacctcttggctccatcaagatccagttccccatctcactgttttctctgagttcttgggaggagtgatggtgttggggtagaaataagctcactcacccacgcagggtactaaagatcttacaggagcttcaactggagcaggaggagctttttatgcttatgttgaatcaagtcagatacaaaaagcaattgtccctctttgcccaagcctttccaattctgtgtgtcttgttgtgtcagtgtccacttgtgtatccttctgcaggaagacccgccaaatagaagagatgggacaaaaataggaatggtgtgtgacgacaaagggctactggaagaacaaaagggatacaggccttcttgattatctttggctttgtacctgaggcaggagagaagagatgtccaaccagtgagatctttaagagaaaagtttgtattttaaatgtcaatgtgcctgagaaatgtcagcttcaccacgctcttgcttcctaatgctctatacaaagagggctgactatatttcttgaagtggtgtaaaaacttagagattttataagagaaccaggggctcccttcacctctcctggtccctcaggtcacatatgaaagcatttttacaagataggaactggaattcctcatttctcccatgttcctgcttgttcttaaacttcatgaagctatttttccagcctatggggtagttcttgctccagtaagaggaatcttagttgtcataatcccttggagcctgggtttttggagaaagagatctccgtgccctacagaccttttctcaacgaatgtgggaaggacctggctttaaaacacgcacacaaacacacaaataaacagacataagatgtcatcacgaaactgcccacggatctttaggctttctgcattgacataaatacattttctaagggggggggggaagaaattaaaaaacacctgttaattttaaacacattttttaagaaaaaaataattaaaaaagaaacagtgctcatgtcataagctatgttgacagttgccagtggaaatgttgggttggttcaaaaaaaaaataaaagctatactatatctctctac

SEQ ID NO: 184645 - DNA, 5268 bp, Homo sapiens
  Payload ID: 16359
  Gene Symbol: SLC8A3
  Gene Name: solute carrier family 8 (sodium/calcium exchanger), member 3
  Uniprot ID: P57103
  ENST ID: ENST00000381269
  CDS Start-End: 755-3538
cggcgctgtctcccagctgatagggtgacgttccgtttggaggcttggagattggctttttgatttggcttcttccggcagcttaatgggcaaagctctccgctcgcccagaaaccagcctctccgcgcgtcccctctgcgcgcggcgaggccgagacgtctcccgcggtgacagcgtgcaaggcggagacccggcgcgctcccagcccagggaaagcccaggcgacgcgaccgcaagcccgagcccaggtccctcggagccgccagggcgcgccgggctgcttgccttcctgccccttcctgcaggaatcccccgccgcccgcggccgggactccgggcctctcccgggcgtagattccagtcaccgctctgggtcggggtttccctctttctgaaatccgtgcggaaggacccctcccggggcccctcgccctggccccagacaccctccctcccagaccccgcgctccagatgcgctgccccgcagctccctgacagctgcgagcccacgaaccccggcgggagggcggcggcggcggactgacatgccccggacgcggctgcggccggcgggcagcccgcgggggcgatgagccgctgcgaccggtgaggcgccgggcggcgggggcatcgcgtaccttcctcacccccctcccttgcccactccgctcgggaggccgagaggaaacggtctctggcctatcaggaggacaactggtgctgcaatagaagccagtggctaagtctcgtgtatggcgtggttaaggttgcagcctctcacctctgccttcctccattttgggctggttacctttgtgctcttcctgaatggtcttcgagcagaggctggtggctcaggggacgtgccaagcacagggcagaacaatgagtcctgttcagggtcatcggactgcaaggagggtgtcatcctgccaatctggtacccggagaacccttcccttggggacaagattgccagggtcattgtctattttgtggccctgatatacatgttccttggggtgtccatcattgctgaccgcttcatggcatctattgaagtcatcacctctcaagagagggaggtgacaattaagaaacccaatggagaaaccagcacaaccactattcgggtctggaatgaaactgtctccaacctgacccttatggccctgggttcctctgctcctgagatactcctctctttaattgaggtgtgtggtcatgggttcattgctggtgatctgggaccttctaccattgtagggagtgcagccttcaacatgttcatcatcattggcatctgtgtctacgtgatcccagacggagagactcgcaagatcaagcatctacgagtcttcttcatcaccgctgcttggagtatctttgcctacatctggctctatatgattctggcagtcttctcccctggtgtggtccaggtttgggaaggcctcctcactctcttcttctttccagtgtgtgtccttctggcctgggtggcagataaacgactgctcttctacaaatacatgcacaaaaagtaccgcacagacaaacaccgaggaattatcatagagacagagggtgaccaccctaagggcattgagatggatgggaaaatgatgaattcccattttctagatgggaacctggtgcccctggaagggaaggaagtggatgagtcccgcagagagatgatccggattctcaaggatctgaagcaaaaacacccagagaaggacttagatcagctggtggagatggccaattactatgctctttcccaccaacagaagagccgtgccttctaccgtatccaagccactcgtatgatgactggtgcaggcaatatcctgaagaaacatgcagcagaacaagccaagaaggcctccagcatgagcgaggtgcacaccgatgagcctgaggactttatttccaaggtcttctttgacccatgttcttaccagtgcctggagaactgtggggctgtactcctgacagtggtgaggaaagggggagacatgtcaaagaccatgtatgtggactacaaaacagaggatggttctgccaatgcaggggctgactatgagttcacagagggcacggtggttctgaagccaggagagacccagaaggagttctccgtgggcataattgatgacgacatttttgaggaggatgaacacttctttgtaaggttgagcaatgtccgcatagaggaggagcagccagaggaggggatgcctccagcaatattcaacagtcttcccttgcctcgggctgtcctagcctccccttgtgtggccacagttaccatcttggatgatgaccatgcaggcatcttcacttttgaatgtgatactattcatgtcagtgagagtattggtgttatggaggtcaaggttctgcggacatcaggtgcccggggtacagtcatcgtcccctttaggacagtagaagggacagccaagggtggcggtgaggactttgaagacacatatggggagttggaattcaagaatgatgaaactgtgaaaaccataagggttaaaatagtagatgaggaggaatacgaaaggcaagagaatttcttcattgcccttggtgaaccgaaatggatggaacgtggaatatcagcgctcctgttatctccagatgtgacagacaggaagctgactatggaagaagaggaggccaagaggatagcagagatgggaaagccagtattgggtgaacaccccaaactagaagtcatcattgaagagtcctatgagttcaagactacggtggacaaactgatcaagaagacaaacctggccttggttgtggggacccattcctggagggaccagttcatggaggccatcaccgtcagtgcagcaggggatgaggatgaggatgaatccggggaggagaggctgccctcctgctttgactacgtcatgcacttcctgactgtcttctggaaggtgctgtttgcctgtgtgccccccacagagtactgccacggctgggcctgcttcgccgtctccatcctcatcattggcatgctcaccgccatcattggggacctggcctcgcacttcggctgcaccattggtctcaaagattcagtcacagctgttgttttcgtggcatttggcacctctgtcccagatacgtttgccagcaaagctgctgccctccaggatgtatatgcagacgcctccattggcaacgtgacgggcagcaacgccgtcaatgtcttcctgggcatcggcctggcctggtccgtggccgccatctactgggctctgcagggacaggagttccacgtgtcggccggcacactggccttctccgtcaccctcttcaccatctttgcatttgtctgcatcagcgtgctcttgtaccgaaggcggccgcacctgggaggggagcttggtggcccccgtggctgcaagctcgccacaacatggctctttgtgagcctgtggctcctctacatactctttgccacactagaggcctattgctacatcaaggggttctaagccacacaacagagcctccagcagggcaggcctaggacttctcctaagagaagggcacttccccaccagtgatctctcccgactgcactgccctggagaggcagcatcaggacctaagccccaggaacttcacccaacttaggccctggcaattaactgaaagggcaaagtcttaatcaatcaaacaatggaggaatcaccgactttacacagtatttaattgaatacaaacaagcaacagcaacaaatccacctccaccccatctccccctcatatccctgacccaaagcaaaggtcagagcctttcgcctccttctattccatcttttgattattcctttgcctctcatttctttggaagcagggtttctcctctctgcccaattccatatgtccctattatctcactcagctgacaagacgtgaaaatgagtcacattcatgtggctggggtggggttcttttttcattgtaatcattattgtggttgctttcgttttgccattaggttttgcttattattttgttttgtcttttttttctgaagtgagtgaaaaaggtgccacaaaggaattccaggtccgagccaacagagagaaacatgaatttttagacacatgctctcctgccacctcttggctccatcaagatccagttccccatctcactgttttctctgagttcttgggaggagtgatggtgttggggtagaaataagctcactcacccacgcagggtactaaagatcttacaggagcttcaactggagcaggaggagctttttatgcttatgttgaatcaagtcagatacaaaaagcaattgtccctctttgcccaagcctttccaattctgtgtgtcttgttgtgtcagtgtccacttgtgtatccttctgcaggaagacccgccaaatagaagagatgggacaaaaataggaatggtgtgtgacgacaaagggctactggaagaacaaaagggatacaggccttcttgattatctttggctttgtacctgaggcaggagagaagagatgtccaaccagtgagatctttaagagaaaagtttgtattttaaatgtcaatgtgcctgagaaatgtcagcttcaccacgctcttgcttcctaatgctctatacaaagagggctgactatatttcttgaagtggtgtaaaaacttagagattttataagagaaccaggggctcccttcacctctcctggtccctcaggtcacatatgaaagcatttttacaagataggaactggaattcctcatttctcccatgttcctgcttgttcttaaacttcatgaagctatttttccagcctatggggtagttcttgctccagtaagaggaatcttagttgtcataatcccttggagcctgggtttttggagaaagagatctccgtgccctacagaccttttctcaacgaatgtgggaaggacctggctttaaaacacgcacacaaacacacaaataaacagacataagatgtcatcacgaaactgcccacggatctttaggctttctgcattgacataaatacattttctaagggggggggggaagaaattaaaaaacacctgttaattttaaacacattttttaagaaaaaaataattaaaaaagaaacagtgctcatgtcataagctatgttgacagttgccagtggaaatgttgggttggttcaaaaaaaaaataaaagctatactatatctctctacata

SEQ ID NO: 184646 - DNA, 2622 bp, Homo sapiens
  Payload ID: 16359
  Gene Symbol: SLC8A3
  Gene Name: solute carrier family 8 (sodium/calcium exchanger), member 3
  Uniprot ID: P57103
  ENST ID: ENST00000394330
  CDS Start-End: 240-1094
cgaaaacctagggaatgacagctagaggcatccagacgataactggcagccaggagggtggataagtcaaaggaaggggtcaaggaaagaggggaaggaaagggaaccatcacttgctgagcctgctgcctgtgctttctcatgtcacccgcacgacaacccaatgtgaatgttatcatctccaggtaactgctgaagaaacggaagctcaaagagatgtgacagacaggaagctgactatggaagaagaggaggccaagaggatagcagagatgggaaagccagtattgggtgaacaccccaaactagaagtcatcattgaagagtcctatgagttcaagactacggtggacaaactgatcaagaagacaaacctggccttggttgtggggacccattcctggagggaccagttcatggaggccatcaccgtcagtgcagcaggggatgaggatgaggatgaatccggggaggagaggctgccctcctgctttgactacgtcatgcacttcctgactgtcttctggaaggtgctgtttgcctgtgtgccccccacagagtactgccacggctgggcctgcttcgccgtctccatcctcatcattggcatgctcaccgccatcattggggacctggcctcgcacttcggctgcaccattggtctcaaagattcagtcacagctgttgttttcgtggcatttggcacctctgtcccagatacgtttgccagcaaagctgctgccctccaggatgtatatgcagacgcctccattggcaacgtgacgggcagcaacgccgtcaatgtcttcctgggcatcggcctggcctggtccgtggccgccatctactgggctctgcagggacaggagttccacgtgtcggccggcacactggccttctccgtcaccctcttcaccatctttgcatttgtctgcatcagcgtgctcttgtaccgaaggcggccgcacctgggaggggagcttggtggcccccgtggctgcaagctcgccacaacatggctctttgtgagcctgtggctcctctacatactctttgccacactagaggcctattgctacatcaaggggttctaagccacacaacagagcctccagcagggcaggcctaggacttctcctaagagaagggcacttccccaccagtgatctctcccgactgcactgccctggagaggcagcatcaggacctaagccccaggaacttcacccaacttaggccctggcaattaactgaaagggcaaagtcttaatcaatcaaacaatggaggaatcaccgactttacacagtatttaattgaatacaaacaagcaacagcaacaaatccacctccaccccatctccccctcatatccctgacccaaagcaaaggtcagagcctttcgcctccttctattccatcttttgattattcctttgcctctcatttctttggaagcagggtttctcctctctgcccaattccatatgtccctattatctcactcagctgacaagacgtgaaaatgagtcacattcatgtggctggggtggggttcttttttcattgtaatcattattgtggttgctttcgttttgccattaggttttgcttattattttgttttgtcttttttttctgaagtgagtgaaaaaggtgccacaaaggaattccaggtccgagccaacagagagaaacatgaatttttagacacatgctctcctgccacctcttggctccatcaagatccagttccccatctcactgttttctctgagttcttgggaggagtgatggtgttggggtagaaataagctcactcacccacgcagggtactaaagatcttacaggagcttcaactggagcaggaggagctttttatgcttatgttgaatcaagtcagatacaaaaagcaattgtccctctttgcccaagcctttccaattctgtgtgtcttgttgtgtcagtgtccacttgtgtatccttctgcaggaagacccgccaaatagaagagatgggacaaaaataggaatggtgtgtgacgacaaagggctactggaagaacaaaagggatacaggccttcttgattatctttggctttgtacctgaggcaggagagaagagatgtccaaccagtgagatctttaagagaaaagtttgtattttaaatgtcaatgtgcctgagaaatgtcagcttcaccacgctcttgcttcctaatgctctatacaaagagggctgactatatttcttgaagtggtgtaaaaacttagagattttataagagaaccaggggctcccttcacctctcctggtccctcaggtcacatatgaaagcatttttacaagataggaactggaattcctcatttctcccatgttcctgcttgttcttaaacttcatgaagctatttttccagcctatggggtagttcttgctccagtaagaggaatcttagttgtcataatcccttggagcctgggtttttggagaaagagatctccgtgccctacagaccttttctcaacgaatgtgggaaggacctggctttaaaacacgcacacaaacacacaaataaacagacataagatgtcatcacgaaactgcccacggatctttaggc

SEQ ID NO: 184647 - DNA, 2840 bp, Homo sapiens
  Payload ID: 16359
  Gene Symbol: SLC8A3
  Gene Name: solute carrier family 8 (sodium/calcium exchanger), member 3
  Uniprot ID: P57103
  ENST ID: ENST00000528359
  CDS Start-End: 63-2840
gtctctggcctatcaggaggacaactggtgctgcaatagaagccagtggctaagtctcgtgtatggcgtggttaaggttgcagcctctcacctctgccttcctccattttgggctggttacctttgtgctcttcctgaatggtcttcgagcagaggctggtggctcaggggacgtgccaagcacagggcagaacaatgagtcctgttcagggtcatcggactgcaaggagggtgtcatcctgccaatctggtacccggagaacccttcccttggggacaagattgccagggtcattgtctattttgtggccctgatatacatgttccttggggtgtccatcattgctgaccgcttcatggcatctattgaagtcatcacctctcaagagagggaggtgacaattaagaaacccaatggagaaaccagcacaaccactattcgggtctggaatgaaactgtctccaacctgacccttatggccctgggttcctctgctcctgagatactcctctctttaattgaggtgtgtggtcatgggttcattgctggtgatctgggaccttctaccattgtagggagtgcagccttcaacatgttcatcatcattggcatctgtgtctacgtgatcccagacggagagactcgcaagatcaagcatctacgagtcttcttcatcaccgctgcttggagtatctttgcctacatctggctctatatgattctggcagtcttctcccctggtgtggtccaggtttgggaaggcctcctcactctcttcttctttccagtgtgtgtccttctggcctgggtggcagataaacgactgctcttctacaaatacatgcacaaaaagtaccgcacagacaaacaccgaggaattatcatagagacagagggtgaccaccctaagggcattgagatggatgggaaaatgatgaattcccattttctagatgggaacctggtgcccctggaagggaaggaagtggatgagtcccgcagagagatgatccggattctcaaggatctgaagcaaaaacacccagagaaggacttagatcagctggtggagatggccaattactatgctctttcccaccaacagaagagccgtgccttctaccgtatccaagccactcgtatgatgactggtgcaggcaatatcctgaagaaacatgcagcagaacaagccaagaaggcctccagcatgagcgaggtgcacaccgatgagcctgaggactttatttccaaggtcttctttgacccatgttcttaccagtgcctggagaactgtggggctgtactcctgacagtggtgaggaaagggggagacatgtcaaagaccatgtatgtggactacaaaacagaggatggttctgccaatgcaggggctgactatgagttcacagagggcacggtggttctgaagccaggagagacccagaaggagttctccgtgggcataattgatgacgacatttttgaggaggatgaacacttctttgtaaggttgagcaatgtccgcatagaggaggagcagccagaggaggggatgcctccagcaatattcaacagtcttcccttgcctcgggctgtcctagcctccccttgtgtggccacagttaccatcttggatgatgaccatgcaggcatcttcacttttgaatgtgatactattcatgtcagtgagagtattggtgttatggaggtcaaggttctgcggacatcaggtgcccggggtacagtcatcgtcccctttaggacagtagaagggacagccaagggtggcggtgaggactttgaagacacatatggggagttggaattcaagaatgatgaaactgtcaaaacaattcacatcaaggtaattgatgatgaggcatatgagaaaaacaagaattacttcattgagatgatgggcccccgcatggtggatatgagttttcagaaagcgctcctgttatctccagacaggaagctgactatggaagaagaggaggccaagaggatagcagagatgggaaagccagtattgggtgaacaccccaaactagaagtcatcattgaagagtcctatgagttcaagactacggtggacaaactgatcaagaagacaaacctggccttggttgtggggacccattcctggagggaccagttcatggaggccatcaccgtcagtgcagcaggggatgaggatgaggatgaatccggggaggagaggctgccctcctgctttgactacgtcatgcacttcctgactgtcttctggaaggtgctgtttgcctgtgtgccccccacagagtactgccacggctgggcctgcttcgccgtctccatcctcatcattggcatgctcaccgccatcattggggacctggcctcgcacttcggctgcaccattggtctcaaagattcagtcacagctgttgttttcgtggcatttggcacctctgtcccagatacgtttgccagcaaagctgctgccctccaggatgtatatgcagacgcctccattggcaacgtgacgggcagcaacgccgtcaatgtcttcctgggcatcggcctggcctggtccgtggccgccatctactgggctctgcagggacaggagttccacgtgtcggccggcacactggccttctccgtcaccctcttcaccatctttgcatttgtctgcatcagcgtgctcttgtaccgaaggcggccgcacctgggaggggagcttggtggcccccgtggctgcaagctcgccacaacatggctctttgtgagcctgtggctcctctacatactctttgccacactagaggcctattgctacatcaaggggttctaa

SEQ ID NO: 184648 - DNA, 5146 bp, Homo sapiens
  Payload ID: 16359
  Gene Symbol: SLC8A3
  Gene Name: solute carrier family 8 (sodium/calcium exchanger), member 3
  Uniprot ID: P57103
  ENST ID: ENST00000494208
  CDS Start-End: 755-2617
cggcgctgtctcccagctgatagggtgacgttccgtttggaggcttggagattggctttttgatttggcttcttccggcagcttaatgggcaaagctctccgctcgcccagaaaccagcctctccgcgcgtcccctctgcgcgcggcgaggccgagacgtctcccgcggtgacagcgtgcaaggcggagacccggcgcgctcccagcccagggaaagcccaggcgacgcgaccgcaagcccgagcccaggtccctcggagccgccagggcgcgccgggctgcttgccttcctgccccttcctgcaggaatcccccgccgcccgcggccgggactccgggcctctcccgggcgtagattccagtcaccgctctgggtcggggtttccctctttctgaaatccgtgcggaaggacccctcccggggcccctcgccctggccccagacaccctccctcccagaccccgcgctccagatgcgctgccccgcagctccctgacagctgcgagcccacgaaccccggcgggagggcggcggcggcggactgacatgccccggacgcggctgcggccggcgggcagcccgcgggggcgatgagccgctgcgaccggtgaggcgccgggcggcgggggcatcgcgtaccttcctcacccccctcccttgcccactccgctcgggaggccgagaggaaacggtctctggcctatcaggaggacaactggtgctgcaatagaagccagtggctaagtctcgtgtatggcgtggttaaggttgcagcctctcacctctgccttcctccattttgggctggttacctttgtgctcttcctgaatggtcttcgagcagaggctggtggctcaggggacgtgccaagcacagggcagaacaatgagtcctgttcagggtcatcggactgcaaggagggtgtcatcctgccaatctggtacccggagaacccttcccttggggacaagattgccagggtcattgtctattttgtggccctgatatacatgttccttggggtgtccatcattgctgaccgcttcatggcatctattgaagtcatcacctctcaagagagggaggtgacaattaagaaacccaatggagaaaccagcacaaccactattcgggtctggaatgaaactgtctccaacctgacccttatggccctgggttcctctgctcctgagatactcctctctttaattgaggtgtgtggtcatgggttcattgctggtgatctgggaccttctaccattgtagggagtgcagccttcaacatgttcatcatcattggcatctgtgtctacgtgatcccagacggagagactcgcaagatcaagcatctacgagtcttcttcatcaccgctgcttggagtatctttgcctacatctggctctatatgattctggcagtcttctcccctggtgtggtccaggtttgggaaggcctcctcactctcttcttctttccagtgtgtgtccttctggcctgggtggcagataaacgactgctcttctacaaatacatgcacaaaaagtaccgcacagacaaacaccgaggaattatcatagagacagagggtgaccaccctaagggcattgagatggatgggaaaatgatgaattcccattttctagatgggaacctggtgcccctggaagggaaggaagtggatgagtcccgcagagagatgatccggattctcaaggatctgaagcaaaaacacccagagaaggacttagatcagctggtggagatggccaattactatgctctttcccaccaacagaagagccgtgccttctaccgtatccaagccactcgtatgatgactggtgcaggcaatatcctgaagaaacatgcagcagaacaagccaagaaggcctccagcatgagcgaggtgcacaccgatgagcctgaggactttatttccaaggtcttctttgacccatgttcttaccagtgcctggagaactgtggggctgtactcctgacagtggtgaggaaagggggagacatgtcaaagaccatgtatgtggactacaaaacagaggatggttctgccaatgcaggggctgactatgagttcacagagggcacggtggttctgaagccaggagagacccagaaggagttctccgtgggcataattgatgacgacatttttgaggaggatgaacacttctttgtaaggttgagcaatgtccgcatagaggaggagcagccagaggaggggatgcctccagcaatattcaacagtcttcccttgcctcgggctgtcctagcctccccttgtgtggccacagttaccatcttggatgatgaccatgcaggcatcttcacttttgaatgtgatactattcatgtcagtgagagtattggtgttatggaggtcaaggttctgcggacatcaggtgcccggggtacagtcatcgtcccctttaggacagtagaagggacagccaagggtggcggtgaggactttgaagacacatatggggagttggaattcaagaatgatgaaactgtatgtgacagacaggaagctgactatggaagaagaggaggccaagaggatagcagagatgggaaagccagtattgggtgaacaccccaaactagaagtcatcattgaagagtcctatgagttcaagactacggtggacaaactgatcaagaagacaaacctggccttggttgtggggacccattcctggagggaccagttcatggaggccatcaccgtcagtgcagcaggggatgaggatgaggatgaatccggggaggagaggctgccctcctgctttgactacgtcatgcacttcctgactgtcttctggaaggtgctgtttgcctgtgtgccccccacagagtactgccacggctgggcctgcttcgccgtctccatcctcatcattggcatgctcaccgccatcattggggacctggcctcgcacttcggctgcaccattggtctcaaagattcagtcacagctgttgttttcgtggcatttggcacctctgtcccagatacgtttgccagcaaagctgctgccctccaggatgtatatgcagacgcctccattggcaacgtgacgggcagcaacgccgtcaatgtcttcctgggcatcggcctggcctggtccgtggccgccatctactgggctctgcagggacaggagttccacgtgtcggccggcacactggccttctccgtcaccctcttcaccatctttgcatttgtctgcatcagcgtgctcttgtaccgaaggcggccgcacctgggaggggagcttggtggcccccgtggctgcaagctcgccacaacatggctctttgtgagcctgtggctcctctacatactctttgccacactagaggcctattgctacatcaaggggttctaagccacacaacagagcctccagcagggcaggcctaggacttctcctaagagaagggcacttccccaccagtgatctctcccgactgcactgccctggagaggcagcatcaggacctaagccccaggaacttcacccaacttaggccctggcaattaactgaaagggcaaagtcttaatcaatcaaacaatggaggaatcaccgactttacacagtatttaattgaatacaaacaagcaacagcaacaaatccacctccaccccatctccccctcatatccctgacccaaagcaaaggtcagagcctttcgcctccttctattccatcttttgattattcctttgcctctcatttctttggaagcagggtttctcctctctgcccaattccatatgtccctattatctcactcagctgacaagacgtgaaaatgagtcacattcatgtggctggggtggggttcttttttcattgtaatcattattgtggttgctttcgttttgccattaggttttgcttattattttgttttgtcttttttttctgaagtgagtgaaaaaggtgccacaaaggaattccaggtccgagccaacagagagaaacatgaatttttagacacatgctctcctgccacctcttggctccatcaagatccagttccccatctcactgttttctctgagttcttgggaggagtgatggtgttggggtagaaataagctcactcacccacgcagggtactaaagatcttacaggagcttcaactggagcaggaggagctttttatgcttatgttgaatcaagtcagatacaaaaagcaattgtccctctttgcccaagcctttccaattctgtgtgtcttgttgtgtcagtgtccacttgtgtatccttctgcaggaagacccgccaaatagaagagatgggacaaaaataggaatggtgtgtgacgacaaagggctactggaagaacaaaagggatacaggccttcttgattatctttggctttgtacctgaggcaggagagaagagatgtccaaccagtgagatctttaagagaaaagtttgtattttaaatgtcaatgtgcctgagaaatgtcagcttcaccacgctcttgcttcctaatgctctatacaaagagggctgactatatttcttgaagtggtgtaaaaacttagagattttataagagaaccaggggctcccttcacctctcctggtccctcaggtcacatatgaaagcatttttacaagataggaactggaattcctcatttctcccatgttcctgcttgttcttaaacttcatgaagctatttttccagcctatggggtagttcttgctccagtaagaggaatcttagttgtcataatcccttggagcctgggtttttggagaaagagatctccgtgccctacagaccttttctcaacgaatgtgggaaggacctggctttaaaacacgcacacaaacacacaaataaacagacataagatgtcatcacgaaactgcccacggatctttaggctttctgcattgacataaatacattttctaagggggggggggaagaaattaaaaaacacctgttaattttaaacacattttttaagaaaaaaataattaaaaaagaaacagtgctcatgtcataagctatgttgacagttgccagtggaaatgttgggttggttcaaaaaaaaaataaaagctatactatatctctctacata

SEQ ID NO: 184649 - DNA, 2837 bp, Homo sapiens
  Payload ID: 16359
  Gene Symbol: SLC8A3
  Gene Name: solute carrier family 8 (sodium/calcium exchanger), member 3
  Uniprot ID: P57103
  ENST ID: ENST00000534137
  CDS Start-End: 63-2837
gtctctggcctatcaggaggacaactggtgctgcaatagaagccagtggctaagtctcgtgtatggcgtggttaaggttgcagcctctcacctctgccttcctccattttgggctggttacctttgtgctcttcctgaatggtcttcgagcagaggctggtggctcaggggacgtgccaagcacagggcagaacaatgagtcctgttcagggtcatcggactgcaaggagggtgtcatcctgccaatctggtacccggagaacccttcccttggggacaagattgccagggtcattgtctattttgtggccctgatatacatgttccttggggtgtccatcattgctgaccgcttcatggcatctattgaagtcatcacctctcaagagagggaggtgacaattaagaaacccaatggagaaaccagcacaaccactattcgggtctggaatgaaactgtctccaacctgacccttatggccctgggttcctctgctcctgagatactcctctctttaattgaggtgtgtggtcatgggttcattgctggtgatctgggaccttctaccattgtagggagtgcagccttcaacatgttcatcatcattggcatctgtgtctacgtgatcccagacggagagactcgcaagatcaagcatctacgagtcttcttcatcaccgctgcttggagtatctttgcctacatctggctctatatgattctggcagtcttctcccctggtgtggtccaggtttgggaaggcctcctcactctcttcttctttccagtgtgtgtccttctggcctgggtggcagataaacgactgctcttctacaaatacatgcacaaaaagtaccgcacagacaaacaccgaggaattatcatagagacagagggtgaccaccctaagggcattgagatggatgggaaaatgatgaattcccattttctagatgggaacctggtgcccctggaagggaaggaagtggatgagtcccgcagagagatgatccggattctcaaggatctgaagcaaaaacacccagagaaggacttagatcagctggtggagatggccaattactatgctctttcccaccaacagaagagccgtgccttctaccgtatccaagccactcgtatgatgactggtgcaggcaatatcctgaagaaacatgcagcagaacaagccaagaaggcctccagcatgagcgaggtgcacaccgatgagcctgaggactttatttccaaggtcttctttgacccatgttcttaccagtgcctggagaactgtggggctgtactcctgacagtggtgaggaaagggggagacatgtcaaagaccatgtatgtggactacaaaacagaggatggttctgccaatgcaggggctgactatgagttcacagagggcacggtggttctgaagccaggagagacccagaaggagttctccgtgggcataattgatgacgacatttttgaggaggatgaacacttctttgtaaggttgagcaatgtccgcatagaggaggagcagccagaggaggggatgcctccagcaatattcaacagtcttcccttgcctcgggctgtcctagcctccccttgtgtggccacagttaccatcttggatgatgaccatgcaggcatcttcacttttgaatgtgatactattcatgtcagtgagagtattggtgttatggaggtcaaggttctgcggacatcaggtgcccggggtacagtcatcgtcccctttaggacagtagaagggacagccaagggtggcggtgaggactttgaagacacatatggggagttggaattcaagaatgatgaaactgtgaaaaccataagggttaaaatagtagatgaggaggaatacgaaaggcaagagaatttcttcattgcccttggtgaaccgaaatggatggaacgtggaatatcagcgctcctgttatctccagacaggaagctgactatggaagaagaggaggccaagaggatagcagagatgggaaagccagtattgggtgaacaccccaaactagaagtcatcattgaagagtcctatgagttcaagactacggtggacaaactgatcaagaagacaaacctggccttggttgtggggacccattcctggagggaccagttcatggaggccatcaccgtcagtgcagcaggggatgaggatgaggatgaatccggggaggagaggctgccctcctgctttgactacgtcatgcacttcctgactgtcttctggaaggtgctgtttgcctgtgtgccccccacagagtactgccacggctgggcctgcttcgccgtctccatcctcatcattggcatgctcaccgccatcattggggacctggcctcgcacttcggctgcaccattggtctcaaagattcagtcacagctgttgttttcgtggcatttggcacctctgtcccagatacgtttgccagcaaagctgctgccctccaggatgtatatgcagacgcctccattggcaacgtgacgggcagcaacgccgtcaatgtcttcctgggcatcggcctggcctggtccgtggccgccatctactgggctctgcagggacaggagttccacgtgtcggccggcacactggccttctccgtcaccctcttcaccatctttgcatttgtctgcatcagcgtgctcttgtaccgaaggcggccgcacctgggaggggagcttggtggcccccgtggctgcaagctcgccacaacatggctctttgtgagcctgtggctcctctacatactctttgccacactagaggcctattgctacatcaaggggttctaa

SEQ ID NO: 184650 - DNA, 3409 bp, Homo sapiens
  Payload ID: 16359
  Gene Symbol: SLC8A3
  Gene Name: solute carrier family 8 (sodium/calcium exchanger), member 3
  ENST ID: ENST00000533541
  CDS Start-End: 240-872
cgaaaacctagggaatgacagctagaggcatccagacgataactggcagccaggagggtggataagtcaaaggaaggggtcaaggaaagaggggaaggaaagggaaccatcacttgctgagcctgctgcctgtgctttctcatgtcacccgcacgacaacccaatgtgaatgttatcatctccaggtaactgctgaagaaacggaagctcaaagagatgtgacagacaggaagctgactatggaagaagaggaggccaagaggatagcagagatgggaaagccagtattgggtgaacaccccaaactagaagtcatcattgaagagtcctatgagttcaagactacggtggacaaactgatcaagaagacaaacctggccttggttgtggggacccattcctggagggaccagttcatggaggccatcaccgtcagtgcagcaggggatgaggatgaggatgaatccggggaggagaggctgccctcctgctttgactacgtcatgcacttcctgactgtcttctggaaggtgctgtttgcctgtgtgccccccacagagtactgccacggctgggcctgcttcgccgtctccatcctcatcattggcatgctcaccgccatcattggggacctggcctcgcacttcggctgcaccattggtctcaaagattcagtcacagctgttgttttcgtggcatttggcacctctgtcccaggtgagagtgagaggtgcttgaatttgcaaagaggattttacctggttcaaatgacccctggactccatctcattatcttccacaccatctcagatctgaacttaacagagcctctgcccttaaagtgcacaaaagtcaatcaaagagatgaataatgacattagtaatgacagctaatatttcttgagcactttcaatgtgacagacaccatgtgtgttcagcaatttacacatttacattttccccctgtaatgtttcccaaagccctattaaatagggtaagttattatccccacttcacagacaaagaaactgaggcccacagaggttaagctacatgcccaagtaagtggtccaatttcttaacctccacattatgtgagtagaccacaaacagtgaaattaaaagaatgtagatattgttctccttctatttacctctggcgatctctgagaggttaaagattagccagctcaaagatatcaaaggagaaatgcccacatacattcttggcctcctctacttggaaggacactgtgagtacaaagtatctcctagcaggacagccaaaggaagttccacagcttttatctttttataggatgaattacatactctttctttttcttaggaacactcagagacaaacagaaaggagcggacattcctttactcattgaacaaatatttactgagcacctattatgcctgttacagtattgtgctagtttttgggactatagtgaaaggcaagatacacatgcttccttctccacgtggagtttataatctactgaaggaggcaactctcaactactgtaattaaagttatcttgttaaatcctaggaagaaaaagaaaaggtactgcatacggaaggaagttgggcctgaatgtaggagttagcaggtagacaggggctgcactagcccaggttctttacttaattcagttaggggctttggggcctctgaactctgaacttctgccagggagctggcatcccagttgccccagaaagaaacagagcacatcctcctgcagggaagttaggctgaatctcatcagacaggacttttctggctgggccaagggaaatctttcctgtaccaagcaaacatatccttcaagagagtagctgaattcacatcaaattctaggaaaacctctttccaaaaccccagcgcaggccagcggtattatttgtccattagtgatgcaagagatttagctatcgtggaaatgcatcagaaggttggaaattagatggatgatcccaggaaggcctgtggatgagatgccctgtgatctctgttctccaagccttgggggacctgaactatcagaggggagggaggaaatatgggggaaagcatagaggtgggaagaaatatcagaggatcagaagcaaaaaacaacaataacaacagaaacaaaaacaaacaaacaaacaaaaaaacaaggccataggcaagaaagggtaagaggttttctctgggagatctaaaaaaaatggcaataatgaggtaagccaggcagatacctttgggcatctccaagtccttgcaattggccaagacaacagctaacaacatttgaggctttaagaaggttaccctgtgatccactcatctgatttagtggctttggctgaagctctttggatatagttgaaggtatggaaagggtccttacatgaggactttagggtcaagtctcttgctaacatcctatgtgaccttgggtaaattctttgacccttatttttcttacctgtaaaataaaagaattgggctagatgtctctgacagtcctccctgtatctacaatctgtgccaagatctaaagtcaaacaccctgcaaggccctgtgatacatatataaaccacaaagacagagccccgtcttccttgagtccacagttcaccctgcatgtccccatcatggttccccaacatgtcctctgtccccaaaatccagcacctcacccagtgctcaatcagtaggcattgctcaataactgttggtggttcgtgaataaatgccccatatgacagttaaaatcaggcatctactccaagcagcttcccagggtgtcaaggttccctggggagatattatgggatggcaaacttcccttactgaaaaagtagtcaaaggagaacaataagcccactcagtaaatatcagaactggaaagcccttcagaatctttcagatcactgcagatgaggaatgggaagcccagactagggatgtgacctacccagggccacacggcttgcttgcggcagaactaggagttaggagtggccccctagcccttgtctctcattcctgggttcagcccaccagctcaagctgctttttgggcatactggaagacaagccctgcacaccttagcctcctaccagttcccatgtgtctttgtccttttccagatacgtttgccagcaaagctgctgccctccaggatgtatatgcagacgcctccattggcaacgtgacgggcagcaacgccgtcaatgtcttcctgggcatcggcctggcctggtccgtggccgccatctactgggctctgcagggacaggagttccacgtgtcggccggcacactggccttctccgtcaccctcttcaccatctttgcatttgtctgcatcagcgtgctcttgtaccgaaggcggccgc

SEQ ID NO: 184651 - DNA, 2975 bp, Homo sapiens
  Payload ID: 16360
  Gene Symbol: SLC8B1
  Gene Name: solute carrier family 8 (sodium/lithium/calcium exchanger), member B1
  Uniprot ID: Q6J4K2
  ENST ID: ENST00000202831
  CDS Start-End: 211-1965
cagcaggcggggcacccggactggcggcttcgctggcgcaaggtcggtccggcggccagggacctggaaggctgcgaggccctgcgaggtcgaggttcggagtttgctggtcccaggcccggcccgaggccaccggagccgccagctgtttggaactgagctactgcagaaagggaagtggagagtaagggccaggccccgtgggggcagatggccggcagaaggctgaatctgcgctgggcactgagtgtgctttgtgtgctgctaatggcggagacagtgtctgggactaggggctcgtctacaggagctcacattagcccccagtttccagcttcaggtgtgaaccagacccccgtggtagactgccgcaaggtgtgtggcctgaatgtctctgaccgctgtgacttcatccggaccaaccctgactgccacagtgatggggggtacctggactacctggaaggcatcttctgccacttccctcccagcctcctccctctggctgtcactctctacgtttcctggctgctctacctgtttctgattctgggagtcaccgcagccaagtttttctgccccaacttgtcggccatttctaccacactgaagctctcccacaacgtggcaggcgtcaccttcctggcatttgggaatggtgcacctgacatcttcagtgccctggtggccttctctgacccgcacacagccggcctggcccttggggcactgtttggcgctggcgtgctggttaccacagtggtggccggaggcattaccatcctacaccccttcatggctgcctccaggcccttcttcagggacatcgttttctacatggtggctgtgttcctgaccttcctcatgctcttccgtggcagggtcaccctggcatgggctctgggttacctgggcttgtatgtgttctatgtggtcactgtgattctctgcacctggatctaccaacggcaacggagaggatctctgttctgccccatgccagttactccagagatcctctcagactccgaggaggaccgggtatcttctaataccaacagctatgactacggtgatgagtaccggccgctgttcttctaccaggagaccacggctcagatcctggtccgggccctcaatcccctggattacatgaagtggagaaggaaatcagcatactggaaagccctcaaggtgttcaagctgcctgtggagttcctgctgctcctcacagtccccgtcgtggacccggacaaggatgaccagaactggaaacggcccctcaactgtctgcatctggttatcagccccctggttgtggtcctgaccctgcagtcggggacctatggtgtctatgagataggcggcctcgttcccgtctgggtcgtggtggtgatcgcaggcacagccttggcttcagtgaccttttttgccacatctgacagccagccccccaggcttcactggctctttgctttcctgggctttctgaccagcgccctgtggatcaacgcggccgccacagaggtggtgaacatcttgcggtccctgggtgtggtcttccggctgagcaacactgtgctggggctcacgctgctggcctgggggaacagcattggagatgccttctcggatttcacactggctcgccagggctacccacggatggcgttctccgcctgctttggcggcatcatcttcaacatcctcgtgggtgtggggctgggctgcctgctccagatctcccgaagccacacagaagtgaagctggagccagacggactgctggtgtgggtcctggcaggcgccctggggctcagcctcgtcttctccctggtctcagtcccattgcagtgcttccagctcagcagagtctatggcttctgcctgctcctcttctacctgaacttccttgtcgtggccctcctcactgaatttggagtgattcacctgaaaagcatgtgactgaagccgcttagtgctgtggcctcactgcaggcaggagccccgcccctcctgccgggggaggcccagggaccggagcatttctgcaaggcccttgtgggcacgagagtgcggcccttgctgctggagatctgaggtcactgctgtgagctgggagaactgctgtgtacctcttgctgccagcacccaacagccttgccgtggggaccttggaaacctggctttgctctggacaaagggttccagagagaagctagaagtcccccttgaatgacccccagagcccctctgagaagggctggagtttgggggaaggggatggctggatgtgctccaggccatgctggaggtacccccgaggcacaggcactgcccgttccccttgcctgggcttcaggccttctggcaccttctcaggacacaagtggctgcccaaccctgactcagagaatgagggtggcttggacccctgggaatcaggccgccgagggctgagctccagagccgcaccatctgccacaaacagaattcgagacatacttaattttgaatttctccttgccacgttaataaagccaaaagcagcgggtgctattcgtggcaacacacttcactgaacccacttgcttccaaaacgatgccagcccgaggcactgctacgccagcagctgccacatgggatggtggctcaggcgctccctccaggattctgcccctgcctgtccacagactcctttgtgctggaacctgggctcctccagctgccaggcaggagtcggtaggactgtgcctgtgcctccctcagcggggccctgggcggggttccaaggcctgcgagctgggaaaggacagatgaggggacctcgtgccttcttgctgtcatgcaatgaccccgccttatgttgccgaaataagcaactcttaggtttgcctgactgccttatgctggtaaagaaaagggattcaactgtctcttttccaaataaaaaaaaagtcaaaatttcaagtgt

SEQ ID NO: 184652 - DNA, 3289 bp, Homo sapiens
  Payload ID: 16360
  Gene Symbol: SLC8B1
  Gene Name: solute carrier family 8 (sodium/lithium/calcium exchanger), member B1
  Uniprot ID: Q6J4K2
  ENST ID: ENST00000552014
  CDS Start-End: 517-2271
cgaggttcggagtttgctggtcccaggcccggcccgagcaggtcggcgaccatccgagcgctgggcatcggcccacgcgtacagaaggcgctcaataaatgctcactagtgaatcagtaaaataaatcggcagcaaagagagacgagacgcatgctgatcttcaggtgttggggacatcagggacgcgaacatttattgagctcttattgtataccgcgtcggccagcatttgtgtccatttcacacatgaggaataagaggcccagagaggtgaagtgacttccttaaggccacacagatagtaagtggccgagacgaatttgaaaccaggggtgtcctgtttgaacttggtgccaaatagagtaactcggactccagttggaggggttcgggagaaccatagaagaggaagggccgtgtcttccgtggacaggccaccggagccgccagctgtttggaactgagctactgcagaaagggaagtggagagtaagggccaggccccgtgggggcagatggccggcagaaggctgaatctgcgctgggcactgagtgtgctttgtgtgctgctaatggcggagacagtgtctgggactaggggctcgtctacaggagctcacattagcccccagtttccagcttcaggtgtgaaccagacccccgtggtagactgccgcaaggtgtgtggcctgaatgtctctgaccgctgtgacttcatccggaccaaccctgactgccacagtgatggggggtacctggactacctggaaggcatcttctgccacttccctcccagcctcctccctctggctgtcactctctacgtttcctggctgctctacctgtttctgattctgggagtcaccgcagccaagtttttctgccccaacttgtcggccatttctaccacactgaagctctcccacaacgtggcaggcgtcaccttcctggcatttgggaatggtgcacctgacatcttcagtgccctggtggccttctctgacccgcacacagccggcctggcccttggggcactgtttggcgctggcgtgctggttaccacagtggtggccggaggcattaccatcctacaccccttcatggctgcctccaggcccttcttcagggacatcgttttctacatggtggctgtgttcctgaccttcctcatgctcttccgtggcagggtcaccctggcatgggctctgggttacctgggcttgtatgtgttctatgtggtcactgtgattctctgcacctggatctaccaacggcaacggagaggatctctgttctgccccatgccagttactccagagatcctctcagactccgaggaggaccgggtatcttctaataccaacagctatgactacggtgatgagtaccggccgctgttcttctaccaggagaccacggctcagatcctggtccgggccctcaatcccctggattacatgaagtggagaaggaaatcagcatactggaaagccctcaaggtgttcaagctgcctgtggagttcctgctgctcctcacagtccccgtcgtggacccggacaaggatgaccagaactggaaacggcccctcaactgtctgcatctggttatcagccccctggttgtggtcctgaccctgcagtcggggacctatggtgtctatgagataggcggcctcgttcccgtctgggtcgtggtggtgatcgcaggcacagccttggcttcagtgaccttttttgccacatctgacagccagccccccaggcttcactggctctttgctttcctgggctttctgaccagcgccctgtggatcaacgcggccgccacagaggtggtgaacatcttgcggtccctgggtgtggtcttccggctgagcaacactgtgctggggctcacgctgctggcctgggggaacagcattggagatgccttctcggatttcacactggctcgccagggctacccacggatggcgttctccgcctgctttggcggcatcatcttcaacatcctcgtgggtgtggggctgggctgcctgctccagatctcccgaagccacacagaagtgaagctggagccagacggactgctggtgtgggtcctggcaggcgccctggggctcagcctcgtcttctccctggtctcagtcccattgcagtgcttccagctcagcagagtctatggcttctgcctgctcctcttctacctgaacttccttgtcgtggccctcctcactgaatttggagtgattcacctgaaaagcatgtgactgaagccgcttagtgctgtggcctcactgcaggcaggagccccgcccctcctgccgggggaggcccagggaccggagcatttctgcaaggcccttgtgggcacgagagtgcggcccttgctgctggagatctgaggtcactgctgtgagctgggagaactgctgtgtacctcttgctgccagcacccaacagccttgccgtggggaccttggaaacctggctttgctctggacaaagggttccagagagaagctagaagtcccccttgaatgacccccagagcccctctgagaagggctggagtttgggggaaggggatggctggatgtgctccaggccatgctggaggtacccccgaggcacaggcactgcccgttccccttgcctgggcttcaggccttctggcaccttctcaggacacaagtggctgcccaaccctgactcagagaatgagggtggcttggacccctgggaatcaggccgccgagggctgagctccagagccgcaccatctgccacaaacagaattcgagacatacttaattttgaatttctccttgccacgttaataaagccaaaagcagcgggtgctattcgtggcaacacacttcactgaacccacttgcttccaaaacgatgccagcccgaggcactgctacgccagcagctgccacatgggatggtggctcaggcgctccctccaggattctgcccctgcctgtccacagactcctttgtgctggaacctgggctcctccagctgccaggcaggagtcggtaggactgtgcctgtgcctccctcagcggggccctgggcggggttccaaggcctgcgagctgggaaaggacagatgaggggacctcgtgccttcttgctgtcatgcaatgaccccgccttatgttgccgaaataagcaactcttaggtttgcctgactgccttatgctggtaaagaaaagggattcaactgtctcttttccaaataaaaaaaaagtcaaaatttcaagtgtagagaaaa

SEQ ID NO: 184653 - DNA, 647 bp, Homo sapiens
  Payload ID: 16360
  Gene Symbol: SLC8B1
  Gene Name: solute carrier family 8 (sodium/lithium/calcium exchanger), member B1
  ENST ID: ENST00000552613
  CDS Start-End: 254-415
ccagagaggtgaagtgacttccttaaggccacacagatagtaagtggccgagacgaatttgaaaccaggggtgtcctgtttgaacttggtgccaaatagagtaactcggactccagttggaggggttcgggagaaccatagaagaggaagggccgtgtcttccgtggacaggccaccggagccgccagctgtttggaactgagctactgcagaaagggaagtggagagtaagggccaggccccgtgggggcagatggccggcagaaggctgaatctgcgctgggcactgagtgtgctttgtgtgctgctaatggcggagacagtgtctgggactaggggctcgtctacaggagctcacattagcccccagtttccagcttcagtgccgcaaggtgtgtggcctgaatgtctctgaccgctgtgacttcatccggaccaaccctgactgccacagtgatggggggtacctggactacctggaaggcatcttctgccacttccctcccagcctcctccctctggctgtcactctctacgtttcctggctgctctacctgtttctgattctgggagtcaccgcagccaagtttttctgccccaacttgtcggccatttctaccacactgaagctctcccacaacgtggca

SEQ ID NO: 184654 - DNA, 2493 bp, Homo sapiens
  Payload ID: 16360
  Gene Symbol: SLC8B1
  Gene Name: solute carrier family 8 (sodium/lithium/calcium exchanger), member B1
  ENST ID: ENST00000550047
  CDS Start-End: 1198-1497
tgtttagtgcttaatgattttttaaaattttagtttttacttttggaaactcaatgaatgtaccaaccgaagggtgttgaattttcagcaaatggatcatttagggaagttgccttttactacttagggaaaattgtctttcactgttttttcaagtaccgacgtgtgccacaacatggatcacccttgaaaacatgatgctgagtgagagaagactgtagcagaggatcacacactgtggcattccattgatgtgaaatgtccacgaggcacattcagagagacagagagcagagtagtggtcgagttgggctggtggggtggggctagggagtgaccgctaatgagtacagggatacttattgggatgatgggtggtatttggttcatagactggaaatctgatgaaagtgataaggaaccctttccagacaaaataatatttttttttagtatatgaaagggaggtttttttgtttttattttttttcttttttcgagacagagtctcactcagtcgcccaggctagagtacactggcatgatctaggctcactgcaacttctgcctcccgggttcaagcgattctcccacctcagcctctcgagtagctgggattacaggtgtgtgacaccagcctgactaatttttgtatttttagtagagacaaggtttcaccatgttggccaagttggtctcgaactcctgacctcaggtgatctgcccgcctcggcctcccaaagtgctgcgattacaggcggtgagccaccgtgcccggcctgaaagggagtttattaaggaaaaaagaaaataatattgaactcacgttttattgagcactaactttgcacaggcaccaatgcatatagtaacgtgttttatactcataataagctcatgaggtagatactgttatcatcccgtttcacaggtgaggaactgaggctgtgttcctgttggggctggccttggtcccacagcaaaccattccctccgcagctctttgctttcctgggctttctgaccagcgccctgtggatcaacgcggccgccacagaggtggtgaacatcttgcggtccctgggtgtggtcttccggctgagcaacactgtgctggggctcacgctgctggcctgggggaacagcattggagatgccttctcggatttcacactggctcgccagggctacccacggatggcgttctccgcctgctttggcggcatcatcttcaacatcctcgtgggtgtggggctgggctgcctgctccagatctcccgaagccacacagaagtgaagctggagccagacggactgctggtgtgggtcctggcaggcgccctggggctcagcctcgtcttctccctggtctcagtcccattgcagtgcttccagctcagcagagtctatggcttctgcctgctcctcttctacctgaacttccttgtcgtggccctcctcactgaatttggagtgattcacctgaaaagcatgtgactgaagccgcttagtgctgtggcctcactgcaggcaggagccccgcccctcctgccgggggaggcccagggaccggagcatttctgcaaggcccttgtgggcacgagagtgcggcccttgctgctggagatctgaggtcactgctgtgagctgggagaactgctgtgtacctcttgctgccagcacccaacagccttgccgtggggaccttggaaacctggctttgctctggacaaagggttccagagagaagctagaagtcccccttgaatgacccccagagcccctctgagaagggctggagtttgggggaaggggatggctggatgtgctccaggccatgctggaggtacccccgaggcacaggcactgcccgttccccttgcctgggcttcaggccttctggcaccttctcaggacacaagtggctgcccaaccctgactcagagaatgagggtggcttggacccctgggaatcaggccgccgagggctgagctccagagccgcaccatctgccacaaacagaattcgagacatacttaattttgaatttctccttgccacgttaataaagccaaaagcagcgggtgctattcgtggcaacacacttcactgaacccacttgcttccaaaacgatgccagcccgaggcactgctacgccagcagctgccacatgggatggtggctcaggcgctccctccaggattctgcccctgcctgtccacagactcctttgtgctggaacctgggctcctccagctgccaggcaggagtcggtaggactgtgcctgtgcctccctcagcggggccctgggcggggttccaaggcctgcgagctgggaaaggacagatgaggggacctcgtgccttcttgctgtcatgcaatgaccccgccttatgttgccgaaataagcaactcttaggtttgcctgactgccttatgctggtaaagaaaagggattcaactgtctcttttccaaataaaaaaaaagtc

SEQ ID NO: 184655 - DNA, 555 bp, Homo sapiens
  Payload ID: 16360
  Gene Symbol: SLC8B1
  Gene Name: solute carrier family 8 (sodium/lithium/calcium exchanger), member B1
  ENST ID: ENST00000549372
  CDS Start-End: 247-555
aagacaagggaggagcagagccctagcaggatactaaatgggtctatgtgactttagggaccctctgcttttggactagcctggaacccaggttcagtcctgctgacctggcactggaagggaggcagggtgctggcacccacgagcaagccacagccaagcaggccaccggagccgccagctgtttggaactgagctactgcagaaagggaagtggagagtaagggccaggccccgtgggggcagatggccggcagaaggctgaatctgcgctgggcactgagtgtgctttgtgtgctgctaatggcggagacagtgtctgggactaggggctcgtctacaggagctcacattagcccccagtttccagcttcaggtgtgaaccagacccccgtggtagactgccgcaaggtgtgtggcctgaatgtctctgaccgctgtgacttcatccggaccaaccctgactgccacagtgatggggggtacctggactacctggaaggcatcttctgccacttccctcccagcctcctccctctggctgtcactctctac

SEQ ID NO: 184656 - DNA, 925 bp, Homo sapiens
  Payload ID: 16360
  Gene Symbol: SLC8B1
  Gene Name: solute carrier family 8 (sodium/lithium/calcium exchanger), member B1
  ENST ID: ENST00000549181
  CDS Start-End: 232-925
agagtaggggcccggacgctgcagcaggcggggcacccggactggcggcttcgctggcgcaaggtcggtccggcggccagggacctggaaggctgcgaggccctgcgaggtcgaggttcggagtttgctggtcccaggcccggcccgaggccaccggagccgccagctgtttggaactgagctactgcagaaagggaagtggagagtaagggccaggccccgtgggggcagatggccggcagaaggctgaatctgcgctgggcactgagtgtgctttgtgtgctgctaatggcggagacagtgtctgggactaggggctcgtctacaggagctcacattagcccccagtttccagcttcaggtgtgaaccagacccccgtggtagactgccgcaaggtgtgtggcctgaatgtctctgaccgctgtgacttcatccggaccaaccctgactgccacagtgatggggggtacctggactacctggaaggcatcttctgccacttccctcccagcctcctccctctggctgtcactctctacgtttcctggctgctctacctgtttctgattctgggagtcaccgcagccaagtttttctgccccaacttgtcggccatttctaccacactgaagctctcccacaacgtggcaggcgtcaccttcctggcatttgggaatggtgcacctgacatcttcagtgccctggtggccttctctgacccgcacacagccggcctggcccttggggcactgtttggcgctggcgtgctggttaccacagtggtggccggaggcattaccatcctacaccccttcatggctgcctccaggcccttcttcagggacatcgttttctacatggtggctgtgttcctgaccttcctcatgctcttccgtggcagggtcaccctggcatgggctctgg

SEQ ID NO: 184657 - DNA, 850 bp, Homo sapiens
  Payload ID: 16360
  Gene Symbol: SLC8B1
  Gene Name: solute carrier family 8 (sodium/lithium/calcium exchanger), member B1
  ENST ID: ENST00000549605
  CDS Start-End: 213-374
tgcagcaggcggggcacccggactggcggcttcgctggcgcaaggtcggtccggcggccagggacctggaaggctgcgaggccctgcgaggtcgaggttcggagtttgctggtcccaggcccggcccgaggccaccggagccgccagctgtttggaactgagctactgcagaaagggaagtggagagtaagggccaggccccgtgggggcagatggccggcagaaggctgaatctgcgctgggcactgagtgtgctttgtgtgctgctaatggcggagacagtgtctgggactaggggctcgtctacaggagctcacattagcccccagtttccagcttcagtgccgcaaggtgtgtggcctgaatgtctctgaccgctgtgacttcatccggaccaaccctgactgccacagtgatggggggtacctggactacctggaaggcatcttctgccacttccctcccagcctcctccctctggctgtcactctctacgtttcctggctgctctacctgtttctgattctgggagtcaccgcagccaagtttttctgccccaacttgtcggccatttctaccacactgaagctctcccacaacgtggcaggcgtcaccttcctggcatttgggaatggtgcacctgacatcttcagtgccctggtggccttctctgacccgcacacagccggcctggcccttggggcactgtttggcgctggcgtgctggttaccacagtggtggccggaggcattaccatcctacaccccttcatggctgcctccaggcccttcttcagggacatcgttttctacatggtggctgtgttcctgaccttcctcatgctcttcc

SEQ ID NO: 184658 - DNA, 2925 bp, Homo sapiens
  Payload ID: 16360
  Gene Symbol: SLC8B1
  Gene Name: solute carrier family 8 (sodium/lithium/calcium exchanger), member B1
  ENST ID: ENST00000550672
  CDS Start-End: 1-1214
ccacactgaagctctcccacaacgtggcaggcgtcaccttcctggcatttgggaatggtgcacctgacatcttcagtgccctggtggccttctctgacccgcacacagccggcctggcccttggggcactgtttggcgctggcgtgctggttaccacagtggtggccggaggcattaccatcctacaccccttcatggctgcctccaggcccttcttcagggacatcgttttctacatggtggctgtgttcctgaccttcctcatgctcttccgtggcagggtcaccctggcatgggctctgggttacctgggcttgtatgtgttctatgtggtcactgtgattctctgcacctggatctaccaacggcaacggagaggatctctgttctgccccatgccagttactccagagatcctctcagactccgaggaggaccgggtatcttctaataccaacagctatgactacggtgatgagtaccggccgctgttcttctaccaggagaccacggctcagatcctggtccgggccctcaatcccctggattacatgaagtggagaaggaaatcagcatactggaaagccctcaaggtgttcaagctgcctgtggagttcctgctgctcctcacagtccccgtcgtggacccggacaaggatgaccagaactggaaacggcccctcaactgtctgcatctggttatcagccccctggttgtggtcctgaccctgcagtcggggacctatggtgtctatgagataggcggcctcgttcccgtctgggtcgtggtggtgatcgcaggcacagccttggcttcagtgaccttttttgccacatctgacagccagccccccaggcttcactggctctttgctttcctgggctttctgaccagcgccctgtggatcaacgcggccgccacagaggtggtgaacatcttgcggtccctgggtgtggtcttccggctgagcaacactgtgctggggctcacgctgctggcctgggggaacagcattggagatgccttctcggatttcacactggctcgccagggctacccacggatggcgttctccgcctgctttggcggcatcatcttcaacatcctcgtgggtgtggggctgggctgcctgctccagatctcccgaagccacacagaagtgaagacgaggaggatgcaggtggctgggaagacgaaacgccacggtgcctagaaacagcccacacggtacctcatgtcttcactgcgtgttggatatacctgctaagtgtggaaggaagagaagcggggaggggacatttcagtcccttttactcttctgtactgcttgaaaatatgtcagcaaccatgtgtgacatgtataccatagatagtgttagttccctagtgctgccataactgaccacaaaccagggggctgacaacagcagaaattgagtctctcccagttctggaagccaaaagcctgcaatcagggcatcagccgggcagtgccacctccaagctccagaggaggatccttcctcacctcttccagctgctgttggctcctgacgttccttgcccagtgggcccatctctgcagtctctgcctctgtgttcccatggccatctctctcttcttcttacggagacatgagtcattggatttaggggccaccctaagtccaagatgattgtatcttgaaacccttagcttattatatttgcaaagaccctatttcagctggagccagacggactgctggtgtgggtcctggcaggcgccctggggctcagcctcgtcttctccctggtctcagtcccattgcagtgcttccagctcagcagagtctatggcttctgcctgctcctcttctacctgaacttccttgtcgtggccctcctcactgaatttggagtgattcacctgaaaagcatgtgactgaagccgcttagtgctgtggcctcactgcaggcaggagccccgcccctcctgccgggggaggcccagggaccggagcatttctgcaaggcccttgtgggcacgagagtgcggcccttgctgctggagatctgaggtcactgctgtgagctgggagaactgctgtgtacctcttgctgccagcacccaacagccttgccgtggggaccttggaaacctggctttgctctggacaaagggttccagagagaagctagaagtcccccttgaatgacccccagagcccctctgagaagggctggagtttgggggaaggggatggctggatgtgctccaggccatgctggaggtacccccgaggcacaggcactgcccgttccccttgcctgggcttcaggccttctggcaccttctcaggacacaagtggctgcccaaccctgactcagagaatgagggtggcttggacccctgggaatcaggccgccgagggctgagctccagagccgcaccatctgccacaaacagaattcgagacatacttaattttgaatttctccttgccacgttaataaagccaaaagcagcgggtgctattcgtggcaacacacttcactgaacccacttgcttccaaaacgatgccagcccgaggcactgctacgccagcagctgccacatgggatggtggctcaggcgctccctccaggattctgcccctgcctgtccacagactcctttgtgctggaacctgggctcctccagctgccaggcaggagtcggtaggactgtgcctgtgcctccctcagcggggccctgggcggggttccaaggcctgcgagctgggaaaggacagatgaggggacctcgtgccttcttgctgtcatgcaatgaccccgccttatgttgccgaaataagcaactcttaggtttgcctgactgccttatgctggtaaagaaaagggattcaactgtctcttttccaaataaaaaaaaagtcaaaa

SEQ ID NO: 184659 - DNA, 996 bp, Homo sapiens
  Payload ID: 16360
  Gene Symbol: SLC8B1
  Gene Name: solute carrier family 8 (sodium/lithium/calcium exchanger), member B1
  ENST ID: ENST00000548186
  CDS Start-End: 603-996
agcaggcggggcacccggactggcggcttcgctggcgcaaggtcggtccggcggccagggacctggaaggctgcgaggccctgcgaggtcgaggttcggagtttgctggtcccaggcccggcccgaggtcggcgaccatccgagcgctgggcatcggcccacgcgtacagaaggcgctcaataaatgctcactagtgaatcagtaaaataaatcggcagcaaagagagacgagacgcatgctgatcttcaggtgttggggacatcagggacgcgaacatttattgagctcttattgtataccgcgtcggccagcatttgtgtccatttcacacatgaggaataagaggcccagagaggtgaagtgacttccttaaggccacacagatagtaagtggccgagacgaatttgaaaccaggggtgtcctgtttgaacttggtgccaaatagagtaactcggactccagttggaggggttcgggagaaccatagaagaggaagggccgtgtcttccgtggacaggccaccggagccgccagctgtttggaactgagctactgcagaaagggaagtggagagtaagggccaggccccgtgggggcagatggccggcagaaggctgaatctgcgctgggcactgagtgtgctttgtgtgctgctaatggcggagacagtgtctgggactaggggctcgtctacaggagctcacattagcccccagtttccagcttcaggtgtgaaccagacccccgtggtagactgccgcaaggtgtgtggcctgaatgtctctgaccgctgtgacttcatccggaccaaccctgactgccacagtgatggggggtacctggactacctggaaggcatcttctgccacttccctcccagcctcctccctctggctgtcactctctacgtttcctggctgctctacctgtttctgattctgggagtcaccgcagccaagtttttctgccccaacttgtcggccatttctacca

SEQ ID NO: 184660 - DNA, 1058 bp, Homo sapiens
  Payload ID: 16360
  Gene Symbol: SLC8B1
  Gene Name: solute carrier family 8 (sodium/lithium/calcium exchanger), member B1
  ENST ID: ENST00000549069
  CDS Start-End: 182-613
gccactgtgcccagctggtagccgcgtttttcacacctgcaaagttgttcctggtgtgaaagagtggggtaaaggaattaaggagggaagtgtgtcttcccagatgctgtgccccctcacacagcaccccaccagctagtgcccaggcacacttgggcatccatctgtgtttgttgcctgaatgaccgtgggtgagaatgaaggcgtggatgaccagggagggtgggggaagcgactcaccactgcaggcccctcttgttcctgtgcagatgccttctcggatttcacactggctcgccagggctacccacggatggcgttctccgcctgctttggcggcatcatcttcaacatcctcgtgggtgtggggctgggctgcctgctccagatctcccgaagccacacagaagtgaagctggagccagacggactgctggtgtgggtcctggcaggcgccctggggctcagcctcgtcttctccctggtctcagtcccattgcagtgcttccagctcagcagagtctatggcttctgcctgctcctcttctacctgaacttccttgtcgtggccctcctcactgaatttggagtgattcacctgaaaagcatgtgactgaagccgcttagtgctgtggcctcactgcaggcaggagccccgcccctcctgccgggggaggcccagggaccggagcatttctgcaaggcccttgtgggcacgagagtgcggcccttgctgctggagatctgaggtcactgctgtgagctgggagaactgctgtgtacctcttgctgccagcacccaacagccttgccgtggggaccttggaaacctggctttgctctggacaaagggttccagagagaagctagaagtcccccttgaatgacccccagagcccctctgagaagggctggagtttgggggaaggggatggctggatgtgctccaggccatgctggaggtacccccgaggcacaggcactgcccgttccccttgcctgggcttcaggccttctggcaccttctcaggacacaagtggctgcccaaccctgactc

SEQ ID NO: 184661 - DNA, 1656 bp, Homo sapiens
  Payload ID: 16360
  Gene Symbol: SLC8B1
  Gene Name: solute carrier family 8 (sodium/lithium/calcium exchanger), member B1
  Uniprot ID: Q6J4K2
  ENST ID: ENST00000546737
  CDS Start-End: 70-1656
ccagctgtttggaactgagctactgcagaaagggaagtggagagtaagggccaggccccgtgggggcagatggccggcagaaggctgaatctgcgctgggcactgagtgtgctttgtgtgctgctaatggcggagacagtgtctgggactaggggctcgtctacaggagctcacattagcccccagtttccagcttcaggtgtgaaccagacccccgtggtagactgccgcaaggtgtgtggcctgaatgtctctgaccgctgtgacttcatccggaccaaccctgactgccacagtgatggggggtacctggactacctggaaggcatcttctgccacttccctcccagcctcctccctctggctgtcactctctacgtttcctggctgctctacctgtttctgattctgggagtcaccgcagccaagtttttctgccccaacttgtcggccatttctaccacactgaagctctcccacaacgtggcaggcgtcaccttcctggcatttgggaatggtgcacctgacatcttcagtgccctggtggccttctctgacccgcacacagccggcctggcccttggggcactgtttggttacctgggcttgtatgtgttctatgtggtcactgtgattctctgcacctggatctaccaacggcaacggagaggatctctgttctgccccatgccagttactccagagatcctctcagactccgaggaggaccgggtatcttctaataccaacagctatgactacggtgatgagtaccggccgctgttcttctaccaggagaccacggctcagatcctggtccgggccctcaatcccctggattacatgaagtggagaaggaaatcagcatactggaaagccctcaaggtgttcaagctgcctgtggagttcctgctgctcctcacagtccccgtcgtggacccggacaaggatgaccagaactggaaacggcccctcaactgtctgcatctggttatcagccccctggttgtggtcctgaccctgcagtcggggacctatggtgtctatgagataggcggcctcgttcccgtctgggtcgtggtggtgatcgcaggcacagccttggcttcagtgaccttttttgccacatctgacagccagccccccaggcttcactggctctttgctttcctgggctttctgaccagcgccctgtggatcaacgcggccgccacagaggtggtgaacatcttgcggtccctgggtgtggtcttccggctgagcaacactgtgctggggctcacgctgctggcctgggggaacagcattggagatgccttctcggatttcacactggctcgccagggctacccacggatggcgttctccgcctgctttggcggcatcatcttcaacatcctcgtgggtgtggggctgggctgcctgctccagatctcccgaagccacacagaagtgaagctggagccagacggactgctggtgtgggtcctggcaggcgccctggggctcagcctcgtcttctccctggtctcagtcccattgcagtgcttccagctcagcagagtctatggcttctgcctgctcctcttctacctgaacttccttgtcgtggccctcctcactgaatttggagtgattcacctgaaaagcatgtga

SEQ ID NO: 184662 - DNA, 4428 bp, Homo sapiens
  Payload ID: 16361
  Gene Symbol: SLC9C2
  Gene Name: solute carrier family 9, member C2 (putative)
  Uniprot ID: Q5TAH2
  ENST ID: ENST00000367714
  CDS Start-End: 424-3798
aaatggattttggtgtgatatcagttggtagtactgtccctggcaaacagacgcataactgtgcattgttctttgggattttgagagccttcatctcaatttcaactttaaagcagcttaatctttaaggaacatatctctgatctgggtaatttgtagaacttaatttgagggtcattacatgtgaggatagcaggagttgaagatgccaaggacctgaagggctactggagggacaggtgaagtgatttgaagatgtagcattttgaatctctttctggcccatcctctgcttcacaccagaatcattgtgacctgtagacctgcaaaacaaaggaccaaaggttagcatgcagaagtgaaagtgtcaataataaccaaaccactccatcaagttaggtctggggaaaagcagcagcaaaaatgagttcttacttctgggcacaaaatgaaagtaacagacctgatttactctgcgggcagccagctgactaccttgttgaagagaaacatttcacaacgcttgtatgcttcattgttgttttgggagggcttttgaagatgtgtttaaagaattgtgaagtcattgttttgacgattctttctctatcaggattcgtgataggacacatggcctacaattctgttgaggtgcaccaaattgtctaccctcttctaagaacatcaagtttttcactttattcttacttttcacctttaattatatttatggttgctttggatgtagaattttatacactcaagaaaatgttttggcaggtcttgttaactggattaattagcttttctacagcaagcatcataattggatatgtcgttataaaattcaataaagattcatgggatttgcaatcttgcctactctttagcatcacccttggcattatagatcctcttcgttctgtgaattcactaaaaactattggcatttctaaaatatacattgatctcattagaggagaatcattgatcatttgtagcatcgcatcaattttttttggaaattttcggggcaacagaatccacttttctatttttagagatttacatgtaggcattgaactcagctatgacattttgggaagcataatatttggatattggtgtgcaaaaatcattcagtgtatattggctgacgtttttagcaatatgctgactaatatcattctctgcttttcaatggtgtacatgactttctatattgtggaatttttaggaatgtcaggcactcttgccttagccgctgtaggactgaatttagattctttaacttttaaaccgaagatcgaacttgtaattactaagttcttaagaattttttcatctgtatatgaacatttaatatatgctttctttggcattgtgattggatgtggagaactcagccactatgaatttcacactatacctttcatattcattttatttacaacagtgaatttggtaaggttgcttactattttgttagtgagccctattttgatgcattcaaattatgaatataattggcgatggggagttgtaatcacgtggtctggaattaaaggagtttttaatttactctgggctcctgatgtttataatctcgctgaacgaaaagtggaagtaccacaaatgtttatactctatgtacaagtaatatcattattgacaatgggaataaattcatacgtgatgactcagtcagccaggaagttagatttgtgtgttctttccctcccaagacaaatgatcttgcaaaatgccactcagcacatacaggagatagtacagaacacaataactttatttaaaacagaaaaaattttgacaaatgttaactggaccttagtagaagataaaacgaggatcgaatacattcctttttcccacgtttcacataatgatatgaagacagaatccacaacagatgaagctttaatggaggaagccagattgcatgtagctgcaatacaaatgagtagctttgaaaaacagcgtaacaatggaattcttgaaatagaggcagcccggatattaattggtgcagcaaaatgctattactccatccaaggaaaattcatgagtatttatgatgtttcaacttatatgagaactagaagttggcttataaagtttaaaaatgttttaactttcttggaatattgtatagaaaagatacattttattccacctgagagtaatacatttctgacttttatatttcacatagtattttctgaagaatttgaatatacaggacagattataaatttgatatatatttatcctatgataatacatctgtggccaatggcaagaggtttaaatgtatcagcactgatatcaataaactactattttatgtttttatatgtattagaatcaacattgaagataataattttgaaaaggaaatattttcaacaatgttggaatactttggaattttttatcctggttattggaatcattgatatcttttgtgtatactttgtgaaattgagaccagacaacttggctcttatacagcttacagtaataatgggatatttaagaataattaggtttcttcctctcttcaagataatagtaccaatactgataagaattgcagatgtgcagatcaaaaagcgcctcagcttgatgtatagtattacaaaaggctatatcaaaagtcaagaagatgccaaacttctaataaaacaaatagctgtctgtgaatcaatatatcagaaactatgtgaaattttggaaaccaacaaacaggatgctgtcaaagaattagtactcatggagcatgagggtcgtgatgttgtcattgctttgaagactaaacaggcaatccggaatgtgattgctaaagctctaaaaaatctcaccttcctttgttcaagaggcattattgataagcatgaagtcattgagataaataaggtacttcttaaaaaattaaaagcactaaataactttccaaaggcaatcccacccccaactcctgacatataccttcacaacatcatttggctggaaggtaaagatgttctcattgacttcttcaaggaaagagccaaacttgcctgttttgactctggagataccatttgtaaaggaggtgaaatgccacaaggaatctacttaattatttcaggaatggcaattttgcatagtttatctcctacctttggaatagagagtaatcaaaggtgtgatagagggtccagagacatgtttacagagttctgtactactggggacataattggagagctaagctgtctgcttaagcgtgaaattgaatataccgtcatctgtgaaactagtttacaggcctgctttatctccctggaggatttatatgaaggctttgatgccttctggccatctctggaatataaaatatggctaaagcttgctctcagtactgcctatcagtattttgaatcaagtcttattgatgaggacttaaggtttcagaactgtgtgatgttcaatcaagcatatgtggaaactttatcaagctatagtgacatgattattgataatatgaccatgaaatttgttatcattgtgtatggcagtgtaattgatactaagacagaggaaccatattttgcaccttgcattatacctacaacctgtgagcaggttcagggaacttctgatttaagcaagctgctgataatccaagcatctgagcttacccaaagaaatagtaacaccaatgtcatggcctcagtcaacacggtctttgaacaaccaggaaagaatataaatggaagacaaaagatgagttgaaaactggataccattttagaaaagggtattaatgatacaaatatgatgtgtggagtcaggttaaagaccaaactactttcctcgctcaaatactaaaggattatctgcaaggagtttacttagaagctactgaaacaggttactgctgcatttagtttataagcaatggatggacttctgtaaaacttcttaattttaagtagttgcattatatttgggatgttaaaaaagtcttcaggataatataaaatacactgaaacatatgtcctaccaaatgaaaccctgtttccagctaagagcaaattttaacatagtgcattataaaaagtgttgtataactgatatgttactctctaaagcatagaacctgtaattttcatttgtgaaattgttataattagtgcctccctaatattttcccgagtatagctattctccccttcccagtttggtaaatattgaaaaacagaattatattccacaatcttagtaactttcagtaagtaagtaacttttgctttcagtgaaatttaggagaaattaatattctcatattgcatagtactgtttgatgtcacctttcattttatttttaaaaatcaaataaagttgagttttatggttgtcta

SEQ ID NO: 184663 - DNA, 4516 bp, Homo sapiens
  Payload ID: 16362
  Gene Symbol: SLC9A1
  Gene Name: solute carrier family 9, subfamily A (NHE1, cation proton antiporter 1), member 1
  Uniprot ID: P19634
  ENST ID: ENST00000263980
  CDS Start-End: 577-3024
cggcgcgcctggacccctgcccctctctgggtggagaagctcccggccgcttcccggtttcactccttctcagcctgggctcccagccccctctctccttttcctggactggctctcacccccttcggtccccttcctttagctcaggctccctaccccttcctttagcccacagcccagagtcccagctcctcagtcactttcctcagccaaaggtcccagccttccttcttcctttcctttgcactatccctatcctgccccttcctctatccctagggctcagtttcccacatccgtcctcccccttcccaggcccggagttccagaccttttggtctcctttcgtggtcgttcctgggtccttgccccctttccccactttggagttccagattgcaaacccagcctccctccacccccagaaaattgcttccatggaaatgcctctctaaaacatgaacttttcctagagactacgccagtctctcttcccacttgctgaccctttgctacctatgtgcccggttttactctcatttgggtaaggtcgaggctggctctggaagcagcaccatggttctgcggtctggcatctgtggcctctctccacatcggatcttcccttccttactcgtggtggttgctttggtggggctgctgcctgttctcaggagccatggcctccagctcagcccaactgccagcaccattcgaagctcagagccaccacgagaacgctcgattggggatgtcaccaccgctccaccggaggtcaccccagagagccgccctgttaatcattccgtcactgatcatggcatgaagccgcgcaaggcctttccagtcctgggcatcgactacacacacgtgcgcacccccttcgagatctccctctggatccttctggcctgcctcatgaagataggtttccatgtgatccccactatctcaagcatcgtcccggagagctgcctgctgatcgtggtggggctgctggtggggggcctgatcaagggtgtaggcgagacaccccccttcctgcagtccgacgtcttcttcctcttcctgctgccgcccatcatcctggatgcgggctacttcctgccactgcggcagttcacagaaaacctgggcaccatcctgatctttgccgtggtgggcacgctgtggaacgccttcttcctgggcggcctcatgtacgccgtgtgcctggtgggcggtgagcagatcaacaacatcggcctcctggacaacctgctcttcggcagcatcatctcggccgtggaccccgtggcggttctggctgtctttgaggaaattcacatcaatgagctgctgcacatccttgtttttggggagtccttgctcaatgacgccgtcactgtggtcctgtatcacctctttgaggagtttgccaactacgaacacgtgggcatcgtggacatcttcctcggcttcctgagcttcttcgtggtggccctgggcggggtgcttgtgggcgtggtctacggggtcatcgcagccttcacctcccgatttacctcccacatccgggtcatcgagccgctcttcgtcttcctctacagctacatggcctacttgtcagccgagctcttccacctgtcaggcatcatggcgctcatagcctcaggagtggtgatgcgcccctatgtggaggccaacatctcccacaagtcccacaccaccatcaaatacttcctgaagatgtggagcagcgtcagcgagaccctcatcttcatcttcctcggcgtctccacggtggccggctcccaccactggaactggaccttcgtcatcagcaccctgctcttctgcctcatcgcccgcgtgctgggggtgctgggcctgacctggttcatcaacaagttccgtatcgtgaagctgacccccaaggaccagttcatcatcgcctatgggggcctgcgaggggccatcgccttctctctgggctacctcctggacaagaagcacttccccatgtgtgacctgttcctcactgccatcatcactgtcatcttcttcaccgtctttgtgcagggcatgaccattcggcccctggtagacctgttggctgtgaagaaaaagcaagagacgaagcgctccatcaacgaagagatccacacacagttcctggaccaccttctgacaggcatcgaagacatctgtggccactacggtcaccaccactggaaggacaagctcaaccggtttaataagaaatatgtgaagaagtgtctgatagctggcgagcgctccaaggagccccagctcattgccttctaccacaagatggagatgaagcaggccatcgagctggtggagagcgggggcatgggcaagatcccctctgccgtctccaccgtctccatgcagaacatccaccccaagtccctgccttccgagcgcatcctgccagcactgtccaaggacaaggaggaggagatccgcaaaatcctgaggaacaacttgcagaagaccaggcagcggctgcggtcctacaacagacacacgctggtggcagacccctacgaggaagcctggaaccagatgctgctccggaggcagaaggcccggcagctggagcagaagatcaacaactacctgacggtgccagcccacaagctggactcacccaccatgtctcgggcccgcatcggctcagacccactggcctatgagccgaaggaggacctgcctgtcatcaccatcgacccggcttccccgcagtcacccgagtctgtggacctggtgaatgaagagctgaagggcaaagtcttagggttgagccgggatcctgcaaaggtggctgaggaggacgaggacgacgatgggggcatcatgatgcggagcaaggagacttcgtccccaggaaccgacgatgtcttcacccccgcgcccagtgacagccccagctcccagaggatacagcgctgcctcagtgacccaggcccacaccctgagcctggggagggagaaccgttcttccccaaggggcagtaacaccagggccagcaggcagcgcctgtcccctcacagactcttccaccagagcaggggctgctgggggctccccttgcccttcctgacccggattggccctgcccctccccctaccgcatggcagctgggcccacagcccccaccccagcacagctcctcccctgccgcctcccgggaagcatcctccccaccagagctgcctccccaatccatttggcagaactgctggggctggtgaggccggccctgcccctccctagatccaggcttctcccggacctggactagggcctcggaggctcctccctctgcctcatcctcctcctcattcagaccaatcttagtttctaaccaaagagtctctggctcagctgtggtcccacccaggaagggagggagctgaggcctcccttgagtaggccctgctttatcaggggacaaaccaggggtaccaggcacatggctgggggagggactgctgacccaccaaggtctcacactcctcctgccagctctgtcaccctggccaccacccaacctgtccttactcagagctgcgggctgagggcatctctgagtgtctctgcctggagcaggggtggtttctacggtgacagtgacgtgactcagagcttttcgaactgtgctcccacggggaccactgggcccctcaggggaagctgctaggggaaggactggccgtggctccagaatgtgctgcctttttaagttttgtttgttcacactcctatatatgattgtttgcacagagggcgctcctgtttttaaaacattttgaaaacccctggctgaacagtgctctgcctctaactccctcctcacactccagaattacccttcctcatctgtgcctgtctgtccaacccctcccccacgtctctctgcctgctgggctcttaactgttgctcgaagactgtgacatcagaagtaactcccactcctaatcaagagtctctccagcctcacagatgctggcctcttggcacctgcctagctcttgggcctgacctccagtcctgctggcctgctcttacttcccccaccctgggtttggcccctggaacctttcccttgtgtgtaccacaccctgcctgctgtggagcccattgtggaggcggtgggggggagaaggcctcccctgaggatcccctgtcccctggggctggtggattgggcagaatcctgggcccccagagacctttgcccacacacactccttccccttgtccctggggcactcccccaggattgtgcaatagtcagagtgtccctttttgcaggggactgggccatgggtcctcggcccatctgtccatcctcctctccatgcaagtgctgtttgggcaggagtcaccatgcaagggtgacatcgacaaccacgtaccaagccaccgcagctgctgccactctgctgcctgtacagaagaaactgaatctttttcatattctaataaatcaatgtgagttttt

SEQ ID NO: 184664 - DNA, 695 bp, Homo sapiens
  Payload ID: 16362
  Gene Symbol: SLC9A1
  Gene Name: solute carrier family 9, subfamily A (NHE1, cation proton antiporter 1), member 1
  ENST ID: ENST00000374084
  CDS Start-End: 290-695
atctgacttaggcttttaaagggatccttctggctgctttgttgaaacaataatctgggtggggaaaatggcactgcttggaccagagtgggcaatggaggtggtcagaaatggatggattctggaaatattttgaagattgaattgacactatttgtggaggattgatatgacagaaaggagccaaggatgactcaagtttttggccagagattattcgaaagcccttatgagactgcagatgtggacgtgaaatcgttttgtcgaggctggctctggaagcagcaccatggttctgcggtctggcatctgtggcctctctccacatcggatcttcccttccttactcgtggtggttgctttggtggggctgctgcctgttctcaggagccatggcctccagctcagcccaactgccagcaccattcgaagctcagagccaccacgagaacgctcgattggggatgtcaccaccgctccaccggaggtcaccccagagagccgccctgttaatcattccgtcactgatcatggcatgaagccgcgcaaggcctttccagtcctgggcatcgactacacacacgtgcgcacccccttcgagatctccctctggatccttctggcctgcctcatgaagataggtttccatgtgatccccactatctcaagcatcgtcccggagagctgcctgctga

SEQ ID NO: 184665 - DNA, 2183 bp, Homo sapiens
  Payload ID: 16362
  Gene Symbol: SLC9A1
  Gene Name: solute carrier family 9, subfamily A (NHE1, cation proton antiporter 1), member 1
  Uniprot ID: P19634
  ENST ID: ENST00000374086
  CDS Start-End: 265-1932
caggcccggagttccagaccttttggtctcctttcgtggtcgttcctgggtccttgccccctttccccactttggagttccagattgcaaacccagcctccctccacccccagaaaattgcttccatggaaatgcctctctaaaacatgaacttttcctagagactacgccagtctctcttcccacttgctgaccctttgctacctatgtgcccggttttactctcatttgggtaaggtcgaggctggctctggaagcagcaccatggttctgcggtctggcatctgtggcctctctccacatcggatcttcccttccttactcgtggtggttgctttggtggggctgctgcctgttctcaggagccatggcctccagctcagcccaactgccagcaccattcgaagctcagagccaccacgagaacgctcgattggggatgtcaccaccgctccaccggaggtcaccccagagagccgccctgttaatcattccgtcactgatcatggcatgaagccgcgcaaggcctttccagtcctgggcatcgactacacacacgtgcgcacccccttcgagatctccctctggatccttctggcctgcctcatgaagataggtttccatgtgatccccactatctcaagcatcgtcccggagagctgcctgctgatcgtggtggggctgctggtggggggcctgatcaagggtgtaggcgagacaccccccttcctgcagtccgacgtcttcttcctcttcctgctgccgcccatcatcctggatgcgggctacttcctgccactgcggcagttcacagaaaacctgggcaccatcctgatctttgccgtggtgggcacgctgtggaacgccttcttcctgggcggcctcatgtacgccgtgtgcctggtgggcggtgagcagatcaacaacatcggcctcctggacaacctgctcttcggcagcatcatctcggccgtggaccccgtggcggttctggctgtctttgaggaaattcacatcaatgagctgctgcacatccttgtttttggggagtccttgctcaatgacgccgtcactgtggtcctgtatcacctctttgaggagtttgccaactacgaacacgtgggcatcgtggacatcttcctcggcttcctgagcttcttcgtggtggccctgggcggggtgcttgtgggcgtggtctacggggtcatcgcagccttcacctcccgatttacctcccacatccgggtcatcgagccgctcttcgtcttcctctacagctacatggcctacttgtcagccgagctcttccacctgtcaggcatcatggcgctcatagcctcaggagtggtgatgcgcccctatgtggaggccaacatctcccacaagtcccacaccaccatcaaatacttcctgaagatgtggagcagcgtcagcgagaccctcatcttcatcttcctcggcgtctccacggtggccggctcccaccactggaactggaccttcgtcatcagcaccctgctcttctgcctcatcgcccgcgtgctgggggtgctgggcctgacctggttcatcaacaagttccgtatcgtgaagctgacccccaaggaccagttcatcatcgcctatgggggcctgcgaggggccatcgccttctctctgggctacctcctggacaagaagcacttccccatgtgtgacctgttcctcactgccatcatcactgtcatcttcttcaccgtctttgtgcaggtgctgggccagggcagggcaggcccttgccttggggaccctcacaggctgttcccgtggaaagagaggaaagcgtgtgatttgaaatgcgattctagtcccagctccaccactaacttgctgtgtgaccttgggcgagccactccccctttctgggcctcagtttcttcaatcgtaaagtgagaattgtgatgagtcattgcagagtgactgatcagaatgtaaaggaaccagaatgctgcccaacttaatttggaactcatagagcattaagagaagtgggtactggccgggcacggtgactcaacgcctgtaatcccagcactttgggaggctgagggggtggatcacctgaggtcaggagtttgagaccagcctgactaacatggtgaaaccccgtctctactaaaaatacaaaattagtgggcatggtg

SEQ ID NO: 184666 - DNA, 5410 bp, Homo sapiens
  Payload ID: 16363
  Gene Symbol: SLC9A2
  Gene Name: solute carrier family 9, subfamily A (NHE2, cation proton antiporter 2), member 2
  Uniprot ID: Q9UBY0
  ENST ID: ENST00000233969
  CDS Start-End: 143-2581
ccggtgccgcagcagcggcgggtggctgtcgctgccctgccctgcacggggcagggcggagcgggctgagcagcccgggcgcgatgcgttgagcgctcggagggccaaccgccggtccccttggcggcaaccggcggcacccatggaaccactgggcaactggaggagcctgcgggcgccactgcctccgatgctgttgctgctgctcctgcaggtggcggggcccgtgggcgccctggcggagaccttgctgaacgcgccgagggccatgggcaccagttccagcccgcctagccctgcgagcgtggtggctcccggaacgacgctgttcgaggagagccggctgcctgtgtttacgctggattacccccacgtgcagatccccttcgagatcaccctttggatcctgctggcctccctggccaagattggcttccatctgtatcacaagttgcccacaatagtgcctgagagctgccttcttataatggttggacttctactaggtgggattatttttggtgttgatgagaagtctccccctgcaatgaagactgatgtatttttcttgtacctcctcccacccatcgtgctggatgccggctatttcatgcccactcgcccattctttgagaacattggcacgattttctggtatgctgtggtagggacactttggaattccattggcattggggtgtctttgtttggtatctgccagatcgaagcattcggcctcagcgacatcactttgctccagaacctgctctttggcagcttaatctcagctgtcgatcctgtggctgtgcttgctgtctttgagaacattcacgtcaatgagcagctctacatcctggtctttggagagtccctgctgaatgatgcagtaacagtggtcctgtacaacttgttcaagtcgttttgccagatgaaaaccattgagaccattgatgtgtttgcaggaatcgccaacttctttgttgtgggaatcggtggggtgctgattggcatcttcttgggctttatagcggcatttactactcgattcacccataatatccgagtgatcgagccactgtttgttttcctgtacagttatttgtcctacatcacagctgaaatgtttcacctctcaggcatcatggcaatcactgcttgtgcaatgactatgaataagtacgtagaagaaaatgtatctcagaaatcctacacgaccatcaagtacttcatgaagatgctgagcagtgtcagcgaaaccttgatcttcatcttcatgggtgtgtctaccgtgggcaagaaccacgagtggaactgggccttcgtctgcttcaccctggccttctgcctcatgtggcgagccctgggtgtttttgtcctgactcaggtcattaataggttccggaccattcccctgacctttaaggaccagttcatcattgcctatggaggacttcgaggtgccatctgttttgcgttagtgtttctccttcctgctgctgtgtttcctcggaaaaaattgtttattacggctgccattgttgtcatattctttactgtcttcattctgggaataactattcgaccactggtggagtttcttgatgtcaagaggtccaataagaaacaacaagctgtcagtgaagaaatctattgtcggttgtttgatcatgtgaagactggaattgaagatgtttgtggacattggggtcacaacttttggagagacaagtttaagaagtttgatgataaatatctgcggaagcttttgattcgggaaaaccaaccaaagtcaagtattgtatctttatataaaaagcttgaaataaaacatgccattgagatggcagagactgggatgataagtactgtccctacatttgcatctctaaatgattgtcgtgaagaaaaaataaggaaggtcacgtccagtgaaactgatgaaattcgagaactcttatcaagaaatctctatcaaatccgtcagcgaactttatcctacaacagacacagtctgacagccgacacaagtgagagacaagccaaggagattctgattcgccggcgacacagtttgcgagaaagcattaggaaggacagcagcttgaatcgagaacacagggcttccacttcaacctcccgatatttatccttacctaaaaatacgaagcttccagaaaagctacaaaagaggaggactatttctattgcagatggcaatagcagcgactcagacgcagatgccgggaccaccgtgctcaatttgcagcccagagccaggcgcttcttgccagaacagttctccaagaaatccccccagtcctataaaatggaatggaagaatgaggtagatgttgattctggccgagatatgcccagcacccccccaacaccccacagcagagaaaagggcacccagacgtcaggcttactacagcagccccttctctctaaagaccagtctggctcagagagggaagacagtttgactgaaggcatcccgcccaagccgccaccacggctggtctggagggcatcggaacctggaagccggaaagcccgatttgggagtgagaagccttaagagaagcagcgaaagcagatctgagtgtctgacccaggacagctgtggtttgtcactctgaaacctgatgcaacagtggaatccatgtaaaactctctgtgcatctaaatacttctggagggcgacagattcatgccacggataaatgaggcaaatccgaagaaaaggaaaatcgaataaaaaatagtcccacaaaataccttttgtgactaatgggtagcaatcgtattatttgctggcctgaagagaaaaaatggtaatgtgtgcctttattgaacttgaatgacagaacttgaaatttttaacacatccttcttggtgaagattttaatatattacttatatgcttcaaattttatttatgaaaaaatatgtatatctgtaatcagttgttaagtgaatggcactaaaagtatcgagaacagctttctttcccaggggtgaaggatggcgctcgggggtgactcctaagctcagcgtggaagcttttccctgtcctgacccgatggagcagccggtaagtgaagagcacagctggaagcagagacaccttatgactcaaactgggcaaacaatcggaacgtcatgcagaaggaatggcctgactcctgcagtgcagattggaggccccagaactcctatgaactactgagagtctactggtttttaacttgttcctctgtctactgtgtgtttgggggtgacatctaaattccatttcttcttcttgtttaaatggtgcagagagaaaggttgcccagacatccaccagcttactgtgttgacagatttgggagcagcttttgatgaagttccacccatgagggtccatgtggcaagtagggccacagggcagcacctggttacaacttgctggtgggttttatgttgtgcaatactaggaggaggaggcaggtgatctatgctgatctatgatcacctgcttcagtagaatttttctgtagagtgttgtttgaattttgagcctccaggttagaggctccaagcagacaaagaagaaagtttgtagacacaatattctaacattgcacaagttgatgagatatcaagttttgaatattattcaggaagcactttggagaatgtgggagtcctactgttttgcactagtctgtaatttgttacctctccccattcgataatatagtaactcagaattttcatataaaattgaattctactcattagagtactttttaaaagtacagcagaaagaaaagaagtggaacataagcattcaagattaatatttgattctctatctcttaactgtagattttattggcctgttttttttttctaaataattctttaaaacttgactggaacatgcctctgcatttctgagtgtagaaattaaatgaagccactcacagtcctttgatttcccactgaagataccccaaaggatgcaagtgcctacagtattatcaggaggagaacatgaaaatattaagacaaaaatcctcagcagttgttctccaccccttctccacctccaccagcaaggagaagtcaatctacacttttttctcatgttctaaagtcttagaatactgctggattgttgagcatgagacagagcaaaggttagatacacaaggtacaagttcataggagcacaattccttgattcagggaaagtagcacagaatgcaatttgaaaactacaggcttaggactctgtgccaaaaatctctattttaaatgaaaatatttatataaaaatacatttattctgcttaacacaaattaaaactgacataaaattttatgataataacatgattcaagaaatgtgatgtagatttttgagaatgccaaaaatcaggtttcagaaaagctacagtatgaaatctgaaaagcaacagaaattgaaagtgaccttaaagaataaatttcctaatttttcccagtttcctatgtttataactattataaagagtttaactttctggaactgaaggagaaaacatgaaaatgtttatattgcttcttgttaagcaggtagaccaaattccgctttcagtaattcatccatacagaatttggatgactatgtataaaggaaaacttaaatcttaattattatcagtttaaattttttttgtttgttgaatgacaaaggcaataaaaataaatttgactttagctttttttctatactttcctctttttgtaattcttaaattctagtcactagtcattatgagagtattgactaaatattttcacaatctaaatattgtcacaatctaaatttctgtagtagagagagccgtagccctttgtaaaggctttcgttcgtccaaacaacacttgatccaaccaaagttccaatgtgactgtggatctttgataggtctttggtgttggttgtaacaaaatttgatttgaactacctataaatgaaaagtcggggtttattactttatatgtaatgctgagaggagactgttgggaacagttatgtcaatgagcaaactagaaattggcttcaaagtctaatacttttaaaagcatgtgttttgtgtatatgctcacaaaatgtctgtgaagagatttctttcagcttttgctcagctttatggtggggtgtactgttttatctgggcggtgagggtattgatttacataaaaactgtagacaaacacagtacgagtctcagcacgttttgcatttattgtactgcccaaattgtttttatgttaaaagtcacgtttcataatctgcaatatttttgtcaaagtgcacactgtactttcttcttaaaaacgtgattaaagagatcactttgtccggatgaa

SEQ ID NO: 184667 - DNA, 2584 bp, Homo sapiens
  Payload ID: 16364
  Gene Symbol: SLC9A3
  Gene Name: solute carrier family 9, subfamily A (NHE3, cation proton antiporter 3), member 3
  Uniprot ID: P48764
  ENST ID: ENST00000264938
  CDS Start-End: 11-2515
gcaggcggcaatgtggggactcggggcccggggccccgaccgggggctgctgctggcgctggcgctgggcgggctggcgcgggccgggggcgtcgaggtggagcccggcggcgcgcacggcgagagcgggggcttccaggtggtcaccttcgagtgggcccacgtgcaggatccctacgtcatcgcgctctggatcctcgtggccagcttggccaagatcgggttccacctgtcccacaaggtcaccagcgtggttcccgagagcgccctgctcatcgtgctgggcctggtgctgggcggcatcgtctgggcggccgaccacatcgcgtccttcacactgacgcccaccgtcttcttcttctacctgctgccccccatcgtgctggacgccggctacttcatgcccaaccgcctcttcttcggcaacctggggaccatcctgttgtacgccgtcgtgggtaccgtgtggaacgcggccaccaccgggctgtccctctacggcgtcttcctcagtgggctcatgggcgacctgcagattgggctgctggacttcctcctgtttggcagcctcatggcggctgtggacccggtggccgtcctggccgtgtttgaggaggtccatgtcaacgaggtcctgttcatcatcgtcttcggggagtcgctgctgaacgacgcagtcaccgtggttctgtacaatgtgtttgaatctttcgtggcgctgggaggtgacaacgtgactggcgtggactgcgtgaagggcatagtgtccttcttcgtggtgagcctggggggcacgctggtgggggtggtcttcgccttcctgctgtcgctggtgacgcgcttcaccaagcatgtgcgtatcatcgagcccggcttcgtgttcatcatctcctacctgtcctacctgacgtccgagatgctgtcgctgtcggccatcctcgccatcaccttctgtggcatctgctgtcagaagtatgtgaaggccaacatctcggagcagtcggccaccaccgtgcgctacaccatgaagatgctggccagcagcgccgagaccatcatcttcatgttcctgggtatctcggccgtgaacccgttcatctggacctggaacacggccttcgtgctcctgacgctggtcttcatctccgtgtaccgggccatcggtgtggtcctgcagacctggcttctgaaccgctaccgcatggtgcagctggagcccattgaccaggtggtcctgtcctacgggggcctgcgcggggccgtggcctttgccctggtggtgcttctggatggagacaaggtcaaggagaagaacctgttcgtcagcaccaccatcatcgtagtgttcttcaccgtcatcttccagggcctgaccatcaagcctctggtgcagtggctgaaggtgaagaggagcgagcaccgggaacctcggctcaacgagaagctgcacgggcgcgctttcgaccacatcctctcggccatcgaggacatatccggacagatcgggcacaattatctcagagacaagtggtcccacttcgacaggaagttcctcagcagggtcctcatgagacggtcggcccagaagtctcgagaccggatcctgaatgtcttccacgagctgaacctgaaggatgccatcagctacgtggctgagggagagcgccgcgggtccctggccttcatccgctcccccagcaccgacaacgtggtcaacgtggacttcacgccacgatcgtccaccgtggaggcctctgtctcctacctcctgagagaaaatgtcagcgctgtctgcctggacatgcagtctctggagcagcgacggcggagcatccgggacgcggaggacatggtcacgcaccacacgctacagcagtacctgtacaagccgcggcaggagtacaagcatctgtacagccgacacgagctcacgcccacggaggacgagaaacaggaccgggaaatcttccacaggaccatgcggaagcgcctggagtccttcaagtcgaccaagctggggctcaaccagaacaagaaggcggccaagctgtacaagcgggagcgtgcccagaagcggagaaacagcagcatccccaatgggaagctgcccatggagagccctgcgcagaatttcaccatcaaggagaaagacttggaactttcagacaccgaggagccccccaactatgatgaggagatgagtggggggatcgagttcctggctagtgtcaccaaggacacagcgtccgactcccctgcaggaattgacaaccctgtgttttctccggacgaggccctggaccgcagcctcctggccaggctgccgccctggctgtctcccggggagacggtggtcccctcgcagagggcccgcacgcagattccctactctcccggcaccttctgccgcctgatgcccttccgcctcagcagcaagtccgtggactccttcctgcaggcagacggccccgaggagcggccccccgccgccctccccgagtccacacacatgtgacaccggctccgacacgccgctaaccggccgctcgtccccgcgccacggtccgcccaccgccgccgccgc

SEQ ID NO: 184668 - DNA, 2504 bp, Homo sapiens
  Payload ID: 16364
  Gene Symbol: SLC9A3
  Gene Name: solute carrier family 9, subfamily A (NHE3, cation proton antiporter 3), member 3
  Uniprot ID: P48764
  ENST ID: ENST00000514375
  CDS Start-End: 9-2486
aggcggcaatgtggggactcggggcccggggccccgaccgggggctgctgctggcgctggcgctgggcgggctggcgcgggccgggggcgtcgaggtggagcccggcggcgcgcacggcgagagcgggggcttccaggtggtcaccttcgagtgggcccacgtgcaggatccctacgtcatcgcgctctggatcctcgtggccagcttggccaagatcgggttccacctgtcccacaaggtcaccagcgtggttcccgagagcgccctgctcatcgtgctgggcctggtgctgggcggcatcgtctgggcggccgaccacatcgcgtccttcacactgacgcccaccgtcttcttcttctacctgctgccccccatcgtgctggacgccggctacttcatgcccaaccgcctcttcttcggcaacctggggaccatcctgttgtacgccgtcgtgggtaccgtgtggaacgcggccaccaccgggctgtccctctacggcgtcttcctcagtgggctcatgggcgacctgcagattgggctgctggacttcctcctgtttggcagcctcatggcggctgtggacccggtggccgtcctggccgtgtttgaggaggtccatgtcaacgaggtcctgttcatcatcgtcttcggggagtcgctgctgaacgacgcagtcaccgtggttctgtacaatgtgtttgaatctttcgtggcgctgggaggtgacaacgtgactggcgtggactgcgtgaagggcatagtgtccttcttcgtggtgagcctggggggcacgctggtgggggtggtcttcgccttcctgctgtcgctggtgacgcgcttcaccaagcatgtgcgtatcatcgagcccggcttcgtgttcatcatctcctacctgtcctacctgacgtccgagatgctgtcgctgtcggccatcctcgccatcaccttctgtggcatctgctgtcagaagtatgtgaaggccaacatctcggagcagtcggccaccaccgtgcgctacaccatgaagatgctggccagcagcgccgagaccatcatcttcatgttcctgggtatctcggccgtgaacccgttcatctggacctggaacacggccttcgtgctcctgacgctggtcttcatctccgtgtaccgggccatcggtgtggtcctgcagacctggcttctgaaccgctaccgcatggtgcagctggagcccattgaccaggtggtcctgtcctacgggggcctgcgcggggccgtggcctttgccctggtggtgcttctggatggagacaaggtcaaggagaagaacctgttcgtcagcaccaccatcatcgtagtgttcttcaccgtcatcttccagtggctgaaggtgaagaggagcgagcaccgggaacctcggctcaacgagaagctgcacgggcgcgctttcgaccacatcctctcggccatcgaggacatatccggacagatcgggcacaattatctcagagacaagtggtcccacttcgacaggaagttcctcagcagggtcctcatgagacggtcggcccagaagtctcgagaccggatcctgaatgtcttccacgagctgaacctgaaggatgccatcagctacgtggctgagggagagcgccgcgggtccctggccttcatccgctcccccagcaccgacaacgtggtcaacgtggacttcacgccacgatcgtccaccgtggaggcctctgtctcctacctcctgagagaaaatgtcagcgctgtctgcctggacatgcagtctctggagcagcgacggcggagcatccgggacgcggaggacatggtcacgcaccacacgctacagcagtacctgtacaagccgcggcaggagtacaagcatctgtacagccgacacgagctcacgcccacggaggacgagaaacaggaccgggaaatcttccacaggaccatgcggaagcgcctggagtccttcaagtcgaccaagctggggctcaaccagaacaagaaggcggccaagctgtacaagcgggagcgtgcccagaagcggagaaacagcagcatccccaatgggaagctgcccatggagagccctgcgcagaatttcaccatcaaggagaaagacttggaactttcagacaccgaggagccccccaactatgatgaggagatgagtggggggatcgagttcctggctagtgtcaccaaggacacagcgtccgactcccctgcaggaattgacaaccctgtgttttctccggacgaggccctggaccgcagcctcctggccaggctgccgccctggctgtctcccggggagacggtggtcccctcgcagagggcccgcacgcagattccctactctcccggcaccttctgccgcctgatgcccttccgcctcagcagcaagtccgtggactccttcctgcaggcagacggccccgaggagcggccccccgccgccctccccgagtccacacacatgtgacaccggctccgacacgcc

SEQ ID NO: 184669 - DNA, 219 bp, Homo sapiens
  Payload ID: 16364
  Gene Symbol: SLC9A3
  Gene Name: solute carrier family 9, subfamily A (NHE3, cation proton antiporter 3), member 3
  ENST ID: ENST00000626862
  CDS Start-End: 9-219
aggcggcaatgtggggactcggggcccggggccccgaccgggggctgctgctggcgctggcgctgggcgggctggcgcgggccgggggcgtcgaggtggagcccggcggcgcgcacggcgagagcgggggcttccaggtggtcaccttcgagtgggcccacgtgcaggatccctacgtcatcgcgctctggatcctcgtggccagcttggccaagatcg

SEQ ID NO: 184670 - DNA, 221 bp, Homo sapiens
  Payload ID: 16364
  Gene Symbol: SLC9A3
  Gene Name: solute carrier family 9, subfamily A (NHE3, cation proton antiporter 3), member 3
  ENST ID: ENST00000628307
  CDS Start-End: 11-221
gcaggcggcaatgtggggactcggggcccggggccccgaccgggggctgctgctggcgctggcgctgggcgggctggcgcgggccgggggcgtcgaggtggagcccggcggcgcgcacggcgagagcgggggcttccaggtggtcaccttcgagtgggcccacgtgcaggatccctacgtcatcgcgctctggatcctcgtggccagcttggccaagatcg

SEQ ID NO: 184671 - DNA, 1969 bp, Homo sapiens
  Payload ID: 16365
  Gene Symbol: SLC9A3R1
  Gene Name: solute carrier family 9, subfamily A (NHE3, cation proton antiporter 3), member 3 regulator 1
  Uniprot ID: O14745
  ENST ID: ENST00000262613
  CDS Start-End: 196-1272
gtctgtggtcctctctcggctcctcgcggctcgcggcggccgacggttcctgggacacctgcttgcttggcccgtccggcggctcagggcttctctgctgcgctcccggttcgctggacgggaagaagggctgggccgtcccgtcccgtccccatcggaaccccaagtcgcgccgctgacccgtcgcagggcgagatgagcgcggacgcagcggccggggcgcccctgccccggctctgctgcctggagaagggtccgaacggctacggcttccacctgcacggggagaagggcaagttgggccagtacatccggctggtggagcccggctcgccggccgagaaggcggggctgctggcgggggaccggctggtggaggtgaacggcgaaaacgtggagaaggagacccaccagcaggtggtgagccgcatccgcgccgcactcaacgccgtgcgcctgctggtggtcgaccccgagacggacgagcagctgcagaagctcggcgtccaggtccgagaggagctgctgcgcgcccaggaagcgccggggcaggccgagccgccggccgccgccgaggtgcagggggctggcaacgaaaatgagcctcgcgaggccgacaagagccacccggagcagcgcgagcttcggcctcggctctgtaccatgaagaagggccccagtggctatggcttcaacctgcacagcgacaagtccaagccaggccagttcatccggtcagtggacccagactccccggctgaggcttcagggctccgggcccaggatcgcattgtggaggtgaacggggtctgcatggaggggaagcagcatggggacgtggtgtccgccatcagggctggcggggacgagaccaagctgctggtggtggacagggaaactgacgagttcttcaagaaatgcagagtgatcccatctcaggagcacctgaatggtcccctgcctgtgcccttcaccaatggggagatacagaaggagaacagtcgtgaagccctggcagaggcagccttggagagccccaggccagccctggtgagatccgcctccagtgacaccagcgaggagctgaattcccaagacagccccccaaaacaggactccacagcgccctcgtctacctcctcctccgaccccatcctagacttcaacatctccctggccatggccaaagagagggcccaccagaaacgcagcagcaaacgggccccgcagatggactggagcaagaaaaacgaactcttcagcaacctctgagcgccctgctgccacccagtgactggcagggccgagccagcattccaccccacctttttccttctccccaattactcccctgaatcaatgtacaaatcagcacccacatcccctttcttgacaaatgatttttctagagaactatgttcttccctgactttagggaaggtgaatgtgttcccgtcctcccgcagtcagaaaggagactctgcctccctcctcctcactgagtgcctcatcctaccgggtgtccctttgccaccctgcctgggacatcgctggaacctgcaccatgccaggatcatgggaccaggcgagagggcaccctcccttcctcccccatgtgataaatgggtccagggctgatcaaagaactctgactgcagaactgccgctctcagtggacagggcatctgttaccctgagacctgtggcagacacgtcttgttttcatttgatttttgttaagagtgcagtattgcagagtctagaggaatttttgtttccttgattaacatgattttcctggttgttacatccagggcatggcagtggcctcagccttaaacttttgttcctactcccaccctcagcgaactgggcagcacggggagggtttggctacccctgcccatccctgagccaggtaccaccattgtaaggaaacactttcagaaattcagctggttcctccaaa

SEQ ID NO: 184672 - DNA, 519 bp, Homo sapiens
  Payload ID: 16365
  Gene Symbol: SLC9A3R1
  Gene Name: solute carrier family 9, subfamily A (NHE3, cation proton antiporter 3), member 3 regulator 1
  ENST ID: ENST00000581356
  CDS Start-End: 1-107
gcggggacgagaccaagctgctggtggtggacagggaaactgacgagttcttcaagaaatgcagagtgatcccatctcaggagcacctgaatggagaacagtcgtgaagccctggcagaggcagccttggagagccccaggccagccctggtgagatccgcctccagtgacaccagcgaggagctgaattcccaagacagccccccaaaacaggactccacagcgccctcgtctacctcctcctccgaccccatcctagacttcaacatctccctggccatggccaaagagagggcccaccagaaacgcagcagcaaacgggccccgcagatggactggagcaagaaaaacgaactcttcagcaacctctgagcgccctgctgccacccagtgactggcagggccgagccagcattccaccccacctttttccttctccccaattactcccctgaatcaatgtacaaatcagcacccacatcccctttcttgacaaatgatttttctagagaactatgt

SEQ ID NO: 184673 - DNA, 841 bp, Homo sapiens
  Payload ID: 16365
  Gene Symbol: SLC9A3R1
  Gene Name: solute carrier family 9, subfamily A (NHE3, cation proton antiporter 3), member 3 regulator 1
  ENST ID: ENST00000583369
  CDS Start-End: 196-841
gtctgtggtcctctctcggctcctcgcggctcgcggcggccgacggttcctgggacacctgcttgcttggcccgtccggcggctcagggcttctctgctgcgctcccggttcgctggacgggaagaagggctgggccgtcccgtcccgtccccatcggaaccccaagtcgcgccgctgacccgtcgcagggcgagatgagcgcggacgcagcggccggggcgcccctgccccggctctgctgcctggagaagggtccgaacggctacggcttccacctgcacggggagaagggcaagttgggccagtacatccggctggtggagcccggctcgccggccgagaaggcggggctgctggcgggggaccggctggtggaggtgaacggcgaaaacgtggagaaggagacccaccagcaggtggtgagccgcatccgcgccgcactcaacgccgtgcgcctgctggtggtcgaccccgagacggacgagcagctgcagaagctcggcgtccaggtccgagaggagctgctgcgcgcccaggaagcgccggggcaggccgagccgccggccgccgccgaggtgcagggggctggcaacgaaaatgagcctcgcgaggccgacaagagccacccggagcaggagaacagtcgtgaagccctggcagaggcagccttggagagccccaggccagccctggtgagatccgcctccagtgacaccagcgaggagctgaattcccaagacagccccccaaaacaggactccacagcgccctcgtctacctcctcctccgaccccatcctagacttcaacatctccctggccatggccaaagagagggccc

SEQ ID NO: 184674 - DNA, 1285 bp, Homo sapiens
  Payload ID: 16365
  Gene Symbol: SLC9A3R1
  Gene Name: solute carrier family 9, subfamily A (NHE3, cation proton antiporter 3), member 3 regulator 1
  Uniprot ID: O14745
  ENST ID: ENST00000413388
  CDS Start-End: 37-645
tccctgcagcgcgagcttcggcctcggctctgtaccatgaagaagggccccagtggctatggcttcaacctgcacagcgacaagtccaagccaggccagttcatccggtcagtggacccagactccccggctgaggcttcagggctccgggcccaggatcgcattgtggaggtgaacggggtctgcatggaggggaagcagcatggggacgtggtgtccgccatcagggctggcggggacgagaccaagctgctggtggtggacagggaaactgacgagttcttcaagaaatgcagagtgatcccatctcaggagcacctgaatggtcccctgcctgtgcccttcaccaatggggagatacagaaggagaacagtcgtgaagccctggcagaggcagccttggagagccccaggccagccctggtgagatccgcctccagtgacaccagcgaggagctgaattcccaagacagccccccaaaacaggactccacagcgccctcgtctacctcctcctccgaccccatcctagacttcaacatctccctggccatggccaaagagagggcccaccagaaacgcagcagcaaacgggccccgcagatggactggagcaagaaaaacgaactcttcagcaacctctgagcgccctgctgccacccagtgactggcagggccgagccagcattccaccccacctttttccttctccccaattactcccctgaatcaatgtacaaatcagcacccacatcccctttcttgacaaatgatttttctagagaactatgttcttccctgactttagggaaggtgaatgtgttcccgtcctcccgcagtcagaaaggagactctgcctccctcctcctcactgagtgcctcatcctaccgggtgtccctttgccaccctgcctgggacatcgctggaacctgcaccatgccaggatcatgggaccaggcgagagggcaccctcccttcctcccccatgtgataaatgggtccagggctgatcaaagaactctgactgcagaactgccgctctcagtggacagggcatctgttaccctgagacctgtggcagacacgtcttgttttcatttgatttttgttaagagtgcagtattgcagagtctagaggaatttttgtttccttgattaacatgattttcctggttgttacatccagggcatggcagtggcctcagccttaaacttttgttcctactcccaccctcagcgaactgggcagcacggggagggtttggctacccctgcccatccctg

SEQ ID NO: 184675 - DNA, 1564 bp, Homo sapiens
  Payload ID: 16366
  Gene Symbol: SLC9A3R2
  Gene Name: solute carrier family 9, subfamily A (NHE3, cation proton antiporter 3), member 3 regulator 2
  Uniprot ID: Q15599
  ENST ID: ENST00000432365
  CDS Start-End: 79-1059
gccgggtgcccagcgccgccgccgcccccgagctcccccgcgcccctgcccgcgggcggccggtgggcagcgggcgccatggccgcgccggagccgctgcggccgcgcctgtgccgcttggtgcgcggagagcagggctacggcttccacctgcacggcgagaagggccgccgcgggcagttcatccggcgcgtggaacccggttcccccgccgaggccgccgcgctgcgcgctggggaccgcctggtcgaggtcaacggcgtcaacgtggagggcgagacgcaccaccaggtggtgcaaaggatcaaggctgtggaggggcagactcggctgctggtggtggaccaggagacagatgaggagctccgccggcggcagctgacctgtaccgaggagatggcccagcgagggctcccacccgcccacgacccctgggagccgaagccagactgggcacacaccggcagccacagctccgaagctggcaagaaggatgtcagtgggcccctgagggagctgcgccctcggctctgccacctgcgaaagggacctcagggctatgggttcaacctgcatagtgacaagtcccggcccggccagtacatccgctctgtggacccgggctcacctgccgcccgctctggcctccgcgcccaggaccggctcattgaggtgaacgggcagaatgtggagggactgcgccatgctgaggtggtggccagcatcaaggcacgggaggacgaggcccggctgctggtcgtggaccccgagacagatgaacacttcaagcggcttcgggtcacacccaccgaggagcacgtggaaggtcctctgccgtcacccgtcaccaatggaaccagccctgcccagctcaatggtggctctgcgtgctcgtcccgaagtgacctgcctggttccgacaaggacactgaggagagcggcctccacctgagccccacggcggccgaggccaaggagaaggctcgagccatgcgagtcaacaagcgcgcgccacagatggactggaacaggaagcgtgaaatcttcagcaacttctgagccccttcctgcctgtctcgggaccctgggacccctcccgcacggaccttgggcctcagcctgccccgagctcccccagcctcagtggactggagggtggtcctgccattgcccagaaatcagccccagccccggtgagcccccatcctgcccctgcccaccaggtactgggggcctgtggcagcaagatagggggagagagacccagagatgtgagagagagtcagagacagagacagagagagagagagagagacacagagagagacagagagagagcgagcgagcgcgcggcagccgcggggcgagggcctttgctgctctgccggggcctgctgactgaaaggaatttgtgtttttgctttttttccaaaaagatctccagctccacacatgtttccacttaataccagagacccccccccttcccctcccccttcccctcccccttgggacgcgctctaaataattgcaataaaacaaacctttctctgcaaaccatttc

SEQ ID NO: 184676 - DNA, 2194 bp, Homo sapiens
  Payload ID: 16366
  Gene Symbol: SLC9A3R2
  Gene Name: solute carrier family 9, subfamily A (NHE3, cation proton antiporter 3), member 3 regulator 2
  Uniprot ID: Q15599
  ENST ID: ENST00000424542
  CDS Start-End: 139-1152
ggagcccgagccggatcccgaggcgacgggagccgaacaggagccgccgctgaagccaccgccgggtgcccagcgccgccgccgcccccgagctcccccgcgcccctgcccgcgggcggccggtgggcagcgggcgccatggccgcgccggagccgctgcggccgcgcctgtgccgcttggtgcgcggagagcagggctacggcttccacctgcacggcgagaagggccgccgcgggcagttcatccggcgcgtggaacccggttcccccgccgaggccgccgcgctgcgcgctggggaccgcctggtcgaggtcaacggcgtcaacgtggagggcgagacgcaccaccaggtggtgcaaaggatcaaggctgtggaggggcagactcggctgctggtggtggaccaggagacagatgaggagctccgccggcggcagctgacctgtaccgaggagatggcccagcgagggctcccacccgcccacgacccctgggagccgaagccagactgggcacacaccggcagccacagctccgaagctggcaagaaggatgtcagtgggcccctgagggagctgcgccctcggctctgccacctgcgaaagggacctcagggctatgggttcaacctgcatagtgacaagtcccggcccggccagtacatccgctctgtggacccgggctcacctgccgcccgctctggcctccgcgcccaggaccggctcattgaggtgaacgggcagaatgtggagggactgcgccatgctgaggtggtggccagcatcaaggcacgggaggacgaggcccggctgctggtcgtggaccccgagacagatgaacacttcaagcggcttcgggtcacacccaccgaggagcacgtggaaggtcctctgccgtcacccgtcaccaatggaaccagccctgcccagctcaatggtggctctgcgtgctcgtcccgaagtgacctgcctggttccgacaaggacactgaggatggcagtgcctggaagcaagatcccttccaggagagcggcctccacctgagccccacggcggccgaggccaaggagaaggctcgagccatgcgagtcaacaagcgcgcgccacagatggactggaacaggaagcgtgaaatcttcagcaacttctgagccccttcctgcctgtctcgggaccctgggacccctcccgcacggaccttgggcctcagcctgccccgagctcccccagcctcagtggactggagggtggtcctgccattgcccagaaatcagccccagccccggtgagcccccatcctgcccctgcccaccaggtactgggggcctgtggcagcaagatagggggagagagacccagagatgtgagagagagtcagagacagagacagagagagagagagagagacacagagagagacagagagagagcgagcgagcgcgcggcagccgcggggcgagggcctttgctgctctgccggggcctgctgactgaaaggaatttgtgtttttgctttttttccaaaaagatctccagctccacacatgtttccacttaataccagagacccccccccttcccctcccccttcccctcccccttgggacgcgctctaaataattgcaataaaacaaacctttctctgcaaaccatttcctccccgccccctcccctcagcagcggccgtcctgagtgggagtccctgggacttcccagtggccaagttggggcgcccagcctcttcgtggggaccttgggtaaggccagggaggcctgatgtggccgtaggagctgcccctgcccacctgccctggtgtgggggtccctaggccacaccctgctccccacccagctaccctgtgcgcctgtgccctgctgggggcctgggctctccgaggggcctgaggatggaggccccacgtccccgaggagggcggcctctggacaggcccctcattccgcgcggcagctcccaggcctggggaacgtaggtgtgtgagagcggcacccgggaaggacgcctggcctctggctcagccctgcttggcgggctcccccgtggacaccctgttgactttgcacttccctcccgggccccgcacccccgaaccgaccaccgatcgaccggcaccgctgttgcctcgtaagccatagcgcatgcgcgctctcaggataaacaggccctgcctggga

SEQ ID NO: 184677 - DNA, 578 bp, Homo sapiens
  Payload ID: 16366
  Gene Symbol: SLC9A3R2
  Gene Name: solute carrier family 9, subfamily A (NHE3, cation proton antiporter 3), member 3 regulator 2
  ENST ID: ENST00000567504
  CDS Start-End: 126-578
agagagatggaagcggccggccgggcgggagcctgaagcagccttacccaggaattgcaggggttggggtggcgagcagtcgcggcgcctcagcctaagtggcttttaggggcagctgccgggatatgggcacccagggggccatggcccaggaggctgcccagaggcgagccctgtgcttgggtgggggcaggggagcccagcccagggccccggagagacgagagggagaggaggactgcgccaagcctgcttctacggctcacatggggaattgcctgggctggctgtgcctgacccctgggaaccaggtggtgcaaaggatcaaggctgtggaggggcagactcggctgctggtggtggaccaggagacagatgaggagctccgccggcggcagctgacctgtaccgaggagatggcccagcgagggctcccacccgcccacgacccctgggagccgaagccagactgggcacacaccggcagccacagctccgaagctggcaagaaggatgtcagtgggcccctgagggagctgcgccctcggctctgccacctgcgaaagggacctcagggc

SEQ ID NO: 184678 - DNA, 759 bp, Homo sapiens
  Payload ID: 16366
  Gene Symbol: SLC9A3R2
  Gene Name: solute carrier family 9, subfamily A (NHE3, cation proton antiporter 3), member 3 regulator 2
  ENST ID: ENST00000565855
  CDS Start-End: 89-759
agataagtggggtggcagcctgggtcggccagagagttcaggccaccccggccggacgcctgccacttgctgtcactgtgccgctgtcatggcacgctccgggagtgccacgccacctgcccgggctccgggagcccctccacggagcccaccccagaggctggatgtcagtgggcccctgagggagctgcgccctcggctctgccacctgcgaaagggacctcagggctatgggttcaacctgcatagtgacaagtcccggcccggccagtacatccgctctgtggacccgggctcacctgccgcccgctctggcctccgcgcccaggaccggctcattgaggtgaacgggcagaatgtggagggactgcgccatgctgaggtggtggccagcatcaaggcacgggaggacgaggcccggctgctggtcgtggaccccgagacagatgaacacttcaagcggcttcgggtcacacccaccgaggagcacgtggaaggtcctctgccgtcacccgtcaccaatggaaccagccctgcccagctcaatggtggctctgcgtgctcgtcccgaagtgacctgcctggttccgacaaggacactgaggatggcagtgcctggaagcaagatcccttccaggagagcggcctccacctgagccccacggcggccgaggccaaggagaaggctcgagccatgcgagtcaacaagcgcgcgccacagatggactggaacaggaagcgtgaaatcttcagcaactt

SEQ ID NO: 184679 - DNA, 1037 bp, Homo sapiens
  Payload ID: 16366
  Gene Symbol: SLC9A3R2
  Gene Name: solute carrier family 9, subfamily A (NHE3, cation proton antiporter 3), member 3 regulator 2
  ENST ID: ENST00000563587
  CDS Start-End: 161-856
atgtgctgcccggaatgtgggccactgacccgctcctatcgcccattcgccccaggtggtgcaaaggatcaaggctgtggaggggcagactcggctgctggtggtggaccaggagacagatgaggagctccgccggcggcagctgacctgtaccgaggagatggcccagcgagggctcccacccgcccacgacccctgggagccgaagccagactgggcacacaccggcagccacagctccgaagctggcaagaaggatgtcagtgggcccctgagggagctgcgccctcggctctgccacctgcgaaagggacctcagggctatgggttcaacctgcatagtgacaagtcccggcccggccagtacatccgctctgtggacccgggctcacctgccgcccgctctggcctccgcgcccaggaccggctcattgaggtgaacgggcagaatgtggagggactgcgccatgctgaggtggtggccagcatcaaggcacgggaggacgaggcccggctgctggtcgtggaccccgagacagatgaacacttcaagcggcttcgggtcacacccaccgaggagcacgtggaaggtcctctgccgtcacccgtcaccaatggaaccagccctgcccagctcaatggtggctctgcgtgctcgtcccgaagtgacctgcctggttccgacaaggacactgaggatggcagtgcctggaagcaagatcccttccaggagagcggcctccacctgagccccacggcggccgaggccaaggagaaggctcgagccatgcgagtcaacaagcgcgcgccacagatggactggaacaggaagcgtgaaatcttcagcaacttctgagccccttcctgcctgtctcgggaccctgggacccctcccgcacggaccttgggcctcagcctgccccgagctcccccagcctcagtggactggagggtggtcctgccattgcccagaaatcagccccagccccggtgagcccccatcctgcccctgcccaccaggtactgggggcctgtgg

SEQ ID NO: 184680 - DNA, 1199 bp, Homo sapiens
  Payload ID: 16366
  Gene Symbol: SLC9A3R2
  Gene Name: solute carrier family 9, subfamily A (NHE3, cation proton antiporter 3), member 3 regulator 2
  Uniprot ID: Q15599
  ENST ID: ENST00000566198
  CDS Start-End: 82-762
tggggtggcagcctgggtcggccagagagttcaggccaccccggccggacgcctgccacttgctgtcactgtgccgctgtcatggcacgctccgggagtgccacgccacctgcccgggctccgggagcccctccacggagcccaccccagaggctggtacaggatgtcagtgggcccctgagggagctgcgccctcggctctgccacctgcgaaagggacctcagggctatgggttcaacctgcatagtgacaagtcccggcccggccagtacatccgctctgtggacccgggctcacctgccgcccgctctggcctccgcgcccaggaccggctcattgaggtgaacgggcagaatgtggagggactgcgccatgctgaggtggtggccagcatcaaggcacgggaggacgaggcccggctgctggtcgtggaccccgagacagatgaacacttcaagcggcttcgggtcacacccaccgaggagcacgtggaaggtcctctgccgtcacccgtcaccaatggaaccagccctgcccagctcaatggtggctctgcgtgctcgtcccgaagtgacctgcctggttccgacaaggacactgaggatggcagtgcctggaagcaagatcccttccaggagagcggcctccacctgagccccacggcggccgaggccaaggagaaggctcgagccatgcgagtcaacaagcgcgcgccacagatggactggaacaggaagcgtgaaatcttcagcaacttctgagccccttcctgcctgtctcgggaccctgggacccctcccgcacggaccttgggcctcagcctgccccgagctcccccagcctcagtggactggagggtggtcctgccattgcccagaaatcagccccagccccggtgagcccccatcctgcccctgcccaccaggtactgggggcctgtggcagcaagatagggggagagagacccagagatgtgagagagagtcagagacagagacagagagagagagagagagacacagagagagacagagagagagcgagcgagcgcgcggcagccgcggggcgagggcctttgctgctctgccggggcctgctgactgaaaggaatttgtgtttttgctttttttccaaaaagatctccagctccacacatgtttccacttaataccagagacccccccccttcccctccccc

SEQ ID NO: 184681 - DNA, 738 bp, Homo sapiens
  Payload ID: 16366
  Gene Symbol: SLC9A3R2
  Gene Name: solute carrier family 9, subfamily A (NHE3, cation proton antiporter 3), member 3 regulator 2
  ENST ID: ENST00000561844
  CDS Start-End: 1-500
gcagccacagctccgaagctggcaagaaggatgtcagtgggcccctgagggagctgcgccctcggctctgccacctgcgaaagggacctcagggctatgggttcaacctgcatagtgacaagtcccggcccggccagtacatccgctctgtggacccgggctcacctgccgcccgctctggcctccgcgcccaggaccggctcattgaggtgaacgggcagaatgtggagggactgcgccatgctgaggtggtggccagcatcaaggcacgggaggacgaggcccggctgctggtcgtggaccccgagacagatgaacacttcaagcggcttcgggtcacacccaccgaggagcacgtggaaggtcctctgccgtcacccgtcaccaatggaaccagccctgcccagctcaatggtggctctgcgtgctcgtcccgaagtgacctgcctggttccgacaaggacactgaggaggggccaccgtctggggtgtgggactagggctcactccagacaccccacccaccgtgctcaccccaggatggcagtgcctggaagcaagatcccttccaggagagcggcctccacctgagccccacggcggccgaggccaaggagaaggctcgagccatgcgagtcaacaagcgcgcgccacagatggactggaacaggaagcgtgaaatcttcagcaacttctgagccccttcctgcctgtctcgggaccctgggacccctcccg

SEQ ID NO: 184682 - DNA, 4138 bp, Homo sapiens
  Payload ID: 16367
  Gene Symbol: SLC9A4
  Gene Name: solute carrier family 9, subfamily A (NHE4, cation proton antiporter 4), member 4
  Uniprot ID: Q6AI14
  ENST ID: ENST00000295269
  CDS Start-End: 458-2854
agacagggaaggtttcctttcctcattagaaggactccagtgatctgtggaatgagcactacagtatccttttaaattttcacccacaagacaaagccagtatgcagtgaaatgaggaaatgcctttaagtgaagagatttttatttctttcataaattgctcaagccatgattggatggaggtcctccaggtagctccatggactttaacaagtctattgaataactgcatttgagttggaagctgagttgcctgaacacaaacgatttaaaccagattagaaagtgtctacatacagagctcaataacacactcggaatcttcttgggaggacccacagactgtacctatattacttttgacccaggtggatgcagtcactctctagaagcctccccgacttcagatgtgtggcacacatccacacaggggtgtaggtaggagaagcccacaggaatggctctgcagatgttcgtgacttacagtccttggaattgtttgctactgctagtggctcttgagtgttctgaagcatcttctgatttgaatgaatctgcaaattccactgctcagtatgcatctaacgcttggtttgctgctgccagctcagagccagaggaagggatatctgtttttgaactggattatgactatgtgcaaattccttatgaggtcactctctggatacttctagcatcccttgcaaaaataggcttccacctctaccacaggctgccaggcctcatgccagaaagctgcctcctcatcctggtgggggcgctggtgggcggcatcatcttcggcaccgaccacaaatcgcctccggtcatggactccagcatctacttcctgtatctcctgccacccatcgttctggagggcggctacttcatgcccacccggcccttctttgagaacatcggctccatcctgtggtgggcagtattgggggccctgatcaacgccttgggcattggcctctccctctacctcatctgccaggtgaaggcctttggcctgggcgacgtcaacctgctgcagaacctgctgttcggcagcctgatctccgccgtggacccagtggccgtgctagccgtgtttgaggaagcgcgcgtgaacgagcagctctacatgatgatctttggggaggccctgctcaatgatggcattactgtggtcttatacaatatgttaattgcctttacaaagatgcataaatttgaagacatagaaactgtcgacattttggctggatgtgcccgattcatcgttgtggggcttggaggggtattgtttggcatcgtttttggatttatttctgcatttatcacacgtttcactcagaatatctctgcaattgagccactcatcgtcttcatgttcagctatttgtcttacttagctgctgaaaccctctatctctccggcatcctggcaatcacagcctgcgcagtaacaatgaaaaagtacgtggaagaaaacgtgtcccagacatcatacacgaccatcaagtacttcatgaagatgctgagcagcgtcagcgagaccttgatcttcatcttcatgggtgtgtccactgtgggcaagaatcacgagtggaactgggccttcatctgcttcaccctggccttctgccaaatctggagagccatcagcgtatttgctctcttctatatcagtaaccagtttcggactttccccttctccatcaaggaccagtgcatcattttctacagtggtgttcgaggagctggaagtttttcacttgcatttttgcttcctctgtctctttttcctaggaagaaaatgtttgtcactgctactctagtagttatatactttactgtatttattcagggaatcacagttggccctctggtcaggtacctggatgttaaaaaaaccaataaaaaagaatccatcaatgaagagcttcatattcgtctgatggatcacttaaaggctggaatcgaagatgtgtgtgggcactggagtcactaccaagtgagagacaagtttaagaagtttgatcatagatacttacggaaaatcctcatcagaaagaacctacccaaatcaagcattgtttctttgtacaagaagctggaaatgaagcaagccatcgagatggtggagactgggatactgagctctacagctttctccataccccatcaggcccagaggatacaaggaatcaaaagactttcccctgaagatgtggagtccataagggacattctgacatccaacatgtaccaagttcggcaaaggaccctgtcctacaacaaatacaacctcaaaccccaaacaagtgagaagcaggctaaagagattctgatccgccgccagaacaccttaagggagagcatgaggaaaggtcacagcctgccctggggaaagccggctggcaccaagaatatccgctacctctcctacccctacgggaatcctcagtctgcaggaagagacacaagggctgctgggttctcagatgatgacagcagtgatccaggatccccatccatcacgttcagcgcatgctctcggatagggtcacttcagaagcaagaggcacaagaaataataccaatgaagagcctacacagaggaaggaaggcattcagctttggttatcaaagaaacacaagccaagaagagtacttgggtggagtaaggagggtggccttaagacccaaacctctgtttcatgcagtggatgaggagggtgagtctggaggggagagtgagggcaaggcctctttggttgaggttcggtcgaggtggacagctgaccatggacacggcagggaccatcacaggtcccatagtcctttgctccaaaaaaaatagtgttattgtccacaagattgttttggtgtttctcaagagtctgtcttcctataactgtgaaaggaggatttctggaattcagaagagagctattgagtttgctgtgttgaagctattaaacatggatctataagcagcaggaagattttttccaaggactgggagcaaacttgcaggctctgccatgtacttattgtggggtacctttagatgaattccctgtgagtgagagaagttgatcaccccaggaattagtcactaagaattcctaagaactttctatcaaaagcattggatccaagccatatattgaaatacaagcgtgattaatcagtaattcacattgccgatatgcatatgcaacttataatcaaatagaactagaagagactttgaagtcacctgactcagccccttgtgtttacagacaaggacatgtagtccaaggttgcatggtgagttcacagtcggattgtcctccctccaaactgaaactaatttgattttgatttcatattcaatatgcaataattatgttctatcagagataaaatttgttatgaatttgctttatttaatcagtagcaatgatagatgtgatgcatactataggattaatctgtgaacaatgggtttacggtctatttcataattgaaatatttattttaaaaatgaatattagaaacaaaacagccataaacagagtttaatagcaatgatgttaacaacaagtatttataaggggtgcatttgtagggtgtgacattttaccctagggtataaaactatttttcttttattattattattattattattatactttaagttttagggtacatgtgcacattgtgcaggttagttacatatgtatacatgtgccatgctggtgtgctgcacccgctaactcgtcatctagcattaggtgtatctcccaatgctatccctcccccctccccccaccccacaacagtccccagagtgtgatgttccccttcctgtgtccatgtgatctcattgttcaattcccacctatgagtgagaatatgcggtgtttggttttttgttcttgggatagtttactgagaatgatgatttccaatttcatccatgtccctacaaaggacatgaactcatcattttttatggctgcatggtattccatggtgtatatgtgccacattttcttaatccagtctatcattgttggacatttgggttggttccaagtctttgctattgtgaataatgccgcaataaacatacgtgtgcatgtgtcttta

SEQ ID NO: 184683 - DNA, 3736 bp, Homo sapiens
  Payload ID: 16368
  Gene Symbol: SLC9A5
  Gene Name: solute carrier family 9, subfamily A (NHE5, cation proton antiporter 5), member 5
  Uniprot ID: Q14940
  ENST ID: ENST00000299798
  CDS Start-End: 66-2756
gtggcggcggcgacgcggggccggcggccgtgcggtgccgggagggcggctgggcaggcggcaggatgctgcgcgccgccctgtccctgctcgcgctgcccctggcgggggcggccgaagagcccacccagaagccagagtccccgggcgagcctcccccaggcttagagctcttccgctggcagtggcacgaggtggaggcgccctacctggtggccctgtggatcctggtggccagtctggccaaaatcgtgtttcacctgtctcggaaagtaacatctctggtccctgagagctgcctgctgattttgctgggcctggtgctagggggaattgttttggctgtggccaagaaagctgagtaccagctggagccaggcaccttcttcctcttcctgctgcctcctattgtgttggactcaggctatttcatgcctagcaggctgttctttgacaacttgggtgccatcctcacctatgccgtggtaggcacactctggaatgccttcacaacaggcgctgccctctggggcttgcagcaggctggacttgtagcccctagggtgcaggctggcttactggacttcctgctgtttgggagcctcatctcggcggtggaccccgtggccgtgctagctgtctttgaggaggtgcacgtcaatgagactctctttatcatcgtctttggcgagtccctgctcaacgatgctgtcaccgtggtgctgtacaaggtctgcaactcctttgtggagatgggctctgccaatgtgcaggccactgactacctgaagggagtcgcctccctgtttgtggtcagtctgggcggggcagccgtgggcttagtctttgccttcctcctggccctgaccacacgcttcaccaagcgggtccgcatcatcgagccgctgctggtcttcctcctcgcctacgcagcctacctcactgctgaaatggcctcgctctccgccattcttgcggtgaccatgtgtggcctgggctgtaagaagtacgtggaggccaacatctcccataagtcacgcacaactgtcaaatatacaatgaagactctagccagctgtgctgagaccgtgatcttcatgctgcttggcatctcagccgtggactcttctaagtgggcctgggattctgggctggtgctgggcaccctcatcttcatcctgttcttccgagccctcggcgtagtcctgcagacctgggtgctgaatcagttccggctagtccctctggacaagattgaccaagtggtgatgtcctatgggggcctgcggggggctgtggcctttgctctcgtcatcctactggataggaccaaggtccctgccaaggactactttgtagccaccactattgtagtggtcttcttcacagtcatcgtgcagggcttgaccatcaagccactggtcaaatggctgaaggtgaagaggagtgagcatcacaaacccaccctgaaccaggagctgcatgaacacacttttgaccacattctggctgcagtggaggacgttgtggggcaccatggctaccactactggagggacaggtgggagcagtttgacaagaaatacctgagtcagctgctgatgcgacgatcagcctaccgcatccgggaccagatctgggatgtgtactacaggcttaacatccgggatgccatcagctttgtggaccagggaggccacgtcttgtcttccacaggtctcactctgccttctatgcccagccgcaattctgtggcagaaacttctgtcaccaacctgctgagggagagtggcagtggagcgtgtctggatctgcaggtgattgacacagtacgcagcggccgggatcgtgaggatgctgtgatgcatcatctgctctgcggaggcctctacaagccgcgccgtaggtacaaagccagctgcagtcgccacttcatctcagaggatgcgcaggagcggcaggacaaggaggtcttccagcagaacatgaagcggcggctggagtcctttaagtccaccaagcacaacatctgcttcaccaagagcaagccacgaccccgcaagactggccgcaggaagaaggatggtgtggcgaatgctgaggctacaaatgggaaacatcgaggcctgggctttcaggacacagctgctgtgatattaaccgtggagtctgaggaggaggaggaggagagcgacagttcagagacagagaaggaggacgatgaggggatcatctttgtggctcgtgccaccagtgaggttctccaagagggcaaggtctcaggaagccttgaggtgtgcccaagcccacgaatcattcccccctccccaacctgtgcagaaaaggagctcccctggaagagtgggcagggggacctggcagtgtacgtgtcctcggaaaccaccaagattgtgcctgtggacatgcagacgggttggaaccagagcatctcatccctggagagcctagcgtcccctccctgtaaccaggccccaattctgacctgcctgcctccccatccacggggcactgaagagccccaggtccctctccacctaccttctgatccacgctctagcttcgccttcccaccgagcctggccaaggctggccgctctcgcagtgagagcagcgctgacctcccccagcagcaggagctgcagcccctcatgggccacaaggaccacacccatctcagcccaggcaccgctacctcccactggtgcatccagttcaacagaggcagccggctgtagctcaaggcctcggggaggagcaggaggtggaatccctgtgggaagtgctccctgggtgatgggtagagccctcgaaacttgacatggggccagaagggcctgggttgaagtagtaattgggcttccttggagctagtcagaggggtcacctaagctggtcctcacaggggcctttctcaccacctccctgctcctaacccctgccactttctgtttcattaaggcctctactctggctcaggacccagtccaggccttctacgggctaggcccagagacttgggttgctggtcccccttccctagtgggttttcccggggactctataggcagctgctcctgcccgcaaagcaagagcatcattcctattcttcagtggatgccagccttccctgccccaactccctccccagcactgggtcagtggtgtcctggcagtgaggctccgtgaggggctggcccttagaggaactggggtgggaggtggggcaggcctcacccttgggctttgctgccctgttgggtcagctacccatagtccatttttttagggcagtgggaacctctgcctccacttcctgctttagccccttccctttgctgccaggtattggggtaatatttcctccttttccaagaccaaggccaagaggctgggccaggcttcagttcaggcctgttgcttaactggggtcaccctgggatctgctgctctgggtctaagtctagacctttctgatccttgggtctgggttttttgaggaggggacatagtggcctctgggctgccatgtcaccacctgaacattccccaaacagagaaggaacccagcatctcagggccactgctccattgctctgggggctgggatgcctggctaagcaggggctgacagggtggcaggtgactttctagggatcagcacctgccctgtgttttgtaccttgaacctaagatatattaaacatctctcagatgg

SEQ ID NO: 184684 - DNA, 3472 bp, Homo sapiens
  Payload ID: 16368
  Gene Symbol: SLC9A5
  Gene Name: solute carrier family 9, subfamily A (NHE5, cation proton antiporter 5), member 5
  ENST ID: ENST00000564812
  CDS Start-End: 144-671
ggacctggcttgggggtatcggagccgggattggggggagcgggccccacgtgcctgtgacgcgggggcgcccggtaggtggcggcggcgacgcggggccggcggccgtgcggtgccgggagggcggctgggcaggcggcaggatgctgcgcgccgccctgtccctgctcgcgctgcccctggcgggggcggccgaagagcccacccagaagccagagtccccgggcgagcctcccccaggcttagagctcttccgctggcagtggcacgaggtggaggcgccctacctggtggccctgtggatcctggtggccagtctggccaaaatcgtgtttcacctgtctcggaaagtaacatctctggtccctgagagctgcctgctgattttgctgggcctggtgctagggggaattgttttggctgtggccaagaaagctgagtaccagctggagccaggcaccttcttcctcttcctgctgcctcctattgtgttggactcaggctatttcatgcctagcaggctgttctttgacaacttgggtgccatcctcacctatgccgtggtaggcacactctggaatgccttcacaacaggctggcttactggacttcctgctgtttgggagcctcatctcggcggtggaccccgtggccgtgctagctgtctttgaggaggtgcacgtcaatgagactctctttatcatcgtctttggcgagtccctgctcaacgatgctgtcaccgtggtgctgtacaaggtctgcaactcctttgtggagatgggctctgccaatgtgcaggccactgactacctgaagggagtcgcgggtccgcatcatcgagccgctgctggtcttcctcctcgcctacgcagcctacctcactgctgaaatggcctcgctctccgccattcttgcggtgaccatgtgtggcctgggctgtaagaagtacgtggaggccaacatctcccataagtcacgcacaactgtcaaatatacaatgaagactctagccagctgtgctgagaccgtgatcttcatgctgcttggcatctcagccgtggactcttctaagtgggcctgggattctgggctggtgctgggcaccctcatcttcatcctgttcttccgagccctcggcgtagtcctgcagacctgggtgctgaatcagttccggctagtccctctggacaagattgaccaagtggtgatgtcctatgggggcctgcggggggctgtggcctttgctctcgtcatcctactggataggaccaaggtccctgccaaggactactttgtagccaccactattgtagtggtcttcttcacagtcatcgtgcagggcttgaccatcaagccactggtcaaatggctgaaggtgaagaggagtgagcatcacaaacccaccctgaaccaggagctgcatgaacacgtgggagcagtttgacaagaaatacctgagtcagctgctgatgcgacgatcagcctaccgcatccgggaccagatctgggatgtgtactacaggcttaacatccgggatgccatcagctttgtggaccagggaggccacgtcttgtcttccacaggtctcactctgccttctatgcccagccgcaattctgtggcagaaacttctgtcaccaacctgctgagggagagtggcagtggagcgtgtctggatctgcaggtgattgacacagtacgcagcggccgggatcgtgaggatgctgtgatgcatcatctgctctgcggaggcctctacaagccgcgccgtaggtacaaagccagctgcagtcgccacttcatctcagaggatgcgcaggagcggcaggacaaggaggtcttccagcagaacatgaagcggcggctggagtcctttaagtccaccaagcacaacatctgcttcaccaagagcaagccacgaccccgcaagactggccgcaggaagaaggatggtgtggcgaatgctgaggctacaaatgggaaacatcgaggcctgggctttcaggacacagctgctgtgatattaaccgtggagtctgaggaggaggaggaggagagcgacagttcagagacagagaaggaggacgatgaggggatcatctttgtggctcgtgccaccagtgaggttctccaagagggcaaggtctcaggaagccttgaggtgtgcccaagcccacgaatcattcccccctccccaacctgtgcagaaaaggagctcccctggaagagtgggcagggggacctggcagtgtacgtgtcctcggaaaccaccaagattgtgcctgtggacatgcagacgggttggaaccagagcatctcatccctggagagcctagcgtcccctccctgtaaccaggccccaattctgacctgcctgcctccccatccacggggcactgaagagccccaggtccctctccacctaccttctgatccacgctctagcttcgccttcccaccgagcctggccaaggctggccgctctcgcagtgagagcagcgctgacctcccccagcagcaggagctgcagcccctcatgggccacaaggaccacacccatctcagcccaggcaccgctacctcccactggtgcatccagttcaacagaggcagccggctgtagctcaaggcctcggggaggagcaggaggtggaatccctgtgggaagtgctccctgggtgatgggtagagccctcgaaacttgacatggggccagaagggcctgggttgaagtagtaattgggcttccttggagctagtcagaggggtcacctaagctggtcctcacaggggcctttctcaccacctccctgctcctaacccctgccactttctgtttcattaaggcctctactctggctcaggacccagtccaggccttctacgggctaggcccagagacttgggttgctggtcccccttccctagtgggttttcccggggactctataggcagctgctcctgcccgcaaagcaagagcatcattcctattcttcagtggatgccagccttccctgccccaactccctccccagcactgggtcagtggtgtcctggcagtgaggctccgtgaggggctggcccttagaggaactggggtgggaggtggggcaggcctcacccttgggctttgctgccctgttgggtcagctacccatagtccatttttttagggcagtgggaacctctgcctccacttcctgctttagccccttccctttgctgccaggtattggggtaatatttcctccttttccaagaccaaggccaagaggctgggccaggcttcagttcaggcctgttgcttaactggggtcaccctgggatctgctgctctgggtctaagtctagacctttctgatccttgggtctgggttttttgaggaggggacatagtggcctctgggctgccatgtcaccacctgaacattccccaaacagagaaggaacccagcatctcagggccactg

SEQ ID NO: 184685 - DNA, 819 bp, Homo sapiens
  Payload ID: 16368
  Gene Symbol: SLC9A5
  Gene Name: solute carrier family 9, subfamily A (NHE5, cation proton antiporter 5), member 5
  ENST ID: ENST00000566626
  CDS Start-End: 1-819
ctgccctctggggcttgcagcaggctggacttgtagcccctagggtgcaggctggcttactggacttcctgctgtttgggagcctcatctcggcggtggaccccgtggccgtgctagctgtctttgaggaggtgcacgtcaatgagactctctttatcatcgtctttggcgagtccctgctcaacgatgctgtcaccgtgtacaaagccagctgcagtcgccacttcatctcagaggatgcgcaggagcggcaggacaaggaggtcttccagcagaacatgaagcggcggctggagtcctttaagtccaccaagcacaacatctgcttcaccaagagcaagccacgaccccgcaagactggccgcaggaagaaggatggtgtggcgaatgctgaggctacaaatgggaaacatcgaggcctgggctttcaggacacagctgctgtgatattaaccgtggagtctgaggaggaggaggaggagagcgacagttcagagacagagaaggaggacgatgaggggatcatctttgtggctcgtgccaccagtgaggttctccaagagggcaaggtctcaggaagccttgaggtgtgcccaagcccacgaatcattcccccctccccaacctgtgcagaaaaggagctcccctggaagagtgggcagggggacctggcagtgtacgtgtcctcggaaaccaccaagattgtgcctgtggacatgcagacgggttggaaccagagcatctcatccctggagagcctagcgtcccctccctgtaaccaggccccaattctgacctgcctgcctccccatccacggg

SEQ ID NO: 184686 - DNA, 920 bp, Homo sapiens
  Payload ID: 16368
  Gene Symbol: SLC9A5
  Gene Name: solute carrier family 9, subfamily A (NHE5, cation proton antiporter 5), member 5
  ENST ID: ENST00000566345
  CDS Start-End: 406-920
aagccaccctggcagaccgacggcgagtggaactcgagcacctccccaggtgcgcctaattcgaagggcagtcagaatggcggagccaagttcctggcacccctcttcagtttcccctcaacttgagaggggactcccccgcaggcggggcagagtggaccctgggaccccagcccaagacttttccggagaagaacactcgctccagcctcttcccgcggagcacctcccaccagttttcatggcgcccaccctgaacccccgatcgccccaacctttctccggcctccctcaccttgagcggcgctcccagcaggcggtgcaccgcgggtatctgcgcgcccaagggcagcgccccgtccaggctgcaggtgggggcccggcgcggctccggaaagttggcacatgcgaaggggtcggtgtcttccagtgtttcacctgtctcggaaagtaacatctctggtccctgagagctgcctgctgattttgctgggcctggtgctagggggaattgttttggctgtggccaagaaagctgagtaccagctggagccaggcaccttcttcctcttcctgctgcctcctattgtgttggactcaggctatttcatgcctagcaggctgttctttgacaacttgggtgccatcctcacctatgccgtggtaggcacactctggaatgccttcacaacaggcgctgccctctggggcttgcagcaggctggacttgtaggtctcactctgccttctatgcccagccgcaattctgtggcagaaacttctgtcaccaacctgctgagggagagtggcagtggagcgtgtctggatctgcaggtgattgacacagtacgcagcggccgggatcgtgaggatgctgtgatgcatcatctgctctgcggaggcctctacaagccgcgccg

SEQ ID NO: 184687 - DNA, 535 bp, Homo sapiens
  Payload ID: 16368
  Gene Symbol: SLC9A5
  Gene Name: solute carrier family 9, subfamily A (NHE5, cation proton antiporter 5), member 5
  ENST ID: ENST00000567247
  CDS Start-End: 1-535
ttctttgacaacttgggtgccatcctcacctatgccgtggtaggcacactctggaatgccttcacaacaggcgctgccctctggggcttgcagcaggctggacttgtaggtctcactctgccttctatgcccagccgcaattctgtggcagaaacttctgtcaccaacctgctgagggagagtggcagtggagcgtgtctggatctgcaggtgattgacacagtacgcagcggccgggatcgtgaggatgctgtgatgcatcatctgctctgcggaggcctctacaagccgcgccgtaggtacaaagccagctgcagtcgccacttcatctcagaggatgcgcaggagcggcaggacaaggaggtcttccagcagaacatgaagcggcggctggagtcctttaagtccaccaagcacaacatctgcttcaccaagagcaagccacgaccccgcaagactggccgcaggaaggatggtgtggcgaatgctgaggctacaaatgggaaacatcgaggcctgggctttcaggacacag

SEQ ID NO: 184688 - DNA, 4711 bp, Homo sapiens
  Payload ID: 16369
  Gene Symbol: SLC9A6
  Gene Name: solute carrier family 9, subfamily A (NHE6, cation proton antiporter 6), member 6
  Uniprot ID: Q92581
  ENST ID: ENST00000370695
  CDS Start-End: 69-2174
gagccctcggggagtggtccgaccgcgggcggccgccggtgaggtaggggcgggaggcggggggagacatggctcggcgcggctggcggcgggcacccctccgccgtggcgtcggcagcagtccccgagcccgcaggctcatgcggcccctttggttgctcctcgcagtgggcgtctttgactgggcaggggcttcggacggcggcggcggagaggctagagccatggacgaggagatcgtgtccgagaagcaagccgaggagagccaccggcaggacagcgccaacctgctcatcttcatcctgctgctcaccctcaccattctcacaatctggctcttcaagcaccgccgggcccgcttcctgcacgaaaccggcctggctatgatttatggtcttttggtgggccttgtgcttcggtatggcattcatgttccgagtgatgtaaataatgtgaccctgagctgtgaagtgcagtcaagtccaactaccttactggtaaatgttagtggaaaattttatgagtatatgctgaaaggagagattagttcacatgaactcaataatgttcaagataatgaaatgcttagaaaggttacttttgatccagaagtatttttcaacatattacttcctcctatcatattttatgcaggttatagcctgaaaaggagacatttttttcgaaatcttgggtctatcctagcatacgcttttcttggaacagcaatttcttgtttcgttattgggtcaataatgtatggctgtgtaacgctgatgaaggtaacgggacaacttgcaggagatttttactttacagattgcctactgtttggtgccattgtatcagcaactgatccagtgactgttcttgctatattccacgagcttcaagttgatgttgaactctatgcacttctttttggtgaaagtgtcctcaatgatgctgttgccatagtgctgtcctcctcaatagtggcataccagccagctggagacaacagtcacacctttgatgtcacagcgatgttcaagtctattgggatcttccttggaatcttcagtggatcttttgcaatgggtgctgctactggagtggtgacagctttagtgacaaagttcaccaaattacgggagttccagttgttggagacaggcctgttcttcttgatgtcctggagtaccttcctcttggctgaagcatggggcttcacaggtgtagttgcagtattgttttgtggcatcacacaagcacattatacgtataataatttgtccacggagtctcagcatagaactaaacagttgtttgagcttctcaatttcttggcagagaatttcatcttctcctacatggggctgacactgttcaccttccagaaccatgtctttaacccaacatttgtagtaggagcatttgttgctattttcttgggaagagctgccaatatttaccccttgtccctcttacttaatttgggtagaagaagtaagattggatcaaattttcaacacatgatgatgtttgctggccttcgtggtgcaatggcatttgccttggccattcgagatactgccacttatgcacggcaaatgatgttcagcaccacgcttctgattgtgttttttaccgtgtgggtatttggtggtggcaccactgcaatgctgtcatgcttgcatatcagggttggtgttgattcagaccaagaacacttgggtgttcctgaaaatgaaaggagaactaccaaagcagagagtgcttggcttttccggatgtggtacaactttgatcataactatctgaagcctctgctgacccacagcgggcctccgctgacaacaacactccctgcctgctgtggacccatcgccaggtgcctcaccagcccccaggcttacgaaaaccaggaacagttgaaagatgatgattctgatcttattctcaatgatggtgacatcagtttgacatatggagattctactgtgaacactgaaccggccacatccagcgccccaaggagatttatgggaaacagttctgaagatgccttggatcgggagcttgcatttggggaccatgaactggtcattcgaggaacacgcctggttcttccaatggatgattctgaacccccgctaaatttgttagataatacgagacatggtccagcctaagcttactaatactcacttagtgatttgtaaaatttgcacatgtgattgtgaagaaatttgtactacctaaaagtcccagtgcatgtctctgaatgtgtaagctatataaatgctatttatatggcatagaaagaatataaatatcctgtacacggcagattgtgaacaaactatattcctttaagttttcctggttgcactctgtagactggatctgttttaggaagttactttcacagtgatgttgtgtgttctgttagttttatgtctcagttaaagtgtaaaaagtgacggattttctctttcttaaacttacctgacacttaaccagagtaccagttctcgtgatgtgaattaatttttttgtgtgctaggggagggagagtgaggagggagtgttatttccttgggaacctagggaggagaggttcctttgttgggaaacttttgttgatagctgctgcctttgtcctgatcgttttctttcccttttctctggtggcctgttgtggtgcaacgagctgatggcatttgatcttgccccattcaggttggggagtgaagtgtgaggacccttttcccccgcttgctgtgaaagcacagattcattgactacagtacactgttgttcagaaaagaaggctgcaaatgacttctgagactttatgtcttttcttccagaccaagaccgtagaaggagtcacatctagccggcttagccaaagtacaggtgtatatagttcagggcacttgatttagatttggaggggctggggtgggcagagagcaagaggcgagtaaagagaatggtggtttcagagatctctcttcccaaatgtgtaaatattctataccagataagtttaaataagaaatttaattgctgcttaatttttgattatgtactttatctgtatagcaggctttgtcgtcagaagtttttatatcgatttaaattgctgctctttagcagccaaacaggagcaaaatgtaaaatttttgaacttactgtgtctaatcatcatttgttagtctgtagttaatgtcaacagttaatttatgaacccacgatcgttccacactgcaccaaagtcagtcataagagaaatcgaatattctggagcactgattgcagcagggtggctcctttgtgtgcagcaggtgtagtagtcttcattttcatggtacgttttaatattaattacctaagctgccatgcatttttttttttacagttctcaaggaagagcacagaacaatttctcatttcatatttggagtatgaaagtagattctattttgtaatgctgataatacctaaagatgcattgaatgcttggaagaatgctttttgatgttgattttgacctgttcatgattcagaagaaaaacaaacttttttggattttttttccctcaggtctgagtagcattgccttaaatcttatccagttagaacattgatttatttacatgatgttcagattttccagtgaaaaatacccttctgaacaaaacatgtacttactctccgaaaggcatctatctgtgctattgcaaacactccttgagattttaggggaattctaatgttgtaccctttcgtggcagctttgactgttggcatagccatttgttatgtagtggtagcgactttcctgctatgcaggaatccctcccatgacgtgtatgttttacatgatgtgtgcctcttcacgcagtaaatagtttcttgttaatgtatgtttgaggagtttgaacgtcagtgtcacttacccacaaagttattcaagttgtaaaaggttatacaataatttaacaactaccttttttattctgtcgggttactgacctcactttatgtaaatacttcgcatgacaaattcagtaactcgtctatttcagcatgcataagacttttcactagggaaactgataaagcttgagtcaactaaatctgccttcatactttatcaaggggaaccaagcctgctgtgcttacatcagcatctggaagactttcctctcctctaatctgtgtacacatctccaagcaaggaagaaaaaacaaactctgctcagacgcctatgaaacacctgaatgaactttgatgaagtacagtctgagttaccatcatgcacaagtagaactgctcttggacttgttttcctgttgtttgtggaacctacgcgtttgaatggcttgaacgttgcatcttttaaagttattttttaaggtttcttggcatttatcctagttgtccgtgtttggcaatgtgctgttaaagtaatagacttttaatctttatgtattttttgttttctctggagtacttggacagatgttatagtggtttcttttaggaaaatctgtcattaaaaaagttatagccttgcaaataaccactcacagtatttgagtcacagtttattttagtgagacgtaaagagtgctgacttcatttatttttctacctatatacctagtggaaaaggggaagactaatgttttcaaataaacaaacagaaacctaaca

SEQ ID NO: 184689 - DNA, 4631 bp, Homo sapiens
  Payload ID: 16369
  Gene Symbol: SLC9A6
  Gene Name: solute carrier family 9, subfamily A (NHE6, cation proton antiporter 6), member 6
  Uniprot ID: Q92581
  ENST ID: ENST00000370698
  CDS Start-End: 77-2086
tttcccgtgagccctcggggagtggtccgaccgcgggcggccgccggtgaggtaggggcgggaggcggggggagacatggctcggcgcggctggcggcgggcacccctccgccgtggcgtcggcagcagtccccgagcccgcaggctcatgcggcccctttggttgctcctcgcagtgggcgtctttgactgggcaggggcttcggacggcggcggcggagaggctagagccatggacgaggagatcgtgtccgagaagcaagccgaggagagccaccggcaggacagcgccaacctgctcatcttcatcctgctgctcaccctcaccattctcacaatctggctcttcaagcaccgccgggcccgcttcctgcacgaaaccggcctggctatgatttatggtcttttggtgggccttgtgcttcggtatggcattcatgttccgagtgatgtaaataatgtgaccctgagctgtgaagtgcagtcaagtccaactaccttactggttacttttgatccagaagtatttttcaacatattacttcctcctatcatattttatgcaggttatagcctgaaaaggagacatttttttcgaaatcttgggtctatcctagcatacgcttttcttggaacagcaatttcttgtttcgttattgggtcaataatgtatggctgtgtaacgctgatgaaggtaacgggacaacttgcaggagatttttactttacagattgcctactgtttggtgccattgtatcagcaactgatccagtgactgttcttgctatattccacgagcttcaagttgatgttgaactctatgcacttctttttggtgaaagtgtcctcaatgatgctgttgccatagtgctgtcctcctcaatagtggcataccagccagctggagacaacagtcacacctttgatgtcacagcgatgttcaagtctattgggatcttccttggaatcttcagtggatcttttgcaatgggtgctgctactggagtggtgacagctttagtgacaaagttcaccaaattacgggagttccagttgttggagacaggcctgttcttcttgatgtcctggagtaccttcctcttggctgaagcatggggcttcacaggtgtagttgcagtattgttttgtggcatcacacaagcacattatacgtataataatttgtccacggagtctcagcatagaactaaacagttgtttgagcttctcaatttcttggcagagaatttcatcttctcctacatggggctgacactgttcaccttccagaaccatgtctttaacccaacatttgtagtaggagcatttgttgctattttcttgggaagagctgccaatatttaccccttgtccctcttacttaatttgggtagaagaagtaagattggatcaaattttcaacacatgatgatgtttgctggccttcgtggtgcaatggcatttgccttggccattcgagatactgccacttatgcacggcaaatgatgttcagcaccacgcttctgattgtgttttttaccgtgtgggtatttggtggtggcaccactgcaatgctgtcatgcttgcatatcagggttggtgttgattcagaccaagaacacttgggtgttcctgaaaatgaaaggagaactaccaaagcagagagtgcttggcttttccggatgtggtacaactttgatcataactatctgaagcctctgctgacccacagcgggcctccgctgacaacaacactccctgcctgctgtggacccatcgccaggtgcctcaccagcccccaggcttacgaaaaccaggaacagttgaaagatgatgattctgatcttattctcaatgatggtgacatcagtttgacatatggagattctactgtgaacactgaaccggccacatccagcgccccaaggagatttatgggaaacagttctgaagatgccttggatcgggagcttgcatttggggaccatgaactggtcattcgaggaacacgcctggttcttccaatggatgattctgaacccccgctaaatttgttagataatacgagacatggtccagcctaagcttactaatactcacttagtgatttgtaaaatttgcacatgtgattgtgaagaaatttgtactacctaaaagtcccagtgcatgtctctgaatgtgtaagctatataaatgctatttatatggcatagaaagaatataaatatcctgtacacggcagattgtgaacaaactatattcctttaagttttcctggttgcactctgtagactggatctgttttaggaagttactttcacagtgatgttgtgtgttctgttagttttatgtctcagttaaagtgtaaaaagtgacggattttctctttcttaaacttacctgacacttaaccagagtaccagttctcgtgatgtgaattaatttttttgtgtgctaggggagggagagtgaggagggagtgttatttccttgggaacctagggaggagaggttcctttgttgggaaacttttgttgatagctgctgcctttgtcctgatcgttttctttcccttttctctggtggcctgttgtggtgcaacgagctgatggcatttgatcttgccccattcaggttggggagtgaagtgtgaggacccttttcccccgcttgctgtgaaagcacagattcattgactacagtacactgttgttcagaaaagaaggctgcaaatgacttctgagactttatgtcttttcttccagaccaagaccgtagaaggagtcacatctagccggcttagccaaagtacaggtgtatatagttcagggcacttgatttagatttggaggggctggggtgggcagagagcaagaggcgagtaaagagaatggtggtttcagagatctctcttcccaaatgtgtaaatattctataccagataagtttaaataagaaatttaattgctgcttaatttttgattatgtactttatctgtatagcaggctttgtcgtcagaagtttttatatcgatttaaattgctgctctttagcagccaaacaggagcaaaatgtaaaatttttgaacttactgtgtctaatcatcatttgttagtctgtagttaatgtcaacagttaatttatgaacccacgatcgttccacactgcaccaaagtcagtcataagagaaatcgaatattctggagcactgattgcagcagggtggctcctttgtgtgcagcaggtgtagtagtcttcattttcatggtacgttttaatattaattacctaagctgccatgcatttttttttttacagttctcaaggaagagcacagaacaatttctcatttcatatttggagtatgaaagtagattctattttgtaatgctgataatacctaaagatgcattgaatgcttggaagaatgctttttgatgttgattttgacctgttcatgattcagaagaaaaacaaacttttttggattttttttccctcaggtctgagtagcattgccttaaatcttatccagttagaacattgatttatttacatgatgttcagattttccagtgaaaaatacccttctgaacaaaacatgtacttactctccgaaaggcatctatctgtgctattgcaaacactccttgagattttaggggaattctaatgttgtaccctttcgtggcagctttgactgttggcatagccatttgttatgtagtggtagcgactttcctgctatgcaggaatccctcccatgacgtgtatgttttacatgatgtgtgcctcttcacgcagtaaatagtttcttgttaatgtatgtttgaggagtttgaacgtcagtgtcacttacccacaaagttattcaagttgtaaaaggttatacaataatttaacaactaccttttttattctgtcgggttactgacctcactttatgtaaatacttcgcatgacaaattcagtaactcgtctatttcagcatgcataagacttttcactagggaaactgataaagcttgagtcaactaaatctgccttcatactttatcaaggggaaccaagcctgctgtgcttacatcagcatctggaagactttcctctcctctaatctgtgtacacatctccaagcaaggaagaaaaaacaaactctgctcagacgcctatgaaacacctgaatgaactttgatgaagtacagtctgagttaccatcatgcacaagtagaactgctcttggacttgttttcctgttgtttgtggaacctacgcgtttgaatggcttgaacgttgcatcttttaaagttattttttaaggtttcttggcatttatcctagttgtccgtgtttggcaatgtgctgttaaagtaatagacttttaatctttatgtattttttgttttctctggagtacttggacagatgttatagtggtttcttttaggaaaatctgtcattaaaaaagttatagccttgcaaataaccactcacagtatttgagtcacagtttattttagtgagacgtaaagagtgctgacttcatttatttttctacctatatacctagtggaaaaggggaagactaatgttttcaaataaacaaacagaaacctaacagaacttaa

SEQ ID NO: 184690 - DNA, 4466 bp, Homo sapiens
  Payload ID: 16369
  Gene Symbol: SLC9A6
  Gene Name: solute carrier family 9, subfamily A (NHE6, cation proton antiporter 6), member 6
  Uniprot ID: Q92581
  ENST ID: ENST00000370701
  CDS Start-End: 111-2060
ccctttcccgtgagccctcggggagtggtccgaccgcgggcggccgccggtgagtgggcgtctttgactgggcaggggcttcggacggcggcggcggagaggctagagccatggacgaggagatcgtgtccgagaagcaagccgaggagagccaccggcaggacagcgccaacctgctcatcttcatcctgctgctcaccctcaccattctcacaatctggctcttcaagcaccgccgggcccgcttcctgcacgaaaccggcctggctatgatttatggtcttttggtgggccttgtgcttcggtatggcattcatgttccgagtgatgtaaataatgtgaccctgagctgtgaagtgcagtcaagtccaactaccttactggtaaatgttagtggaaaattttatgagtatatgctgaaaggagagattagttcacatgaactcaataatgttcaagataatgaaatgcttagaaaggttacttttgatccagaagtatttttcaacatattacttcctcctatcatattttatgcaggttatagcctgaaaaggagacatttttttcgaaatcttgggtctatcctagcatacgcttttcttggaacagcaatttcttgtttcgttattgggtcaataatgtatggctgtgtaacgctgatgaaggtaacgggacaacttgcaggagatttttactttacagattgcctactgtttggtgccattgtatcagcaactgatccagtgactgttcttgctatattccacgagcttcaagttgatgttgaactctatgcacttctttttggtgaaagtgtcctcaatgatgctgttgccatagtgctgtcctcctcaatagtggcataccagccagctggagacaacagtcacacctttgatgtcacagcgatgttcaagtctattgggatcttccttggaatcttcagtggatcttttgcaatgggtgctgctactggagtggtgacagctttagtgacaaagttcaccaaattacgggagttccagttgttggagacaggcctgttcttcttgatgtcctggagtaccttcctcttggctgaagcatggggcttcacaggtgtagttgcagtattgttttgtggcatcacacaagcacattatacgtataataatttgtccacggagtctcagcatagaactaaacagttgtttgagcttctcaatttcttggcagagaatttcatcttctcctacatggggctgacactgttcaccttccagaaccatgtctttaacccaacatttgtagtaggagcatttgttgctattttcttgggaagagctgccaatatttaccccttgtccctcttacttaatttgggtagaagaagtaagattggatcaaattttcaacacatgatgatgtttgctggccttcgtggtgcaatggcatttgccttggccattcgagatactgccacttatgcacggcaaatgatgttcagcaccacgcttctgattgtgttttttaccgtgtgggtatttggtggtggcaccactgcaatgctgtcatgcttgcatatcagggttggtgttgattcagaccaagaacacttgggtgttcctgaaaatgaaaggagaactaccaaagcagagagtgcttggcttttccggatgtggtacaactttgatcataactatctgaagcctctgctgacccacagcgggcctccgctgacaacaacactccctgcctgctgtggacccatcgccaggtgcctcaccagcccccaggcttacgaaaaccaggaacagttgaaagatgatgattctgatcttattctcaatgatggtgacatcagtttgacatatggagattctactgtgaacactgaaccggccacatccagcgccccaaggagatttatgggaaacagttctgaagatgccttggatcgggagcttgcatttggggaccatgaactggtcattcgaggaacacgcctggttcttccaatggatgattctgaacccccgctaaatttgttagataatacgagacatggtccagcctaagcttactaatactcacttagtgatttgtaaaatttgcacatgtgattgtgaagaaatttgtactacctaaaagtcccagtgcatgtctctgaatgtgtaagctatataaatgctatttatatggcatagaaagaatataaatatcctgtacacggcagattgtgaacaaactatattcctttaagttttcctggttgcactctgtagactggatctgttttaggaagttactttcacagtgatgttgtgtgttctgttagttttatgtctcagttaaagtgtaaaaagtgacggattttctctttcttaaacttacctgacacttaaccagagtaccagttctcgtgatgtgaattaatttttttgtgtgctaggggagggagagtgaggagggagtgttatttccttgggaacctagggaggagaggttcctttgttgggaaacttttgttgatagctgctgcctttgtcctgatcgttttctttcccttttctctggtggcctgttgtggtgcaacgagctgatggcatttgatcttgccccattcaggttggggagtgaagtgtgaggacccttttcccccgcttgctgtgaaagcacagattcattgactacagtacactgttgttcagaaaagaaggctgcaaatgacttctgagactttatgtcttttcttccagaccaagaccgtagaaggagtcacatctagccggcttagccaaagtacaggtgtatatagttcagggcacttgatttagatttggaggggctggggtgggcagagagcaagaggcgagtaaagagaatggtggtttcagagatctctcttcccaaatgtgtaaatattctataccagataagtttaaataagaaatttaattgctgcttaatttttgattatgtactttatctgtatagcaggctttgtcgtcagaagtttttatatcgatttaaattgctgctctttagcagccaaacaggagcaaaatgtaaaatttttgaacttactgtgtctaatcatcatttgttagtctgtagttaatgtcaacagttaatttatgaacccacgatcgttccacactgcaccaaagtcagtcataagagaaatcgaatattctggagcactgattgcagcagggtggctcctttgtgtgcagcaggtgtagtagtcttcattttcatggtacgttttaatattaattacctaagctgccatgcatttttttttttacagttctcaaggaagagcacagaacaatttctcatttcatatttggagtatgaaagtagattctattttgtaatgctgataatacctaaagatgcattgaatgcttggaagaatgctttttgatgttgattttgacctgttcatgattcagaagaaaaacaaacttttttggattttttttccctcaggtctgagtagcattgccttaaatcttatccagttagaacattgatttatttacatgatgttcagattttccagtgaaaaatacccttctgaacaaaacatgtacttactctccgaaaggcatctatctgtgctattgcaaacactccttgagattttaggggaattctaatgttgtaccctttcgtggcagctttgactgttggcatagccatttgttatgtagtggtagcgactttcctgctatgcaggaatccctcccatgacgtgtatgttttacatgatgtgtgcctcttcacgcagtaaatagtttcttgttaatgtatgtttgaggagtttgaacgtcagtgtcacttacccacaaagttattcaagttgtaaaaggttatacaataatttaacaactaccttttttattctgtcgggttactgacctcactttatgtaaatacttcgcatgacaaattcagtaactcgtctatttcagcatgcataagacttttcactagggaaactgataaagcttgagtcaactaaatctgccttcatactttatcaaggggaaccaagcctgctgtgcttacatcagcatctggaagactttcctctcctctaatctgtgtacacatctccaagcaaggaagaaaaaacaaactctgctcagacgcctatgaaacacctgaatgaactttgatgaagtacagtctgagttaccatcatgcacaagtagaactgctcttggacttgttttcctgttgtttgtggaacctacgcgtttgaatggcttgaacgttgcatcttttaaagttattttttaaggtttcttggcatttatcctagttgtccgtgtttggcaatgtgctgttaaagtaatagacttttaatctttatgtattttttgttttctctggagtacttggacagatgttatagtggtttcttttaggaaaatctgtcattaaaaaagttatagccttgcaaataacca

SEQ ID NO: 184691 - DNA, 648 bp, Homo sapiens
  Payload ID: 16369
  Gene Symbol: SLC9A6
  Gene Name: solute carrier family 9, subfamily A (NHE6, cation proton antiporter 6), member 6
  ENST ID: ENST00000627534
  CDS Start-End: 97-648
gtgagccctcggggagtggtccgaccgcgggcggccgccgtgggcgtctttgactgggcaggggcttcggacggcggcggcggagaggctagagccatggacgaggagatcgtgtccgagaagcaagccgaggagagccaccggcaggacagcgccaacctgctcatcttcatcctgctgctcaccctcaccattctcacaatctggctcttcaagcaccgccgggcccgcttcctgcacgaaaccggcctggctatgatttatggtcttttggtgggccttgtgcttcggtatggcattcatgttccgagtgatgtaaataatgtgaccctgagctgtgaagtgcagtcaagtccaactaccttactggtaaatgttagtggaaaattttatgagtatatgctgaaaggagagattagttcacatgaactcaataatgttcaagataatgaaatgcttagaaaggttacttttgatccagaagtatttttcaacatattacttcctcctatcatattttatgcaggttatagcctgaaaaggagacatttttttcgaaatcttgggtctatcctagcatacgcttttcttggaacagcaatttcttgtttcgttattgggtcaataatgtatggctgtgtaacgctg

SEQ ID NO: 184692 - DNA, 619 bp, Homo sapiens
  Payload ID: 16369
  Gene Symbol: SLC9A6
  Gene Name: solute carrier family 9, subfamily A (NHE6, cation proton antiporter 6), member 6
  ENST ID: ENST00000630721
  CDS Start-End: 1-619
cttatgcacggcaaatgatgttcagcaccacgcttctgattgtgttttttaccgtgtgggtatttggtggtggcaccactgcaatgctgtcatgcttgcatatcaggtactgtgctagactctggggatacagagatgaattgagacatggcctttaccctcaaggaactcacagtctttttggggagactgacagggttggtgttgattcagaccaagaacacttgggtgttcctgaaaatgaaaggagaactaccaaagcagagagtgcttggcttttccggatgtggtacaactttgatcataactatctgaagcctctgctgacccacagcgggcctccgctgacaacaacactccctgcctgctgtggacccatcgccaggtgcctcaccagcccccaggcttacgaaaaccaggaacagttgaaagatgatgattctgatcttattctcaatgatggtgacatcagtttgacatatggagattctactgtgaacactgaaccggccacatccagcgccccaaggagatttatgggaaacagttctgaagatgccttggatcgggagcttgcatttggggaccatgaactggtcattcgaggaacacgcctggt

SEQ ID NO: 184693 - DNA, 3838 bp, Homo sapiens
  Payload ID: 16370
  Gene Symbol: SLC9A7
  Gene Name: solute carrier family 9, subfamily A (NHE7, cation proton antiporter 7), member 7
  Uniprot ID: Q96T83
  ENST ID: ENST00000328306
  CDS Start-End: 27-2204
gaggaggcgcggggggccccgggaccatggagcctggtgacgcggcgcgccctggctcgggtcgggctaccggggcgccgccgccgcggctgctgctgctgccgctgctgctgggttgggggctgcgagtcgcggccgcggcctcggcctcctcctctggggcggcggcggaggacagcagcgccatggaggagctcgctactgagaaggaggcggaggagagccaccggcaagacagcgtgagcctgctcaccttcatcctgctgctcacgctcaccatcctcaccatctggctcttcaagcaccgccgggtgcgctttctgcacgagaccgggctggccatgatctatgggctcatcgttggggtgatcctgaggtatggtacccctgctaccagtggccgtgacaaatcactcagctgcactcaggaagacagggccttcagtaccttattagtgaatgtcagcggaaagttcttcgaatacactctgaaaggagaaatcagtcctggcaagatcaacagcgtagagcagaatgatatgctacggaaggtaacattcgatccagaagtatttttcaacattcttctgcctccaattatttttcatgctggatacagcttaaagaagagacactttttcagaaatcttggatctatactggcctatgccttcttggggactgctgtttcatgcttcattattggaaatctcatgtatggtgtggtgaagctcatgaagattatgggacagctctcagataaattttactacacagattgtctcttttttggagcaatcatctctgccactgacccagtgactgtgctggcgatatttaatgaattgcatgcagacgtggatctttacgcacttctttttggagagagcgtcctaaatgatgctgttgccattgtactgtcctcgtctattgttgcctaccagccagcgggactgaacactcacgcctttgatgctgctgccttttttaagtcagttggcatttttctaggtatatttagtggctcttttaccatgggagctgtgactggtgttaatgccaacgtgactaagtttaccaaactgcactgcttccccctgctggagacggcgctgttcttcctcatgtcctggagcacgtttctcttggcagaagcctgcggatttacaggtgttgtagctgtccttttctgtggaatcacacaagctcattacacctacaacaatctgtcggtggaatcaagaagtcgaaccaagcagctctttgaggtgttacatttcctggcagagaacttcatcttctcctacatgggcctggcactgtttaccttccagaagcacgttttcagccccattttcatcatcggagcttttgttgccatcttcctgggcagagccgcgcacatctacccgctctccttcttcctcaacttgggcagaaggcataagattggctggaattttcaacacatgatgatgttttcaggcctcaggggagcaatggcatttgcgttggccatccgtgacacggcatcctatgctcgccagatgatgttcacgaccacccttctcattgtgttcttcactgtctggatcattggaggaggcacgacacccatgttgtcatggcttaacatcagagttggcgtcgaggagccctccgaagaggaccagaatgaacaccactggcagtacttcagagttggtgttgaccccgatcaagacccaccacccaacaacgacagctttcaagtcttacaaggggacggcccagattctgccagaggaaaccggacaaaacaggagagcgcatggatattcaggctgtggtacagctttgatcacaattacctgaagcccatcctcacacacagtggtcccccactaaccaccacgctccccgcctggtgtggcttactagctcgatgtctgaccagtccccaggtgtacgataaccaagagccactgagagaggaagactctgatttcatcctgaccgaaggcgacctgacattgacctacggggacagcacagtgactgcaaatggctcctcaagttcgcacaccgcctccacgagtctggagggcagccggagaacgaagagcagctcggaggaagtgctggagcgagacctgggaatgggagaccagaaggtttcgagccggggcacccgcctagtgtttcccctggaagataatgcttgactttccccccaagccctggcgcgatggggtaggctcccgatggggtgaggacagctgcaagccctagtgttgttggaggtggggcagtgactagattgaactaactcttctattttattggggtctgaagctattgtaacacttaaaatttaactcacaatgcagatggtgaggcaaaagtgtctctaaattcagacaaacgtagacctattcccacttttttcacatagtagtgcgctgtttcagagttaaacaaacaaaaaaaaatagcatgctttaatggtctcctaattcattcacctgcagtatctgaacaaggcgaggcaggtgctgggtggggggattcctcccatgagaggctgcatctcagtacacagcagtgcaagtcaagctgaccatagaattatcaagttaaagagaaggaaggcaattgagatcggaactccaaggattatgggaaacttggtgttaaatgggacagaaaacatgaaaaagcaatttggaggctctggcaacgaagtctgcttgactgcaacctcatatcaggattcctgactttatgctgcctgtgttttttctagactgaagatttgaaaatacatccacgaacatttcaacatggaacgaagaattatagttccttctctggctatatccataaagaagtagttatgaaatgtttaaaaccaaaggcaaatagtgttatactcttattttttgattaatctgaggaaaggaggtatttagaaactgatgatggtatcactgcaaaaagcattcaactttttttttttgttgagatggtgtttcactctgtcacccaggctggagtgcagtggcgtggtcttggctcactgcaacctctgcctcacgggttcaagtgattctcctgcctcagcctcctgattagctgggattacaggtgcccaccaccatgcccagctaattttttgtatttttggtagagatggggtttcaccatgttgcccaggctggtgtcaaactcctgacctcgtgatccacctcccttggcctcccaaagtgctgggattacaggtgtgagccactgcacctggccagcattcaacttttgagggctaccatatgagctgacagcctagggaaataatcactaggactgaagtatctactctgggtttagaaataacaccaaattttgtaggatgctattatctgggaaagggaaggcagcaagaaacctacaaggcaccaggctagaattcagagggaaagaaatctcaatgcaaaaaaattactgcaaagaaatacaagatagtagtctcaagactaggtagaattccaaactttgagccgacgaatgcatgagatttcagtggccacctgaggaatcagagggcaaacaatggaacattaagtattttcagcccactagaaagctctgtcttctataagcttaagagtccgagtgtctttacaccactgagtgccatgcagagaagggtcattttccttgtatctggggaggctgctgcaccagcttaacatgtgggtgtgatttgaaagttaggttttcagtttggattctttctggatgagctgttctgtctgcccacacctgtagtgctgaaatacagaaagacctctcgggaaaa

SEQ ID NO: 184694 - DNA, 10024 bp, Homo sapiens
  Payload ID: 16370
  Gene Symbol: SLC9A7
  Gene Name: solute carrier family 9, subfamily A (NHE7, cation proton antiporter 7), member 7
  ENST ID: ENST00000616978
  CDS Start-End: 144-2324
gggcgcagccccggcccggcgcgagtaggaggaggagctgcagcggccacggccactccggcaggtccgcggtgctgccagaacccgccgacggcgcgggctgctggtccccgctcggaggaggcgcggggggccccgggaccatggagcctggtgacgcggcgcgccctggctcgggtcgggctaccggggcgccgccgccgcggctgctgctgctgccgctgctgctgggttgggggctgcgagtcgcggccgcggcctcggcctcctcctctggggcggcggcggaggacagcagcgccatggaggagctcgctactgagaaggaggcggaggagagccaccggcaagacagcgtgagcctgctcaccttcatcctgctgctcacgctcaccatcctcaccatctggctcttcaagcaccgccgggtgcgctttctgcacgagaccgggctggccatgatctatgggctcatcgttggggtgatcctgaggtatggtacccctgctaccagtggccgtgacaaatcactcagctgcactcaggaagacagggccttcagtaccttattagtgaatgtcagcggaaagttcttcgaatacactctgaaaggagaaatcagtcctggcaagatcaacagcgtagagcagaatgatatgctacggaaggtaacattcgatccagaagtatttttcaacattcttctgcctccaattatttttcatgctggatacagcttaaagaagagacactttttcagaaatcttggatctatactggcctatgccttcttggggactgctgtttcatgcttcattattggaaatctcatgtatggtgtggtgaagctcatgaagattatgggacagctctcagataaattttactacacagattgtctcttttttggagcaatcatctctgccactgacccagtgactgtgctggcgatatttaatgaattgcatgcagacgtggatctttacgcacttctttttggagagagcgtcctaaatgatgctgttgccattgtactgtcctcgtctattgttgcctaccagccagcgggactgaacactcacgcctttgatgctgctgccttttttaagtcagttggcatttttctaggtatatttagtggctcttttaccatgggagctgtgactggtgttgtgactgctctagtgactaagtttaccaaactgcactgcttccccctgctggagacggcgctgttcttcctcatgtcctggagcacgtttctcttggcagaagcctgcggatttacaggtgttgtagctgtccttttctgtggaatcacacaagctcattacacctacaacaatctgtcggtggaatcaagaagtcgaaccaagcagctctttgaggtgttacatttcctggcagagaacttcatcttctcctacatgggcctggcactgtttaccttccagaagcacgttttcagccccattttcatcatcggagcttttgttgccatcttcctgggcagagccgcgcacatctacccgctctccttcttcctcaacttgggcagaaggcataagattggctggaattttcaacacatgatgatgttttcaggcctcaggggagcaatggcatttgcgttggccatccgtgacacggcatcctatgctcgccagatgatgttcacgaccacccttctcattgtgttcttcactgtctggatcattggaggaggcacgacacccatgttgtcatggcttaacatcagagttggcgtcgaggagccctccgaagaggaccagaatgaacaccactggcagtacttcagagttggtgttgaccccgatcaagacccaccacccaacaacgacagctttcaagtcttacaaggggacggcccagattctgccagaggaaaccggacaaaacaggagagcgcatggatattcaggctgtggtacagctttgatcacaattacctgaagcccatcctcacacacagtggtcccccactaaccaccacgctccccgcctggtgtggcttactagctcgatgtctgaccagtccccaggtgtacgataaccaagagccactgagagaggaagactctgatttcatcctgaccgaaggcgacctgacattgacctacggggacagcacagtgactgcaaatggctcctcaagttcgcacaccgcctccacgagtctggagggcagccggagaacgaagagcagctcggaggaagtgctggagcgagacctgggaatgggagaccagaaggtttcgagccggggcacccgcctagtgtttcccctggaagataatgcttgactttccccccaagccctggcgcgatggggtaggctcccgatggggtgaggacagctgcaagccctagtgttgttggaggtggggcagtgactagattgaactaactcttctattttattggggtctgaagctattgtaacacttaaaatttaactcacaatgcagatggtgaggcaaaagtgtctctaaattcagacaaacgtagacctattcccacttttttcacatagtagtgcgctgtttcagagttaaacaaacaaaaaaaaatagcatgctttaatggtctcctaattcattcacctgcagtatctgaacaaggcgaggcaggtgctgggtggggggattcctcccatgagaggctgcatctcagtacacagcagtgcaagtcaagctgaccatagaattatcaagttaaagagaaggaaggcaattgagatcggaactccaaggattatgggaaacttggtgttaaatgggacagaaaacatgaaaaagcaatttggaggctctggcaacgaagtctgcttgactgcaacctcatatcaggattcctgactttatgctgcctgtgttttttctagactgaagatttgaaaatacatccacgaacatttcaacatggaacgaagaattatagttccttctctggctatatccataaagaagtagttatgaaatgtttaaaaccaaaggcaaatagtgttatactcttattttttgattaatctgaggaaaggaggtatttagaaactgatgatggtatcactgcaaaaagcattcaactttttttttttgttgagatggtgtttcactctgtcacccaggctggagtgcagtggcgtggtcttggctcactgcaacctctgcctcacgggttcaagtgattctcctgcctcagcctcctgattagctgggattacaggtgcccaccaccatgcccagctaattttttgtatttttggtagagatggggtttcaccatgttgcccaggctggtgtcaaactcctgacctcgtgatccacctcccttggcctcccaaagtgctgggattacaggtgtgagccactgcacctggccagcattcaacttttgagggctaccatatgagctgacagcctagggaaataatcactaggactgaagtatctactctgggtttagaaataacaccaaattttgtaggatgctattatctgggaaagggaaggcagcaagaaacctacaaggcaccaggctagaattcagagggaaagaaatctcaatgcaaaaaaattactgcaaagaaatacaagatagtagtctcaagactaggtagaattccaaactttgagccgacgaatgcatgagatttcagtggccacctgaggaatcagagggcaaacaatggaacattaagtattttcagcccactagaaagctctgtcttctataagcttaagagtccgagtgtctttacaccactgagtgccatgcagagaagggtcattttccttgtatctggggaggctgctgcaccagcttaacatgtgggtgtgatttgaaagttaggttttcagtttggattctttctggatgagctgttctgtctgcccacacctgtagtgctgaaatacagaaagacctctcgggaaaagtttgagtttctcttaatgtctctgtgcttcagtgctagcttatttttggcaacccaatttctaaaaaatgctttcaataacgtgggcttttctttttttctttctttcctttttttttttttttttgagatggagtctcgctgtgtcacccaggctggagtgcagtggcgcgatctcggcttactgcaacctccgcctcccgggttcaagcgattctcttgcctccgcctcctgagtagctgggattacaggcacgcgccaccacgcctggctaattttttgtattttttagtagagacggggtttcaccatactggccagtttttcttatgatggaagacaaaatattgtgtcccagtctagtccacccgtagtgaaatcagtcatttaatcttctcaattcgcatgtttaatgcttaatttttaaataagacattgcttcacaactttgtgtttgaattgataatttgtgcaaatcaggaaaatacgtatttaattaggttgagccatatgagtttgctgatattcgaccattttgtaaaaacaggagtggcaatttcatatggttcaataaaataaaattgagaccgggcacagtggcttatgcctgtaatcccaacactttgggaggctgaggcaggaggatcacttgagctcaggagttcaagaccagactgggcaacatggcaaaaccctgtctctacagaaatacaaaaatgagccaggcatgatggcacatgcctgtagttctagctacttgggaggctgaggtgggaggattgcttgagcccaagaggcagaggttgcgatgagctgagatcatgccactgcaatccagtctgggcaacagaatgagaccctgcctcaaaaaaaaaaaaaaaatacagttgaatgatttttattctcctctttcctttttatctacaataaagtccattttgattttatggtcatccatgggctttggaagtttgaaaaatgctaaacaacctatccaaacccatgagccctcagggtcaactaggctagtgaaggacttaagaataagacctacaccccacagccagagaaagagctttcatagcccctggaagggaagttcttatatcctggggtgaggttgcagacagcagctaccaggcctggcagaggcctgtattatatgtgtgctggagtccagaaccagcacaggattttttatttagcagagttatcttagtaatgaccagtcatgccatataaatctaaaaggcaagacttgttttgttttcatttttgtttttgttttgcagagatggagagataggctgcttgggtctttggttgggtctttataaagctttgcttatcttatattgcttacttaattttggagggaaaaaactaacagacacaccctggtgatggttctttgttcacctcaaggctttgttgttgtgttgttgttgtttgttttttgttttgttttgttttgtttttagatggagtctcgctctatcccccaggctggagtgcagtggcatgacctcggctcactgcaatctccacctcctgggttcaagcgattctcctacctcagcctcccgagtagctgggattacaggcacatgccaccacacccagctaatttttttatatttttagtagagacagagtttcaccatgttgggcaggatggtctcgatctgctgacctcgtgatccacccgcctctgcctcccaaagtgctgggattacaggcgtgagccaccgcccctggccattattttgagttttttttagaaagcttttacaagattacaagaaatgactctcttagggaagaaaaataaccacccagtttcccttcctagtcttagttcaattcatagagtgttgtgtttatccccaaagggtcttgtagtcttcactgcaaacatttgattctgatctactcacatacaaggaaatgtagattgccaagaccaaaactagaggggtgggcttcccatcagggttttcctgtgtggagatgacaggggaaacagggaggaaatcctaattatggcttgtcctcttccctgaattgctgtctacgacagtgtagttccaatgtaaacaaggtgggttggggatggtttgtatagggcaggaggcccacccagaagtcctacccagggaagagagggcccagaatctagttgcagcatttgcccagtaaccctaccccggcctttctttgtgtgttaggaagctggaaatgcaggctggtctccctttcttgcctttgtcactaaccccgagctgtcagccatttggaatcagaactgctttccagtgttctaagtccttatttgattacaaatatttggtgaatcaaagtaaggcactttggtcctaatttttgacctttggtcctaatttttgtttgtaagatgtggagaataaccctgaccttaccaggggtcctgggaatgtgaatccattcgtcaagtggttccacatctagaagaattttgcctatgccatgtcaggcatcattcaacacaaggccaactatctgctgccagtctggcataagatcagattgaaactgctaagtaatggtacatccaaataaacaaagttcttccaagagagtaaacccaagtccatcttatacacgtatttgttctgggttggtggggacgacagttcagccgagtccgatgttctagagcagaggttctcaaccctggctgtgaattaggatcatctggccagtttttgtttttaaatcagtgcaagggccctcccctcagagattcagattcagtagcttcaggtgggacctggaatccatgctttgtttggaacctcaggagtgttcttgatgtgcagccaggattgacaagagcctttagtctagagctcgcagcagacctctagactatttggaatctgattttaaagaatggcccagcagatgaaggtgtttttttaaattgttagtcatgtgaaacgaactgagtattgatcagtaatacagacagggcagctgtgagagagtttgatgctaatctttgcagaactcaagaacatactccataaagtacagctgaaaagatcacgaaaaccttggagccttcgaggaaagagaagggtgacttggggtatgtatggggagaactaaaaacctgtcatcttggttcccacttgtggggaataaagggaaggtattgtcttaactgagctgctaactaatcaagcatgaaggtttctgggaagctgttttgttttttttttttaatttcacctggaattaaattaatagtcccctctggagtcagattttcttttccttcacctatcctcatgcctgagtccacactggattcctcagaataagggtgggcccatttactgctggagcaaagtagaaggttgtggtcctttgctatcacatggtgatggtggtggtttccgtagcaggtaattaaggagatgcacacttttgtatagccctgacagagagaagatgaaagctgctattccttttagtacactttttgagaactaccagaaacctgaactttctctcctagggaagaaaatttggaatttaaataaggccacatttcttcctaggacacaatcacaggaagggcatatggatccgagcatccagggtggttactggggtgatcagacaaataagcattgatgcctggaaggcagaaatcacactgcgacatcaaatgtttcatcaagcaaacagcaaggatctcttcaggctgtgttctctagacccgaaaatgtcctctgtggtttggctgacaaatggaatctctttagaaaacatgcaaaagggtatctcagctatccatgaacgattcggtctaggacaaagaactaacagttccttccaaaatagaggtctgttggtctgtttgacgtcatcccatcatcctatctctccctgtccttgtctgcagtagaagttaatgtaatcataccagatgtttaatgtgaacaagtaatttccaaatgtagaaacaccactgatgcacttagggggaaaaacagtggcagggtgttagagcatctcatcagaggtgaaaatcacccacttggaaacctactgtgcacccgttgtgagttctaagagtgtatcagaaagctgattttaccatctgttgtgaaagattatctgcaatgagggctgctagaaagtcagcctgctgatctcacaagtatatgacttcttattccacttcaaaagtggggaacttgacaagtttcttgtctgccttttgatgttgattctatagattaattagttcaggaacaagtctttcatatacattagactggtatcattgagttctgagctattctgttgttctttaactgacactctggattgccagtgtcggctgctacattctgatacagtaagtcaaaggaatctagtggccaagagttgtagtttagaaacaacccatctgaatactgcttttaccactttgatacctgaaaagatcatccccctttctaaaacctgaaaacaacatatagagaaatactgtagaaaccattgctagtgtcttaactaggaaaagcaagtagactcatcaacaatcctttcaaaacaagacctagagataaacagttttttccagtgtcaattttcatagacatttttaaaaaattaaacacatcttgtcacccagtgctagcaaaaattgtaaagagcaaaaccaaagtttttgatgttagtcttatttttgtaagcagggtatactatagtcgtggcccatatggaacacacaggcagccggttttctgctacctgagccttggagaagatgagaaggaagggctgcctgctgtgctgccctttgaaaaggtccaaagcagacaggagcgcacacagcagaagtcaccttctccttctgatgaccacctttcaaaaggcttaacagaatcaccaagtgtcacagtcagctcttggccagtggaaaattgtctgggcctgtatatgttggaggaactcagatagaaaaggacttgtaaacagcatggaaacctcaacatctgctgtctcaagcacttaaaaaaggctacaattcaggtgttactggatgacttaactgcatggacatttaggggctgacttgtgttgtgattattccaattgtgggctttggagaagcagagggatgattttcagttgtgtgggtgttaagtctatggattgggaatttaccactgaaattgatcgttcaaagtgtgacttcatagtagggccagctcctcctaagttgtccttttgtttttcacataaaatacatctggtactttttacttggaaagttgtactatgtccatgaaaatggttaaatgagaaggccataaagattcatttaatagctgaaaagcaacttttaaaatagaataggacgaatttaacatggaatgatgtgaccttctagggaactttttatagagagcttacatagtgtaattggggagaattttgtcttctatttccattcaacagtagcaaactggtggttttataaaattaacattatagtatgttatataaataaacgttatataaaatgacattaaagtataactgtgaaaaattaaagacttggcgttatccacaacctttatgtgcaataaggaaaactgcagtaggcccccaaagtgccgtctttccctagcattttactcaatgtttgcctttgtgtatgtttagattgctattgtaaagctagccatgtgtgttcctgccctttactgatatttaacacattttctcaaagcttttctttttttaaaaaaacaaaactcaaaataaaacaactaactggctgagctaattttgttttgtattttaaagtaaagtatcatctgttggtagaaggctgtagtgtgatactattcttagtctgtttccctcactgagaggttcttttctgggtgtaagctattcctctccagctttctttaggcctggggttggcaaactacagctggctcctgaaccaagtccagcccactgcctttttttgtaaataaagttttattggcatg

SEQ ID NO: 184695 - DNA, 6094 bp, Homo sapiens
  Payload ID: 16371
  Gene Symbol: SLC9A8
  Gene Name: solute carrier family 9, subfamily A (NHE8, cation proton antiporter 8), member 8
  Uniprot ID: Q9Y2E8
  ENST ID: ENST00000361573
  CDS Start-End: 43-1788
gccccgcggctccgaactcggtggtcctggaagctccgcaggatgggggagaagatggcggaagaggagaggttccccaatacaactcatgagggtttcaatgtcaccctccacaccaccctggttgtcacgacgaaactggtgctcccgacccctggcaagcccatcctccccgtgcagacaggggagcaggcccagcaagaggagcagtccagcggcatgaccattttcttcagcctccttgtcctagctatctgcatcatattggtgcatttactgatccgatacagattacatttcttgccagagagtgttgctgttgtttctttaggtattctcatgggagcagttataaaaattatagagtttaaaaaactggcgaattggaaggaagaagaaatgtttcgtccaaacatgtttttcctcctcctgcttccccctattatctttgagtctggatattcattacacaagggtaacttctttcaaaatattggttccatcaccctgtttgctgtttttgggacggcaatctccgcttttgtagtaggtggaggaatttattttctgggtcaggctgatgtaatctctaaactcaacatgacagacagttttgcgtttggctccctaatatctgctgtcgatccagtggccactattgccattttcaatgcacttcatgtggaccccgtgctcaacatgctggtctttggagaaagtattctcaacgatgcagtctccattgttctgaccaacacagctgaaggtttaacaagaaaaaatatgtcagatgtcagtgggtggcaaacatttttacaagcccttgactacttcctcaaaatgttctttggctctgcagcgctcggcactctcactggcttaatttctgcattagtgctgaagcatattgacttgaggaaaacgccttccttggagtttggcatgatgatcatttttgcttatctgccttatgggcttgcagaaggaatctcactctcaggcatcatggccatccttttctcaggcatcgtgatgtcccactacacgcaccataacctctccccagtcacccagatcctcatgcagcagaccctccgcaccgtggccttcttatgtgaaacatgtgtgtttgcatttcttggcctgtccatttttagttttcctcacaagtttgaaatttcctttgtcatctggtgcatagtgcttgtactatttggcagagcggtaaacattttccctctttcctacctcctgaatttcttccgggatcataaaatcacaccgaagatgatgttcatcatgtggtttagtggcctgcggggagccatcccctatgccctgagcctacacctggacctggagcccatggagaagcggcagctcatcggcaccaccaccatcgtcatcgtgctcttcaccatcctgctgctgggcggcagcaccatgcccctcattcgcctcatggacatcgaggacgccaaggcacaccgcaggaacaagaaggacgtcaacctcagcaagactgagaagatgggcaacactgtggagtcggagcacctgtcggagctcacggaggaggagtacgaggcccactacatcaggcggcaggaccttaagggcttcgtgtggctggacgccaagtacctgaaccccttcttcactcggaggctgacgcaggaggacctgcaccacgggcgcatccagatgaaaactctcaccaacaagtggtacgaggaggtacgccagggcccctccggctccgaggacgacgagcaggagctgctctgacgccaggtgccaaggcttcaggcaggcaggcccaggatgggcgtttgctgcgcacagacactcagcaggggcctcgcagagatgcgtgcatccagcagccccttcaagacataagagggcggggcgaggtactggctgcagagtcgccttagtccagaacctgacaggcctctggagccaggcgacttcttgggaaactgtcatctcccgactcctccctgagccagcctccgctcagtgtggctcctcagcccacagaggggagggagcatggggccaggtgccagtcatctgtgaagctagggcgcctacccccccacccggaggacccctgcggccccctgcctagaggagcaccatctacagttgtgccattccccagccactgccttcatgctgcccccgccggactggcagagccaggggtcagccacctgcctttgagtcatcaagatgcctctgcagccacaattctgacctaagtggcagggcccagaaatcctgaaaacctcccgctgccttttgtgatacttcctgtgctccctcagagagaaacggagtgaccttttgtcctttacctgattggcacttcgcagtctatctccctgggtagcagacggctgctgcccttctctgggcatgttctgaatgtttacactggtaccttctggtatcttctttagagccccctgcaagctgcaactctaggcttttatcttgcggggtcagagcgccctctagagggaaaagctagaggcacagggtttctgccggcccacaactgctgtcttgatttgcattttacagcaaagtgctgagagcctctagtcgcctcctgccatctgatctccctccccaccattcccgtactcagttgttcttttgtctaatcggaggccactgtgctgaggccctgcagtgtctgctcactgctgccatcttcgctgctagtcagggttccatcctctttcccctctcccagttccctaccacgttggatcccattcgtcacccatgctagggtccccaaagcactggggcaggggccagagcagcagcacccagtgctccctcctctactctgacctggggccccagcatcctggagcacacgctccacgcacacacaccccagccctgtcccaggggcctggccccctcagccatctcagggtgaggagctgccagtcatgtccagatggaatgactcccatcctctcctcatctcccctttgacgagcctcaaactgctcagctcatcaaagagccattgccaacttccgtatgtggttctgggtcccagggagccttggaacctggcaccctggggtggtttaattcatcattaagaagcattcctgcttctcaagggacacagtggcctgcatgggccagcatggaccctgggctgatcatgtgcattcctgcttctctggggacacagtgggcccacatgggccagcatggaccctgggctagagcaagcacatctccatctcttccacctcaggcagtgtggctccagatgtcaggagggactgacctcaggaccttccaggttcctctgtgccaggaatgagaggccaggcccgatcctaccacctcgccttgaccctgaagtcagagcaggccagccaagcaggaagcacactgtttactttttgcatgaaaagtaaatgtgtacttgatagagctaaaatatgatcttttttaatttctcaaccccataatttgagccattgccttgcttaattttggtttccaccatttccttttagtggagaagagaggaagtcagagggtagggacctttgcctgcccctgggcgagtgcgggcagggatctgagaccagattgttctcgcacccctgccagaactcactctcccctgaagtttagggtcccatctcccagatgtaagttgttttgcaaactcagtttgccaggatttctttctttcctaatcttaaattcacagataaagcaatgaaaagagtcagatcccatttccgtctgccccctcgtcaccaggtgtgatagccccagccaggtcacacctggcctcacactttgagctgagacttgaaaacgatgctgtggcggaagagcatgtggggcttggtggaggggccccaggatttgttgggggcaaagggggtggcgggaccgttcccaggaggtaccagcacctgcctcgatctcctctgagcctcttctgccccctgtcggccaggtgaggtcagcagcctgggagagtgcccccaagagatgagggcaccccgtgttccttggcaatcttggctcaccttggtaacaaaaggccatagaagtctgtttttctgggtcagttttttttgcctgagaataacaaattgctgctgtctacctttagcacacccaataattctatttggggcagtgaatgcatagaagatataaaaatacgcagcttaactatatcttcctgcgtgtgtatttattttcttctgggtctaggccatggtacaggagaactgtggcgtgtaggaggaatacttcaggatgagtgaaggctggagccagggagcgctggaggaaaccagccctttagccagcagcccctccaccacaggcactgctgtgtggaacgagttcttggaatgaatcccatgctttctgcagcctgtagttgttatgacccctcggaacaaccaccccgtggcttgtgtggggtctcgcagggaaaagggctggcttctaggtccccgagataagtgtgcagggggatgggccagggccaggctaagggtggctcagttccatcatctggaggtcagacacactgtccagaggcagaactgaagccctctcggcccctaccctaagccagccacccctcttcacagtgggtgagctgggctgggctggctggcatgaggccaaggggtaggcctgagcgccagagtcgcccaggttagcccacaggattcctttgtgtgccatggaatgctgaaagatgggtgactggggacccttcttaaaacctttggcaaaggtgccatcggcagggcttggcctcatgaagtctcaggtccgtgttcccgcagggcgcacatgcttggagagtcctcagcagggtagccgaggccaggccacttctgctgaggatggggcaggctggggtgtgggtgtggcctggggtggctcagggctggaactgctgcctgattcctgtgtggggagaagctcagtggccgtttgctgccactgacaaggatttcacatgcagaagagaaaaggcccccctccaccccccgcattccctgccgagtgagagccagtgtttgctgcccttgctgggggcgggtaggaaaccctgagcttcctgatgcggagtcatgaagcagagtcctcgggaaggcatctccacagccccgggtcctctgtctaacgccctccatttcacgccctccatctcacagtcaagataaaggcctcgagaataaagagccagcccccttccatttagtctcctgccgtttcccaaacagttgtccaacagttagacattgaggggcttcactgttaccaggcatgtaacagaaggaggaagactaacacacaccccctgccccatcccatccccctctcccgagctattttcttgctgtggcctctggtgcccttgagttggtctccccggctgctctgcgggggcttcactggcttcggagtgagcgcgaagtgctggtgagcagtgggcctgtgattggatgggaagatgtgcatccgtggtcaaaagtcagctgccagccctgcggaaccagagcctcaggctgggatggggaggcctccctgcttccacctgcatggtgggcatggcctggcttacaccaaaggctttgacggtttctccaagtaaggatctgcaaatcttgaatcgtcctcaaaatgacgaagcttgaattgtcctcaagatggatgtgaatcttacattccttttcatcatttcctttgtaaaaatgacgagtgctgggtttttgttttaagaagcattatgaaggccagacttactcatttttctcccccaagtgagctgcaagaggcccctgttaggcccctgtttcctgagcagtgatgtgctgctcttcttggtggggctttgggctgggaggggaaggcgggtcagagatgggggacctgtggctgccatgcaggagcccctgcgtcatctcgttggactctttaagggagtcaggaatagatgtatgaacagtcgtgtcactggatgcctatttagaaataaagtgtatgctgctgaattgga

SEQ ID NO: 184696 - DNA, 6309 bp, Homo sapiens
  Payload ID: 16371
  Gene Symbol: SLC9A8
  Gene Name: solute carrier family 9, subfamily A (NHE8, cation proton antiporter 8), member 8
  Uniprot ID: Q9Y2E8
  ENST ID: ENST00000417961
  CDS Start-End: 211-2004
ccgaaagccccgggagagactaagaagcaatcctcccacgcgctttctcccaccctcgggccactgagacggagggacagagggccgccctcgcgcggccgaggccccgcctcccgctcgcccgcccgcgcctccagcggaagccggaagcaaaagcgggtcctgctagccccgcggctccgaactcggtggtcctggaagctccgcaggatgggggagaagatggcggaagaggagaggttccccaatacaactcatgagggtttcaatgtcaccctccacaccaccctggttgtcacgacgaaactggtgctcccgacccctggcaagcccatcctccccgtgcagacaggggagcaggcccagcaagaggagcagtccagcggcatgaccattttcttcagcctccttgtcctagctatctgcatcatattggtgcatttactgatccgatacagattacatttcttgccagagagtgttgctgttgtttctttaggtattctcatgggagcagttataaaaattatagagtttaaaaaactggcgaattggaaggaagaagaaatgtttcgtccaaacatgtttttcctcctcctgcttccccctattatctttgagtctggatattcattacacaagggtaacttctttcaaaatattggttccatcaccctgtttgctgtttttgggacggcaatctccgcttttgtagtaggtggaggaatttattttctgggtcagggttttttttttgtgtgtgtctgtgtgtttgtgtgttttattttacaggctgatgtaatctctaaactcaacatgacagacagttttgcgtttggctccctaatatctgctgtcgatccagtggccactattgccattttcaatgcacttcatgtggaccccgtgctcaacatgctggtctttggagaaagtattctcaacgatgcagtctccattgttctgaccaacacagctgaaggtttaacaagaaaaaatatgtcagatgtcagtgggtggcaaacatttttacaagcccttgactacttcctcaaaatgttctttggctctgcagcgctcggcactctcactggcttaatttctgcattagtgctgaagcatattgacttgaggaaaacgccttccttggagtttggcatgatgatcatttttgcttatctgccttatgggcttgcagaaggaatctcactctcaggcatcatggccatccttttctcaggcatcgtgatgtcccactacacgcaccataacctctccccagtcacccagatcctcatgcagcagaccctccgcaccgtggccttcttatgtgaaacatgtgtgtttgcatttcttggcctgtccatttttagttttcctcacaagtttgaaatttcctttgtcatctggtgcatagtgcttgtactatttggcagagcggtaaacattttccctctttcctacctcctgaatttcttccgggatcataaaatcacaccgaagatgatgttcatcatgtggtttagtggcctgcggggagccatcccctatgccctgagcctacacctggacctggagcccatggagaagcggcagctcatcggcaccaccaccatcgtcatcgtgctcttcaccatcctgctgctgggcggcagcaccatgcccctcattcgcctcatggacatcgaggacgccaaggcacaccgcaggaacaagaaggacgtcaacctcagcaagactgagaagatgggcaacactgtggagtcggagcacctgtcggagctcacggaggaggagtacgaggcccactacatcaggcggcaggaccttaagggcttcgtgtggctggacgccaagtacctgaaccccttcttcactcggaggctgacgcaggaggacctgcaccacgggcgcatccagatgaaaactctcaccaacaagtggtacgaggaggtacgccagggcccctccggctccgaggacgacgagcaggagctgctctgacgccaggtgccaaggcttcaggcaggcaggcccaggatgggcgtttgctgcgcacagacactcagcaggggcctcgcagagatgcgtgcatccagcagccccttcaagacataagagggcggggcgaggtactggctgcagagtcgccttagtccagaacctgacaggcctctggagccaggcgacttcttgggaaactgtcatctcccgactcctccctgagccagcctccgctcagtgtggctcctcagcccacagaggggagggagcatggggccaggtgccagtcatctgtgaagctagggcgcctacccccccacccggaggacccctgcggccccctgcctagaggagcaccatctacagttgtgccattccccagccactgccttcatgctgcccccgccggactggcagagccaggggtcagccacctgcctttgagtcatcaagatgcctctgcagccacaattctgacctaagtggcagggcccagaaatcctgaaaacctcccgctgccttttgtgatacttcctgtgctccctcagagagaaacggagtgaccttttgtcctttacctgattggcacttcgcagtctatctccctgggtagcagacggctgctgcccttctctgggcatgttctgaatgtttacactggtaccttctggtatcttctttagagccccctgcaagctgcaactctaggcttttatcttgcggggtcagagcgccctctagagggaaaagctagaggcacagggtttctgccggcccacaactgctgtcttgatttgcattttacagcaaagtgctgagagcctctagtcgcctcctgccatctgatctccctccccaccattcccgtactcagttgttcttttgtctaatcggaggccactgtgctgaggccctgcagtgtctgctcactgctgccatcttcgctgctagtcagggttccatcctctttcccctctcccagttccctaccacgttggatcccattcgtcacccatgctagggtccccaaagcactggggcaggggccagagcagcagcacccagtgctccctcctctactctgacctggggccccagcatcctggagcacacgctccacgcacacacaccccagccctgtcccaggggcctggccccctcagccatctcagggtgaggagctgccagtcatgtccagatggaatgactcccatcctctcctcatctcccctttgacgagcctcaaactgctcagctcatcaaagagccattgccaacttccgtatgtggttctgggtcccagggagccttggaacctggcaccctggggtggtttaattcatcattaagaagcattcctgcttctcaagggacacagtggcctgcatgggccagcatggaccctgggctgatcatgtgcattcctgcttctctggggacacagtgggcccacatgggccagcatggaccctgggctagagcaagcacatctccatctcttccacctcaggcagtgtggctccagatgtcaggagggactgacctcaggaccttccaggttcctctgtgccaggaatgagaggccaggcccgatcctaccacctcgccttgaccctgaagtcagagcaggccagccaagcaggaagcacactgtttactttttgcatgaaaagtaaatgtgtacttgatagagctaaaatatgatcttttttaatttctcaaccccataatttgagccattgccttgcttaattttggtttccaccatttccttttagtggagaagagaggaagtcagagggtagggacctttgcctgcccctgggcgagtgcgggcagggatctgagaccagattgttctcgcacccctgccagaactcactctcccctgaagtttagggtcccatctcccagatgtaagttgttttgcaaactcagtttgccaggatttctttctttcctaatcttaaattcacagataaagcaatgaaaagagtcagatcccatttccgtctgccccctcgtcaccaggtgtgatagccccagccaggtcacacctggcctcacactttgagctgagacttgaaaacgatgctgtggcggaagagcatgtggggcttggtggaggggccccaggatttgttgggggcaaagggggtggcgggaccgttcccaggaggtaccagcacctgcctcgatctcctctgagcctcttctgccccctgtcggccaggtgaggtcagcagcctgggagagtgcccccaagagatgagggcaccccgtgttccttggcaatcttggctcaccttggtaacaaaaggccatagaagtctgtttttctgggtcagttttttttgcctgagaataacaaattgctgctgtctacctttagcacacccaataattctatttggggcagtgaatgcatagaagatataaaaatacgcagcttaactatatcttcctgcgtgtgtatttattttcttctgggtctaggccatggtacaggagaactgtggcgtgtaggaggaatacttcaggatgagtgaaggctggagccagggagcgctggaggaaaccagccctttagccagcagcccctccaccacaggcactgctgtgtggaacgagttcttggaatgaatcccatgctttctgcagcctgtagttgttatgacccctcggaacaaccaccccgtggcttgtgtggggtctcgcagggaaaagggctggcttctaggtccccgagataagtgtgcagggggatgggccagggccaggctaagggtggctcagttccatcatctggaggtcagacacactgtccagaggcagaactgaagccctctcggcccctaccctaagccagccacccctcttcacagtgggtgagctgggctgggctggctggcatgaggccaaggggtaggcctgagcgccagagtcgcccaggttagcccacaggattcctttgtgtgccatggaatgctgaaagatgggtgactggggacccttcttaaaacctttggcaaaggtgccatcggcagggcttggcctcatgaagtctcaggtccgtgttcccgcagggcgcacatgcttggagagtcctcagcagggtagccgaggccaggccacttctgctgaggatggggcaggctggggtgtgggtgtggcctggggtggctcagggctggaactgctgcctgattcctgtgtggggagaagctcagtggccgtttgctgccactgacaaggatttcacatgcagaagagaaaaggcccccctccaccccccgcattccctgccgagtgagagccagtgtttgctgcccttgctgggggcgggtaggaaaccctgagcttcctgatgcggagtcatgaagcagagtcctcgggaaggcatctccacagccccgggtcctctgtctaacgccctccatttcacgccctccatctcacagtcaagataaaggcctcgagaataaagagccagcccccttccatttagtctcctgccgtttcccaaacagttgtccaacagttagacattgaggggcttcactgttaccaggcatgtaacagaaggaggaagactaacacacaccccctgccccatcccatccccctctcccgagctattttcttgctgtggcctctggtgcccttgagttggtctccccggctgctctgcgggggcttcactggcttcggagtgagcgcgaagtgctggtgagcagtgggcctgtgattggatgggaagatgtgcatccgtggtcaaaagtcagctgccagccctgcggaaccagagcctcaggctgggatggggaggcctccctgcttccacctgcatggtgggcatggcctggcttacaccaaaggctttgacggtttctccaagtaaggatctgcaaatcttgaatcgtcctcaaaatgacgaagcttgaattgtcctcaagatggatgtgaatcttacattccttttcatcatttcctttgtaaaaatgacgagtgctgggtttttgttttaagaagcattatgaaggccagacttactcatttttctcccccaagtgagctgcaagaggcccctgttaggcccctgtttcctgagcagtgatgtgctgctcttcttggtggggctttgggctgggaggggaaggcgggtcagagatgggggacctgtggctgccatgcaggagcccctgcgtcatctcgttggactctttaagggagtcaggaatagatgtatgaacagtcgtgtcactggatgcctatttagaaataaagtgtatgctgctgaattgg

SEQ ID NO: 184697 - DNA, 3627 bp, Homo sapiens
  Payload ID: 16372
  Gene Symbol: SLC9A9
  Gene Name: solute carrier family 9, subfamily A (NHE9, cation proton antiporter 9), member 9
  Uniprot ID: Q8IVB4
  ENST ID: ENST00000316549
  CDS Start-End: 210-2147
aaaagagacagggctgctttaagagagaaacaggaagttgtaactagaagccatctgaatactaagccagggcagaatgcttgtgaagtagcaactaaagtggcagtgtttcttctgaaattctcaggcagtcagactgtcttaggcaaatcttgataaaatagcctttatccaggtttttatctaaggaatcccaagaagactggggaatggagagacagtcaagggttatgtcagaaaaggatgagtatcagtttcaacatcagggagcggtggagctgcttgtcttcaattttttgctcatccttaccattttgacaatctggttatttaaaaatcatcgattccgcttcttgcatgaaactggaggagcaatggtgtatggccttataatgggactaattttacgatatgctacagcaccaactgatattgaaagtggaactgtctatgactgtgtaaaactaactttcagtccatcaactctgctggttaatatcactgaccaagtttatgaatataaatacaaaagagaaataagtcagcacaacatcaatcctcatcaaggaaatgctatacttgaaaagatgacatttgatccagaaatcttcttcaatgttttactgccaccaattatatttcatgcaggatatagtctaaagaagagacacttttttcaaaacttaggatctattttaacgtatgccttcttgggaactgccatctcctgcatcgtcatagggttaattatgtatggttttgtgaaggctatgatacatgctggccagctgaaaaatggagactttcatttcactgactgtttattttttggttcactgatgtctgctacagatccagtgacagtgctggccattttccatgaactgcacgtcgaccctgacctgtacacactcttgtttggagagagtgtgttgaatgatgcagtggccatagtccttacatattctatatccatttacagtcccaaggagaatccaaatgcatttgatgccgcagcattcttccagtctgtggggaatttcctgggaatcttcgctggctcatttgcaatggggtctgcgtatgccatcatcacagcactgttgaccaaatttaccaagctgtgtgagttcccgatgctggaaaccggcctgtttttcctgctttcttggagtgccttcctgtctgccgaggctgccggcctaacagggatagttgctgttctcttctgtggagtcacacaagcacattatacctacaacaatctgtcttcggattccaaaataagaactaaacagttgtttgaatttatgaactttttggcggagaacgtcatcttctgttacatgggcctggcactgttcacgttccagaatcatatctttaatgctctttttatacttggagcctttctagcaatttttgttgccagagcctgcaacatatatcccctctccttcctcctgaatctaggccgaaaacagaagatcccctggaactttcagcacatgatgatgttttcaggtttgcgaggagcgatcgcatttgccttagctattcggaacacagaatctcagcccaaacaaatgatgtttaccactacgctgctcctcgtgttcttcactgtctgggtatttggaggaggaacaacccccatgttgacttggcttcagatcagagttggcgtggacctggatgaaaatctgaaggaggacccctcctcacaacaccaggaagcaaataacttggataaaaacatgacgaaagcagagagtgctcggctcttcagaatgtggtatagctttgaccacaagtatctgaaaccaattttaacccactctggtcctccgctgactacaacattacctgaatggtgtggtccgatttccaggctgcttaccagtcctcaagcctatggggaacagctaaaagaggatgatgtggaatgcattgtaaaccaggatgaactagccataaattaccaggagcaagcctcctcaccctgcagtcctcctgcaaggctaggtctggaccagaaagcttcaccccagacgccaggcaaggaaaacatttatgagggagacctcggcctgggaggctatgaactcaagcttgagcaaactttgggtcaatcccagttgaattaattggcatgaagagtacagatgtaatcacaagtaatgcaagactcactgaggaatacaagccaagctgatgaggcagtacaggggagaggctggaaaacatattaagagcataaattggagagaatcaaagccttgtcacatggatcctctggtgcctgaagaaatgagattttattatccctctctattatgcaaatgaatttagttttttgacagcagccattctgattactggattggctggggtggggatggaggtatcaggagtctagctgctggaggatgggacagctgtgctgggtcttcagggcatttctgctgcgaatgcggctctccaggcccttcacttctattctggattttattccctccattaaggagagtttaaaaataaaagaaagcttctgagagtaaacattttgctcctaagctgaagggaatgcccagctatttagtaagtgataagtttcttattttgaggacttgactcccatttgctctcagtgaccccagggcagagcccagagaagtgttccgtacccactgctgatggtttcccagagcccacactgagttgaagaacctattgttcttcttggcatccttcttatgctacttctcccatcgctcaaaggggttgcctatggctgggtgtgccctgccctaaatgcagcaccactttcaagcttagtaggaccattccaagaaaaccaggtttcttctccccataccacgttgtgcctgaagaacaagccttcccgtccttgcctgcatgtgagtcacttcttggctgtgcagcaggtccccccctccccgcgatatgctggagggtaggattctgcagcctgtgttgctctctacctggcagcagactgtgcaggagccccaacctgtcctccaattccagcattcacagctgatgagcagtgcaggagcagggcgagaggaacagagccaatgatgtgtgggttacactgaggagccaaggacagggcctcaggtctcccccttacaaggcgtggctcatggcctgcattccagagaccaacatgatagcttttaattcagctgcatgacctgtgccttttaagccataaagatacctcaagcctagcacctcttgaaatccagatgttcatattagactcgaaaaaataggctccaggcctaggtgcccaggctatgatgagtctgcttttgaaggaggtagggaatgacatcttccttggacccaaagcttaaaagtaatgtatgctttgctgaccactgtttgttaggccttaaacaacattcactgtggtggtatcaggcacactgctatgtgcatcaattatttttttgctttccaaacagaatctctggggcacaagttttacactcaagctaagtataactttgtcatttcaggtaaatatgacaagtggtggagcatgaagttttctaatttgacttaatcctaataaatttttgttacaaagta

SEQ ID NO: 184698 - DNA, 579 bp, Homo sapiens
  Payload ID: 16372
  Gene Symbol: SLC9A9
  Gene Name: solute carrier family 9, subfamily A (NHE9, cation proton antiporter 9), member 9
  ENST ID: ENST00000474151
  CDS Start-End: 137-579
agaatgcttgtgaagtagcaactaaagtggcagtgtttcttctgaaattctcaggcagtcagactgtcttaggcaaatcttgataaaatagcctttatccaggtttttatctaaggaatcccaagaagactggggaatggagagacagtcaagggttatgtcagaaaaggatgagtatcagtttcaacatcagggagcggtggagctgcttgtcttcaattttttgctcatccttaccattttgacaatctggttatttaaaaatcatcgattccgcttcttgcatgaaactggaggagcaatggtgtatggccttataatgggactaattttacgatatgctacagcaccaactgatattgaaagtggaactgtctatgactgtgtaaaactaactttcagtccatcaactctgctggttaatatcactgaccaagtttatgaatataaatacaaaagagaaataagtcagcacaacatcaatcctcatcaaggaaatgctatacttgaaaagagacacttttttcaaaacttaggatctattttaacgtatgccttcttgggaactgccatctcctg

SEQ ID NO: 184699 - DNA, 591 bp, Homo sapiens
  Payload ID: 16372
  Gene Symbol: SLC9A9
  Gene Name: solute carrier family 9, subfamily A (NHE9, cation proton antiporter 9), member 9
  ENST ID: ENST00000474727
  CDS Start-End: 164-349
gaagccatctgaatactaagccagggcagaatgcttgtgaagtagcaactaaagtggcagtgtttcttctgaaattctcaggcagtcagactgtcttaggcaaatcttgataaaatagcctttatccaggtttttatctaaggaatcccaagaagactggggaatggagagacagtcaagggttatgtcagaaaaggatgagtatcagtttcaacatcagggagcggtggagctgcttgtcttcaattttttgctcatccttaccattttgacaatctggttatttaaaaatcatcgattccgcttcttgcatgaaactggaggagcaatggtgtatgatgacatttgatccagaaatcttcttcaatgttttactgccaccaattatatttcatgcaggatatagtctaaagaagagacacttttttcaaaacttaggatctattttaacgtatgccttcttgggaactgccatctcctgcatcgtcatagggttaattatgtatggttttgtgaaggctatgatacatgctggccagctgaaaaatggagactttcatttcactgactgtttattttttggttcactga

SEQ ID NO: 184700 - DNA, 1879 bp, Homo sapiens
  Payload ID: 16373
  Gene Symbol: SLC9B1
  Gene Name: solute carrier family 9, subfamily B (NHA1, cation proton antiporter 1), member 1
  Uniprot ID: Q4ZJI4
  ENST ID: ENST00000296422
  CDS Start-End: 143-1690
gccccgccccgcccctgcgcggaagtctatccgggctttcgcgtcaccaccctgcccacctgggtggcgcgtggcttacgcaacggtcactgggctcctgggccgctcccgggccagcgagggctgcgaaagaagttgtagcatgcataccacagaatcaaaaaatgaacatttggaggatgaaaacttccaaacatctacaactcctcagagtctcattgatcctaataatactgcacaggaagaaactaaaactgtcttatcagatacagaagaaataaaaccacagacaaaaaaggagacatacatttcttgtcctctaagaggagtattgaatgtaattattacaaatggagttatactgtttgtgatatggtgtatgacctggtcaatcttaggctctgaagctctccctggtggaaatttatttgggttgttcattattttttatagtgccattattgggggaaaaattttacaactcattagaatacctttagtgcctccacttccacctcttcttgggatgttactggctggttttacgattaggaatgttccattcatcaatgaacatgtccatgttcctaacacatggtcttcaattttaagaagcattgcccttaccattattctaataagagctgggcttggactcgatccacaggctttgaggcatttgaaggtcgtttgtttcagattggctgtaggtccatgccttatggaggcaagtgcagctgctgttttttcacacttcattatgaaatttccctggcaatgggcatttctattaggttttgttctaggtgctgtctctcctgctgttgttgtcccttacatgatggtgctgcaagaaaatggatatggtgttgaggaaggcattccaaccttattaatggctgctagcagtatggatgacattctggctatcactggattcaatacatgcttgagcatagtcttttcctcaggtggtatacttaataacgccatagcctctataaggaacgtatgtattagtctgctggcaggaattgttttgggattttttgttcgatattttccaagtgaagaccagaaaaaacttacattgaagagaggattccttgttttgactatgtgtgtttctgccgtcttaggcagccaacgtattggtttacatggatctggaggattatgcacactagtgttgagtttcattgcagggacaaaatggtcccaagaaaagatgaaagtccaaaagattattacgactgtatgggatatttttcaaccacttctttttggtttagttggagcagaagtatctgtttcatcgcttgaatcaaatattgttggcatatctgttgccactctaagtttggcattatgtgttcgaattttaaccacatatctattgatgtgctttgctggttttagttttaaggagaaaatatttattgctttagcatggatgcccaaagctacagtacaggctgtgttaggtcctctggctctagaaacagcaagagtctccgcaccccacttggaaccatatgcgaaggatgtgatgacagtagcatttttagccatcttgatcacagctccaaatggagctctacttatgggcattctggggcctaaaatgcttacacgccattatgatccaagcaaaataaaactgcagttgtcaacattagaacatcattaaaaagtttacctgtcatcatctgcctgcttcttttaatgaattatttcacatgacagaagaattttaaagtagaaatatgtggggactgtacagagaatccaggatttagtaaacatgtgatttcagtacagggcttttcttggactttttactccaaagttaatttaataaaaataatattaaatggaa

SEQ ID NO: 184701 - DNA, 1735 bp, Homo sapiens
  Payload ID: 16373
  Gene Symbol: SLC9B1
  Gene Name: solute carrier family 9, subfamily B (NHA1, cation proton antiporter 1), member 1
  Uniprot ID: Q4ZJI4
  ENST ID: ENST00000394789
  CDS Start-End: 123-1550
ggaagtctatccgggctttcgcgtcaccaccctgcccacctgggtggcgcgtggcttacgcaacggtcactgggctcctgggccgctcccgggccagcgagggctgcgaaagaagttgtagcatgcataccacagaatcaaaaaatgaacatttggaggatgaaaacttccaaacatctacaactcctcagagtctcattgatcctaataatactgcacaggaagaaactaaaactgtcttatcagatacagaagaaataaaaccacagacaaaaaaggagacatacatttcttgtcctctaagaggagtattgaatgtaattattacaaatggagttatactgtttgtgatatggtgtatgacctggtcaatcttaggctctgaagctctccctggtggaaatttatttgggttgttcattattttttatagtgccattattgggggaaaaattttacaactcattagaatacctttagtgcctccacttccacctcttcttgggatgttactggctggttttacgattaggaatgttccattcatcaatgaacatgtccatgttcctaacacatggtcttcaattttaagaagcattgcccttaccattattctaataagagctgggcttggactcgatccacaggctttgaggcatttgaaggtcgtttgtttcagattggctgtaggtccatgccttatggaggcaagtgcagctgctgttttttcacacttcattatgaaatttccctggcaatgggcatttctattaggttttgttctaggtgctgtctctcctgctgttgttgtcccttacatgatggtgctgcaagaaaatggatatggtgttgaggaaggcattccaaccttattaatggctgctagcagtatggatgacattctggctatcactggattcaatacatgcttgagcatagtcttttcctcaggtggtatacttaataacgccatagcctctataaggaacgtatgtattagtctgctggcaggaattgttttgggattttttgttcgatattttccaagtgaagaccagaaaaaacttacattgaagagaggattccttgttttgactatgtgtgtttctgccgtcttaggcagccaacgtattggtttacatggatctggaggattatgcacactagtgttgagtttcattgcagggacaaaatggtcccaagaaaagatgaaagtccaaaagattattacgactgtatgggatatttttcaaccacttctttttggtttagttggagcagaagtatctgtttcatcgcttgaatcaaatattgttggcatatctgttgccactctaagtttggcattatgtgttcgaattttaaccacatatctattgatgtgctttgctggttttagttttaaggagaaaatatttattgctttagcatggatgcccaaagctacagtacagattaatcaagctatccttctgttgtttcttcttcgggaggaatggacgaactgcaaggtagccaagaagtgcgagtacaccaaggaaaggcaataaccgaagccattctgaaactaaacatgtagatgtgtcagaatctgcagtgctcttggaaaagaattcaaaatagcatgtctagtttcatccttgagcttattctttgttactttttacattaattcctttttaatggatccataaaactgtgaataaataacacaataaagccagctctaccaaag

SEQ ID NO: 184702 - DNA, 1184 bp, Homo sapiens
  Payload ID: 16373
  Gene Symbol: SLC9B1
  Gene Name: solute carrier family 9, subfamily B (NHA1, cation proton antiporter 1), member 1
  ENST ID: ENST00000504216
  CDS Start-End: 70-216
gcttacgcaacggtcactgggctcctgggccgctcccgggccagcgagggctgcgaaagaagttgtagcatgcataccacagaatcaaaaaatgaacatttggaggatgaaaacttccaaacatctacaactcctcagttttgttctaggtgctgtctctcctgctgttgttgtcccttacatgatggtgctgcaagaaaatggatatggtgttgaggaaggcattccaaccttattaatggctgctagcagtatggatgacattctggctatcactggattcaatacatgcttgagcatagtcttttcctcaggtgtggcctccgtctttcacccaggctggagtgtggtgtcacgatctcagctcactgcaaactctgcctcccgggttcaagtgattctcctccctcagcctcccgagtacctgggaccacaggtggtatacttaataacgccatagcctctataaggaacgtatgtattagtctgctggcaggaattgttttgggattttttgttcgatattttccaagtgaagaccagaaaaaacttacattgaagagaggattccttgttttgactatgtgtgtttctgccgtcttaggcagccaacgtattggtttacatggatctggaggattatgcacactagtgttgagtttcattgcagggacaaaatggtcccaagaaaagatgaaagtccaaaagattattacgactgtatgggatatttttcaaccacttctttttggtttagttggagcagaagtatctgtttcatcgcttgaatcaaatattgttggcatatctgttgccactctaagtttggcattatgtgttcgaattttaaccacatatctattgatgtgctttgctggttttagttttaaggagaaaatatttattgctttagcatggatgcccaaagctacagtacaggctgtgttaggtcctctggctctagaaacagcaagagtctccgcaccccacttggaaccatatgcgaaggatgtgatgacagtagcatttttagccatcttgatcacagctccaaatggagctctacttatgggcattctggggcctaaaatgcttacacgccattatgatccaagcaaaataaaactgcagttgtcaacattagaacatcattaaaaagtttacctgtcatcatctgcctgctt

SEQ ID NO: 184703 - DNA, 629 bp, Homo sapiens
  Payload ID: 16373
  Gene Symbol: SLC9B1
  Gene Name: solute carrier family 9, subfamily B (NHA1, cation proton antiporter 1), member 1
  ENST ID: ENST00000511253
  CDS Start-End: 1-384
acaggtggtatacttaataacgccatagcctctataaggaacgtatgtattagtctgctggcaggaattgttttgggattttttgttcgatattttccaagtgaagaccagaaaaaacttacattgaagagaggattccttgttttgactatgtgtgtttctgccgtcttaggcagccaacgtattggtttacatggatctggaggattatgcacactagtgttgagtttcattgcagggacaaaatggtcccaagaaaagatgaaagtccaaaagattattacgactgtatgggatatttttcaaccacttctttttggtttagttggagcagaagtatctgtttcatcgcttgaatcaaatattgttggtaagaataattagagcacaaaaaatatgaaattcaaaaatatttaagaaaattataaatacatttatttttatttacaatatatctttggctacaacgaccttcttcagaaacacatgttgatacagtgtcatattttcatattgctcttcctttacactgggtgctcttttttttttataaaccaaggacagccctgaatatattccctgagttatctgaagaaataaatataagatttctttcctgagggaacata

SEQ ID NO: 184704 - DNA, 650 bp, Homo sapiens
  Payload ID: 16373
  Gene Symbol: SLC9B1
  Gene Name: solute carrier family 9, subfamily B (NHA1, cation proton antiporter 1), member 1
  Uniprot ID: Q4ZJI4
  ENST ID: ENST00000510243
  CDS Start-End: 2-223
catgcataccacagaatcaaaaaatgaacatttggaggatgaaaacttccaaacatctacaactcctcagagtctcattgatcctaataatactgcacaggaagaaactaaaactgtcttatcagatacagaagaaataaaaccacagacaaaaaaggagacatacatttcttgtcctctaagaggagtattgaatgtaattattacaaatgttttgttctaggtgctgtctctcctgctgttgttgtcccttacatgatggtgctgcaagaaaatggatatggtgttgaggaaggcattccaaccttattaatggctgctagcagtatggatgacattctggctatcactggattcaatacatgcttgagcatagtcttttcctcaggtggtatacttaataacgccatagcctctataaggaacgtatgtattagtctgctggcaggaattgttttgggattttttgttcgatattttccaagtgaagaccagaaaaaacttacattgaagagaggattccttgttttgactatgtgtgtttctgccgtcttaggcagccaacgtattggtttacatggatctggaggattatgcacactagtgttgagtttcattgcagggacaaaatggtcccaagaaaaggtgaa

SEQ ID NO: 184705 - DNA, 763 bp, Homo sapiens
  Payload ID: 16373
  Gene Symbol: SLC9B1
  Gene Name: solute carrier family 9, subfamily B (NHA1, cation proton antiporter 1), member 1
  ENST ID: ENST00000514340
  CDS Start-End: 2-763
catgcataccacagaatcaaaaaatgaacatttggaggatgaaaacttccaaacatctacaactcctcagagtctcattgatcctaataatactgcacaggaagaaactaaaactgtcttatcagatacagaagaaataaaaccacagacaaaaaaggagacatacatttcttgtcctctaagaggagtattgaatgtaattattacaaatgggatgttactggctggttttacgattaggaatgttccattcatcaatgaacatgtccatgttcctaacacatggtcttcaattttaagaagcattgcccttaccattattctaataagagctgggcttggactcgatccacaggctttgaggcatttgaaggtcgtttgtttcagattggctgtaggtccatgccttatggaggcaagtgcagctgctgttttttcacacttcattatgaaatttccctggcaatgggcatttctattaggttttgttctaggtgctgtctctcctgctgttgttgtcccttacatgatggtgctgcaagaaaatggatatggtgttgaggaaggcattccaaccttattaatggctgctagcagtatggatgacattctggctatcactggattcaatacatgcttgagcatagtcttttcctcaggtggtatacttaataacgccatagcctctataaggaacgtatgtattagtctgctggcaggaattgttttgggattttttgttcgatattttccaagtgaagac

SEQ ID NO: 184706 - DNA, 568 bp, Homo sapiens
  Payload ID: 16373
  Gene Symbol: SLC9B1
  Gene Name: solute carrier family 9, subfamily B (NHA1, cation proton antiporter 1), member 1
  ENST ID: ENST00000510559
  CDS Start-End: 420-568
acctgggtggcgcgtggcttacgcaacggtcactgggctcctgggccgctcccgggccagcgagggctgcgaaagaagttgtagaaatcaaaggtaatttgaggcttcagctctgtgcagagtgcaaggaaccaaagatgcaaagttgggagtcaccagcatatggaaaactacctagggcaagtgtgctcaccgataacattgcagtgactagtgtaaagcagaggaaaagaagccaacaaaagagatggaagaatagccaatgaagtaggaagaaaatctgaagagtgcagtgacataaaagccgagactggccgggcatggtggctcatgcctgtaatcccagtactttgggaggctaagatgaggaaattgagactcagagaggttaagggtcttgacgaaggacatatacctacatgcataccacagaatcaaaaaatgaacatttggaggatgaaaacttccaaacatctacaactcctcagagtctcattgatcctaataatactgcacaggaagaaactaaaactgtcttatcagatacagaagaaataaaaccacagac

SEQ ID NO: 184707 - DNA, 1548 bp, Homo sapiens
  Payload ID: 16373
  Gene Symbol: SLC9B1
  Gene Name: solute carrier family 9, subfamily B (NHA1, cation proton antiporter 1), member 1
  ENST ID: ENST00000514972
  CDS Start-End: 65-667
cgcaacggtcactgggctcctgggccgctcccgggccagcgagggctgcgaaagaagttgtagcatgcataccacagaatcaaaaaatgaacatttggaggatgaaaacttccaaacatctacaactcctcagagtctcattgatcctaataatactgcacaggaagaaactaaaactgtcttatcagatacagaagaaataaaaccacagacaaaaaaggagacatacatttcttgtcctctaagaggagtattgaatgtaattattacaaatggagttatactgtttgtgatatggtgtatgacctggtcaatcttaggctctgaagctctccctggtggaaatttatttgggttgttcattattttttatagtgccattattgggggaaaaattttacaactcattagaatacctttagtgcctccacttccacctcttcttgggatgttactggctggttttacgattaggaatgttccattcatcaatgaacatgtccatgttcctaacacatggtcttcaattttaagaagcattgcccttaccattattctaataagagctgggcttggactcgatccacagttttgttctaggtgctgtctctcctgctgttgttgtcccttacatgatggtgctgcaagaaaatggatatggtgttgaggaaggcattccaaccttattaatggctgctagcagtatggatgacattctggctatcactggattcaatacatgcttgagcatagtcttttcctcaggtggtatacttaataacgccatagcctctataaggaacgtatgtattagtctgctggcaggaattgttttgggattttttgttcgatattttccaagtgaagaccagaaaaaacttacattgaagagaggattccttgttttgactatgtgtgtttctgccgtcttaggcagccaacgtattggtttacatggatctggaggattatgcacactagtgttgagtttcattgcagggacaaaatggtcccaagaaaagatgaaagtccaaaagattattacgactgtatgggatatttttcaaccacttctttttggtttagttggagcagaagtatctgtttcatcgcttgaatcaaatattgttggcatatctgttgccactctaagtttggcattatgtgttcgaattttaaccacatatctattgatgtgctttgctggttttagttttaaggagaaaatatttattgctttagcatggatgcccaaagctacagtacagattaatcaagctatccttctgttgtttcttcttcgggaggaatggacgaactgcaaggtagccaagaagtgcgagtacaccaaggaaaggcaataaccgaagccattctgaaactaaacatgtagatgtgtcagaatctgcagtgctcttggaaaagaattcaaaatagcatgtctagtttcatccttgagcttattctttgttactttttacattaattcctttttaatggatccataaaactgtgaataaataacacaataaagccagctctaccaaa

SEQ ID NO: 184708 - DNA, 1399 bp, Homo sapiens
  Payload ID: 16373
  Gene Symbol: SLC9B1
  Gene Name: solute carrier family 9, subfamily B (NHA1, cation proton antiporter 1), member 1
  Uniprot ID: Q4ZJI4
  ENST ID: ENST00000503584
  CDS Start-End: 54-275
ctgggctcctgggccgctcccgggccagcgagggctgcgaaagaagttgtagcatgcataccacagaatcaaaaaatgaacatttggaggatgaaaacttccaaacatctacaactcctcagagtctcattgatcctaataatactgcacaggaagaaactaaaactgtcttatcagatacagaagaaataaaaccacagacaaaaaaggagacatacatttcttgtcctctaagaggagtattgaatgtaattattacaaatgttttgttctaggtgctgtctctcctgctgttgttgtcccttacatgatggtgctgcaagaaaatggatatggtgttgaggaaggcattccaaccttattaatggctgctagcagtatggatgacattctggctatcactggattcaatacatgcttgagcatagtcttttcctcaggtgtggcctccgtctttcacccaggctggagtgtggtgtcacgatctcagctcactgcaaactctgcctcccgggttcaagtgattctcctccctcagcctcccgagtacctgggaccacaggtggtatacttaataacgccatagcctctataaggaacgtatgtattagtctgctggcaggaattgttttgggattttttgttcgatattttccaagtgaagaccagaaaaaacttacattgaagagaggattccttgttttgactatgtgtgtttctgccgtcttaggcagccaacgtattggtttacatggatctggaggattatgcacactagtgttgagtttcattgcagggacaaaatggtcccaagaaaagatgaaagtccaaaagattattacgactgtatgggatatttttcaaccacttctttttggtttagttggagcagaagtatctgtttcatcgcttgaatcaaatattgttggcatatctgttgccactctaagtttggcattatgtgttcgaattttaaccacatatctattgatgtgctttgctggttttagttttaaggagaaaatatttattgctttagcatggatgcccaaagctacagtacagagatgagatctcaccacgttgcccaagctggtatggtactcctgagatcaagtactccacccacctcagcctcccaaagtgctgagattacaggaatggacgaactgcaaggtagccaagaagtgcgagtacaccaaggaaaggcaataaccgaagccattctgaaactaaacatgtagatgtgtcagaatctgcagtgctcttggaaaagaattcaaaatagcatgtctagtttcatccttgagcttattctttgttactttttacattaattcctttttaatggatccataaaactgtgaataaataacacaataaagccagctctaccaaa

SEQ ID NO: 184709 - DNA, 2300 bp, Homo sapiens
  Payload ID: 16374
  Gene Symbol: SLC9B2
  Gene Name: solute carrier family 9, subfamily B (NHA2, cation proton antiporter 2), member 2
  Uniprot ID: Q86UD5
  ENST ID: ENST00000362026
  CDS Start-End: 163-1776
gaagatgcgcgaatcgggaaccccagagcgcggtggctagaccgggctccgccgcctcccccacagcccctttcctaatcgttcagacggagcctggtcgacttcgccggagactgccagatctcgttcctcttccctgtgtcatcttcttaattataaataatgggggatgaagataaaagaattacatatgaagattcagaaccatccacaggaatgaattacacgccctccatgcatcaagaagcacaggaggagacagttatgaagctcaaaggtatagatgcaaatgaaccaacagaaggaagtattcttttgaaaagcagtgaaaaaaagctacaagaaacaccaactgaagcaaatcacgtacaaagactgagacaaatgctggcttgccctccacatggtttactggacagggtcataacaaatgttaccatcattgttcttctgtgggctgtagtttggtcaattactggcagtgaatgtcttcctggaggaaacctatttggaattataatcctattctattgtgccatcattggtggtaaacttttggggcttattaagttacctacattgcctccactgccttctcttcttggcatgctgcttgcagggtttctcatcagaaatatcccagtcatcaacgataatgtgcagatcaagcacaagtggtcttcctctttgagaagcatagccctgtctatcattctggttcgtgctggccttggtctggattcaaaggccctgaagaagttaaagggcgtttgtgtaagactgtccatgggtccctgtattgtggaggcgtgcacatctgctcttcttgcccattacctgctgggtttaccatggcaatggggatttatactgggttttgttttaggtgctgtatctccagctgttgtggtgccttcaatgctccttttgcagggaggaggctatggtgttgagaagggtgtcccaaccttgctcatggcagctggcagcttcgatgacattctggccatcactggcttcaacacatgcttgggcatagccttttccacaggctctactgtctttaatgtcctcagaggagttttggaggtggtaattggtgtggcaactggatctgttcttggatttttcattcagtactttccaagccgtgaccaggacaaacttgtgtgtaagagaacattccttgtgttggggttgtctgtgctagctgtgttcagcagtgtgcattttggtttccctggatcaggaggactgtgcacgttggtcatggctttccttgcaggcatgggatggaccagcgaaaaggcagaggttgaaaagataattgcagttgcctgggacatttttcagccccttctttttggactaattggagcagaggtatctattgcatctctcagaccagaaactgtaggcctttgtgttgccaccgtaggcattgcagtattgatacgaattttgactacatttctgatggtgtgttttgctggttttaacttaaaagaaaagatatttatttcttttgcatggcttccaaaggccacagttcaggctgcaataggatctgtggctttggacacagcaaggtcacatggagagaaacaattagaagactatggaatggatgtgttgacagtggcatttttgtccatcctcatcacagccccaattggaagtctgcttattggtttactgggccccaggcttctgcagaaagttgaacatcaaaataaagatgaagaagttcaaggagagacttctgtgcaagtttagaggaagcgcggattctattactggaaactttgggactgaaaggccaaagcttctgggcccaccatcaacgcagctccgctttcatttctttcacatacaactttccacataagatttcatgcggaaaaaaaaaaaaaactcacaaaggttttatactgataacagtatattaagtgtttactttgtacacagcgtctttgttccagacacttgccatgtctcatttattctcacaccaccaccacagcgtcctttacagatgagaagacaacctcagggagacgatgtatttgcctaggtcccatagctagcaagtgacagcgctgcagtttaagctcaggccgtcttggggagagaccgtgctcttctaccattgcactttaagctgactttaggggaaacacaatctgagttttgacaagtttacttctggcacatgcagtcccgagcactgctttttggctaaaatgcccagtgatgtcaactctgtccctggatttctacaacccgatgagtcaatattc

SEQ ID NO: 184710 - DNA, 3126 bp, Homo sapiens
  Payload ID: 16374
  Gene Symbol: SLC9B2
  Gene Name: solute carrier family 9, subfamily B (NHA2, cation proton antiporter 2), member 2
  Uniprot ID: Q86UD5
  ENST ID: ENST00000394785
  CDS Start-End: 633-2246
cggtgtctcgtcatctccgggaagactcggcgcctgggtccgcgctctctgggtaagctttccgggaagctttcccgggagctcgctggtcctggccccagaagcctgcggacccgcccagggaggataagcagctgaaagaccgcgcggtgccgctccgaggccccgggacgtgggcccatggtcggcctggcgccacctttccgggggaagccacgcgcaccaggcatcgcacgcggctctgcacccgcgccgccggacctgaaacccggcggagggcacacggggctgccgctgcgggccccggaccaacccatgcttactccggagcctgtaccggcgccgacgggtcggacctccctgcgcggtgtcgcccagcgggttcgtgcgaaaggcggggccgactacacgcggtgccgcgccctgagaccgtttatctgcagtcaacgcagcctcccggctcagcctgggaagatgcgcgaatcgggaaccccagagcgcggtggctagaccgggctccgccgcctcccccacagcccctttcctaatcgttcagacggagcctggtcgacttcgccggagactgccagatctcgttcctcttccctgtgtcatcttcttaattataaataatgggggatgaagataaaagaattacatatgaagattcagaaccatccacaggaatgaattacacgccctccatgcatcaagaagcacaggaggagacagttatgaagctcaaaggtatagatgcaaatgaaccaacagaaggaagtattcttttgaaaagcagtgaaaaaaagctacaagaaacaccaactgaagcaaatcacgtacaaagactgagacaaatgctggcttgccctccacatggtttactggacagggtcataacaaatgttaccatcattgttcttctgtgggctgtagtttggtcaattactggcagtgaatgtcttcctggaggaaacctatttggaattataatcctattctattgtgccatcattggtggtaaacttttggggcttattaagttacctacattgcctccactgccttctcttcttggcatgctgcttgcagggtttctcatcagaaatatcccagtcatcaacgataatgtgcagatcaagcacaagtggtcttcctctttgagaagcatagccctgtctatcattctggttcgtgctggccttggtctggattcaaaggccctgaagaagttaaagggcgtttgtgtaagactgtccatgggtccctgtattgtggaggcgtgcacatctgctcttcttgcccattacctgctgggtttaccatggcaatggggatttatactgggttttgttttaggtgctgtatctccagctgttgtggtgccttcaatgctccttttgcagggaggaggctatggtgttgagaagggtgtcccaaccttgctcatggcagctggcagcttcgatgacattctggccatcactggcttcaacacatgcttgggcatagccttttccacaggctctactgtctttaatgtcctcagaggagttttggaggtggtaattggtgtggcaactggatctgttcttggatttttcattcagtactttccaagccgtgaccaggacaaacttgtgtgtaagagaacattccttgtgttggggttgtctgtgctagctgtgttcagcagtgtgcattttggtttccctggatcaggaggactgtgcacgttggtcatggctttccttgcaggcatgggatggaccagcgaaaaggcagaggttgaaaagataattgcagttgcctgggacatttttcagccccttctttttggactaattggagcagaggtatctattgcatctctcagaccagaaactgtaggcctttgtgttgccaccgtaggcattgcagtattgatacgaattttgactacatttctgatggtgtgttttgctggttttaacttaaaagaaaagatatttatttcttttgcatggcttccaaaggccacagttcaggctgcaataggatctgtggctttggacacagcaaggtcacatggagagaaacaattagaagactatggaatggatgtgttgacagtggcatttttgtccatcctcatcacagccccaattggaagtctgcttattggtttactgggccccaggcttctgcagaaagttgaacatcaaaataaagatgaagaagttcaaggagagacttctgtgcaagtttagaggtgaaaagagagagtgctgaacataatgtttagaaagctgctacttttttcaagatgcatattgaaatatgtaatgtttaagcttaaaatgtaatagaaccaaaagtgtagctgtttctttaaacagcatttttagcccttgctctttccatgtgggtggtaatgatctatatcaccaaccttaatctctctgccttttttttcaaacaccccttcatcatccatcttaatttgcataaggacatatctactttaatgtactaccacagtttacagttaatgtgggaaagaccagcttcagtatcctcttcagctaggattgccctaacttttaactttcacagtttcctgattcatatttgcccaggctctgatgccttgaattggttttggctctcttttttggatctgtttttgttgttaaacatcataatgcagtctctcattaatttttaccatcatttaccctgataatctgcctcttctccatttctccttcccttactacctttctttgaattactgtaactgattggtcccaccaaaattttaaagtacatgaagtatcttcattggttcatcctcttgccccctccagatgtcaaaaaactttatcctgccccctagctgaccacccaggttcctttatttcagtggcccatgtgagtctaccttcccctaaggagtgccctaatccagccctttttttgtttcttatgacccatatctttaggctcttcccatttctaggtgggagataggtaagtttcaaatctatgccagtcttatgaatattacattagggtaatgtgctataatgaagaaataaaaaatacagtgcttaaaagaaaataaaattctatttctgtctaatgaaa

SEQ ID NO: 184711 - DNA, 1115 bp, Homo sapiens
  Payload ID: 16374
  Gene Symbol: SLC9B2
  Gene Name: solute carrier family 9, subfamily B (NHA2, cation proton antiporter 2), member 2
  ENST ID: ENST00000506288
  CDS Start-End: 1-1065
gtttggtcaattactggcagtgaatgtcttcctggaggaaacctatttggaattataatcctattctattgtgccatcattggtggtaaacttttggggcttattaagttacctacattgcctccactgccttctcttcttggcatgctgcttgcagggtttctcatcagaaatatcccagtcatcaacgataatgtgcagatcaagcacaagtggtcttcctctttgagaagcatagccctgtctatcattctggttcgtgctggccttggtctggattcaaaggccctgaagaagttaaagggcgtttgtgtaagactgtccatgggtccctgtattgtggaggcgtgcacatctgctcttcttgcccattacctgctgggtttaccatggcaatggggatttatactgggttttgttttaggtgctgtatctccagctgttgtggtgccttcaatgctccttttgcagggaggaggctatggtgttgagaagggtgtcccaaccttgctcatggcagctggcagcttcgatgacattctggccatcactggcttcaacacatgcttgggcatagccttttccacaggctctactgtctttaatgtcctcagaggagttttggaggtggtaattggtgtggcaactggatctgttcttggatttttcattcagtactttccaagccgtgaccaggacaaacttgtgtgtaagagaacattccttgtgttggggttgtctgtgctagctgtgttcagcagtgtgcattttggtttccctggatcaggaggactgtgcacgttggtcatggctttccttgcaggcatgggatggaccagcgaaaaggcagaggttgaaaagataattgcagttgcctgggacatttttcagccccttctttttggactaattggagcagaggtatctattgcatctctcagaccagaaactgtaggaagcgcggattctattactggaaactttgggactgaaaggccaaagcttctgggcccaccatcaacgcagctccgctttcatttctttcacatacaactttccacataagatttcatgcggaaaaaaaaaaaaaactcacaaaggttttatactgataa

SEQ ID NO: 184712 - DNA, 1826 bp, Homo sapiens
  Payload ID: 16374
  Gene Symbol: SLC9B2
  Gene Name: solute carrier family 9, subfamily B (NHA2, cation proton antiporter 2), member 2
  ENST ID: ENST00000503230
  CDS Start-End: 178-1620
aataggttcatcacaaaagaggacctgagagacaagaatgaatggtttctgactggtggagaaatttgaggataatctcccttgcttgaaaagcggtgattaagattggcacttgcttacaggagtgaaaaacagatctcgttcctcttccctgtgtcatcttcttaattataaataatgggggatgaagataaaagaattacatatgaagattcagaaccatccacaggaatgaattacacgccctccatgcatcaagaagcacaggaggagacagttatgaagctcaaaggtatagatgcaaatgaaccaacagaaggaagtattcttttgaaaagcagtgaaaaaaagctacaagaaacaccaactgaagcaaatcacgtacaaagactgagacaaatgctggcttgccctccacatggtttactggacagggtcataacaaatggcatgctgcttgcagggtttctcatcagaaatatcccagtcatcaacgataatgtgcagatcaagcacaagtggtcttcctctttgagaagcatagccctgtctatcattctggttcgtgctggccttggtctggattcaaaggccctgaagaagttaaagggcgtttgtgtaagactgtccatgggtccctgtattgtggaggcgtgcacatctgctcttcttgcccattacctgctgggtttaccatggcaatggggatttatactgggttttgttttaggtgctgtatctccagctgttgtggtgccttcaatgctccttttgcagggaggaggctatggtgttgagaagggtgtcccaaccttgctcatggcagctggcagcttcgatgacattctggccatcactggcttcaacacatgcttgggcatagccttttccacaggctctactgtctttaatgtcctcagaggagttttggaggtggtaattggtgtggcaactggatctgttcttggatttttcattcagtactttccaagccgtgaccaggacaaacttgtgtgtaagagaacattccttgtgttggggttgtctgtgctagctgtgttcagcagtgtgcattttggtttccctggatcaggaggactgtgcacgttggtcatggctttccttgcaggcatgggatggaccagcgaaaaggcagaggttgaaaagataattgcagttgcctgggacatttttcagccccttctttttggactaattggagcagaggtatctattgcatctctcagaccagaaactgtaggcctttgtgttgccaccgtaggcattgcagtattgatacgaattttgactacatttctgatggtgtgttttgctggttttaacttaaaagaaaagatatttatttcttttgcatggcttccaaaggccacagttcaggctgcaataggatctgtggctttggacacagcaaggtcacatggagagaaacaattagaagactatggaatggatgtgttgacagtggcatttttgtccatcctcatcacagccccaattggaagtctgcttattggtttactgggccccaggcttctgcagaaagttgaacatcaaaataaagatgaagaagttcaaggagagacttctgtgcaagtttagaggtgaaaagagagagtgctgaacataatgtttagaaagctgctacttttttcaagatgcatattgaaatatgtaatgtttaagcttaaaatgtaatagaaccaaaagtgtagctgtttctttaaacagcatttttagcccttgctctttccatgtgggtggtaatgatctatatcaccaaccttaatctctctgccttttttttc

SEQ ID NO: 184713 - DNA, 578 bp, Homo sapiens
  Payload ID: 16374
  Gene Symbol: SLC9B2
  Gene Name: solute carrier family 9, subfamily B (NHA2, cation proton antiporter 2), member 2
  ENST ID: ENST00000508136
  CDS Start-End: 92-430
gagaggaatgtaaagaagtgcctaggcctcctgttttattgttttgttttgttattaatcttcattttcttttggaatctgcctaagagttatggcaactgatgatgagaaactaagactaccaatgttaagagttgtgaacagatgtgtgtacagcacaaccaaggcagccgtgattggcctcacaaaatctgtggctgcagatttcatccagcagggcatcaggtgcaactgtgtgtgcccaggaacagttgatacgccatctctacaagaaagaatacaagccagaggaaatcctgaagaggcacggaatgatttcctgaagagacaaaagacgggaagattcgcaactgcagaagaaatagccatgctctgcgtgtatttggcttctgatgaaatctcgttcctcttccctgtgtcatcttcttaattataaataatgggggatgaagataaaagaattacatatgaagattcagaaccatccacaggaatgaattacacgccctccatgcatcaagaagcacaggaggagacagttatgaagctcaaaggtatagatgcaaatgaaccaacag

SEQ ID NO: 184714 - DNA, 1911 bp, Homo sapiens
  Payload ID: 16374
  Gene Symbol: SLC9B2
  Gene Name: solute carrier family 9, subfamily B (NHA2, cation proton antiporter 2), member 2
  ENST ID: ENST00000503103
  CDS Start-End: 192-1445
agtcaacgcagcctcccggctcagcctgggaagatgcgcgaatcgggaaccccagagcgcggtggctagaccgggctccgccgcctcccccacagcccctttcctaatcgttcagacggagcctggtcgacttcgccggagactgccagatctcgttcctcttccctgtgtcatcttcttaattataaataatgggggatgaagataaaagaattacatatgaagattcagaaccatccacaggaatgaattacacgccctccatgcatcaagaagcacaggaggagacagttatgaagctcaaaggtatagatgcaaatgaaccaacagaaggaagtattcttttgaaaagcagtgaaaaaaagctacaagaaacaccaactgaagcaaatcacgtacaaagactgagacaaatgctggcttgccctccacatggtttactggacagggtcataacaaatggcatgctgcttgcagggtttctcatcagaaatatcccagtcatcaacgataatgtgcagatcaagcacaagtggtcttcctctttgagaagcatagccctgtctatcattctggttcgtgctggccttggtctggattcaaaggccctgaagaagttaaagggcgtttgtgtaagactgtccatgggtccctgtattgtggaggcgtgcacatctgctcttcttgcccattacctgctgggtttaccatggcaatggggatttatactgggttttgttttaggtgctgtatctccagctgttgtggtgccttcaatgctccttttgcagggaggaggctatggtgttgagaagggtgtcccaaccttgctcatggcagctggcagcttcgatgacattctggccatcactggcttcaacacatgcttgggcatagccttttccacaggctctactgtctttaatgtcctcagaggagttttggaggtggtaattggtgtggcaactggatctgttcttggatttttcattcagtactttccaagccgtgaccaggacaaacttgtgtgtaagagaacattccttgtgttggggttgtctgtgctagctgtgttcagcagtgtgcattttggtttccctggatcaggaggactgtgcacgttggtcatggctttccttgcaggcatgggatggaccagcgaaaaggcagaggttgaaaagataattgcagttgcctgggacatttttcagccccttctttttggactaattggagcagaggtatctattgcatctctcagaccagaaactgtaggctgcaataggatctgtggctttggacacagcaaggtcacatggagagaaacaattagaagactatggaatggatgtgttgacagtggcatttttgtccatcctcatcacagccccaattggaagtctgcttattggtttactgggccccaggcttctgcagaaagttgaacatcaaaataaagatgaagaagttcaaggagagacttctgtgcaagtttagaggtgaaaagagagagtgctgaacataatgtttagaaagctgctacttttttcaagatgcatattgaaatatgtaatgtttaagcttaaaatgtaatagaaccaaaagtgtagctgtttctttaaacagcatttttagcccttgctctttccatgtgggtggtaatgatctatatcaccaaccttaatctctctgccttttttttcaaacaccccttcatcatccatcttaatttgcataaggacatatctactttaatgtactaccacagtttacagttaatgtgggaaagaccagcttcagtatcctcttcagctaggattgccctaacttttaactttcacagtttcctgattcatatttgcccaggctctgatgccttgaattggttttggctctcttttttggatctgt

SEQ ID NO: 184715 - DNA, 648 bp, Homo sapiens
  Payload ID: 16374
  Gene Symbol: SLC9B2
  Gene Name: solute carrier family 9, subfamily B (NHA2, cation proton antiporter 2), member 2
  ENST ID: ENST00000503818
  CDS Start-End: 220-648
atttcagatgatctgaagaagggtattggatggaacctatccaataggttcatcacaaaagaggacctgagagacaagaatgaatggtttctgactggtggagaaatttgaggataatctcccttgcttgaaaagcggtgattaagattggcacttgcttacaggagtgaaaaacagatctcgttcctcttccctgtgtcatcttcttaattataaataatgggggatgaagataaaagaattacatatgaagattcagaaccatccacaggaatgaattacacgccctccatgcatcaagaagcacaggaggagacagttatgaagctcaaaggtatagatgcaaatgaaccaacagaaggaagtattcttttgaaaagcagtgaaaaaaagctacaagaaacaccaactgaagcaaatcacgtacaaagactgagacaaatgctggcttgccctccacatggtttactggacagggtcataacaaatgttaccatcattgttcttctgtgggctgtagtttggtcaattactggcagtgaatgtcttcctggaggaaacctatttggaattataatcctattctattgtgccatcattggtggtaaacttttggggcttattaagttacctacattgcctccactg

SEQ ID NO: 184716 - DNA, 4172 bp, Homo sapiens
  Payload ID: 16375
  Gene Symbol: SLC9C1
  Gene Name: solute carrier family 9, subfamily C (Na+-transporting carboxylic acid decarboxylase), member 1
  Uniprot ID: Q4G0N8
  ENST ID: ENST00000305815
  CDS Start-End: 254-3787
aagagatgatgggcctgaagctaaccggtgcagactaggggcgagtttggagcaagtaactgtcagtgaggttgcagttggtctgggctgtttggctgtgagcgaaatagctgccccccacttctcacttgcacaccacgggatactcctcctgaggctccggatgattcagatggactgtgaaaaacaacaagatggatgatcatatggagattgcttctaacataaatctgcataaaaatttttctgaaacatggctggaatatttaaggagttttttttcagtactgaggacctccctgaagtcattctaacattgtctttgatcagctccattggagcatttttgaaccggcacttggaagactttccaattcctgtccctgtgatattatttttacttggatgcagttttgaagtattaagctttacatcttcacaggtccaaagatacgcaaacgccatacaatggatgagtccagacttattttttcgtatatttacaccagtagttttctttactactgcatttgacatggatacgtacatgcttcaaaagttattttggcagatacttttaatttcaattcccggctttttggttaattatatcttagttctttggcatctggcatctgtaaatcaattacttttgaagcctacccaatggttattattttcagctatccttgtgagttcagatcccatgctaaccgcagctgctataagagaccttgggctttctagaagcctcatcagtttaattaatggagaaagtctgatgacctctgttatatcattaattacatttactagtattatggattttgaccaaagactacaaagtaaaagaaaccataccttagctgaagagatcgtgggtggaatttgttcatatattatagcaagtttcttgtttggaattctaagttcaaaactgattcaattttggatgtcaactgtttttggtgatgatgtcaatcatataagtctcatcttttcaattctgtatctcatcttttatatttgtgagttagttggaatgtcaggaatatttactctggccattgtgggacttcttttaaattctacaagttttaaagcagcaattgaagaaacacttcttcttgaattctggacttttctatcacgtattgcttttctcatggtgtttactttctttggacttctaattcctgcacatacatatttgtatatagaatttgttgatatatactattcattaaatatctacttaacattgattgttttaagatttctgacccttcttttaataagccctgttttgtctcgagttggtcatgagttcagttggcgctggatattcataatggtctgtagtgaaatgaaggggatgcctaatataaacatggcccttctgcttgcctactctgatctttattttggatctgacaaagaaaaatctcaaatattatttcatggagtgttagtatgcctaataacccttgttgtcaatagatttattttgccagtggcagttactatactaggtcttcgtgatgccacatcaacaaaatataaatcggtttgttgcacatttcaacactttcaagagctaaccaagtctgcagcctctgcccttaaatttgacaaagatcttgctaatgctgattggaacatgattgagaaagcaattacacttgaaaacccatacatgttgaacgaagaagaaacaacagaacatcagaaggtgaaatgtccacactgtaacaaggaaatagatgagatctttaacactgaagcaatggagctggccaacaggcgtctcttgtcagcacaaatagcaagctaccagagacaatacaggaatgagattctgtcccagagtgctgtccaggtgttggttggtgcagcagaaagttttggtgagaagaagggaaaatgtatgagtcttgatacaataaagaattattctgaaagccaaaaaacagttacctttgctagaaaactactacttaattgggtgtataataccagaaaggaaaaagagggcccatcaaaatacttcttttttcgtatatgccatacaatagtatttactgaggaatttgaacatgttggataccttgtgatattaatgaatatatttccctttataatctcttggatatcccagttaaatgtaatctaccacagcgaattaaaacacactaactactgttttcttacactttatattctagaggcactacttaagatagcagcaatgaggaaggactttttttcacatgcctggaacatattcgagttagcaattacattaattggcatcttacatgtaatacttattgaaatagacaccattaagtatatttttaatgagactgaagtaatagtctttataaaagttgttcaattttttcgtatactacgcattttcaagctcatagcaccaaagttgctgcaaataatagataaaagaatgagtcatcagaagaccttttggtatggaatactaaaaggctatgtccaaggcgaagcagacataatgaccataattgatcagattacaagttctaaacagattaaacagatgttattaaagcaagtgataaggaatatggaacatgctataaaagagctaggctacttagagtatgatcacccagaaattgctgtcactgtgaaaacaaaggaagaaattaatgttatgctcaatatggctacagaaattcttaaggcttttggcttaaaaggaattattagtaaaactgaaggtgctggaattaataagttaatcatggccaaaaagaaagaggtgcttgattctcaatctattatcaggcctcttactgttgaagaagttctatatcatattccgtggctagataaaaacaaagattatataaacttcattcaggaaaaagccaaagttgtaacatttgattgtggaaatgatatatttgaagaaggtgatgagcccaaaggaatctatatcattatttcaggcatggtaaagcttgaaaaatcaaagccaggtttagggattgatcaaatggtggagtcaaaggagaaagattttccgataattgacacagactatatgctcagtggagaaataataggagagataaactgcttaactaatgaacctatgaaatattctgccacctgcaaaactgtagtggagacatgttttattcccaaaactcacttgtatgatgcttttgagcaatgctctcctctcattaaacaaaaaatgtggctaaaacttggactcgctattacagccagaaaaatcagagaacacttatcttatgaggattggaactacaatatgcaactaaagctctctaatatttatgtagtagatataccaatgagtaccaaaactgatatttatgatgaaaatctaatctatgttatcctcatacatggagctgtagaagattgtctgttacgaaaaacttatagagcacctttcttaattcctataacatgccatcagatacaaagtattgaagatttcacaaaagtagtgattattcaaactccgattaacatgaaaacattcagaaggaatattagaaagtttgttcctaaacataaaagttatcttacaccaggattaataggttcagttggaacattggaagaaggcattcaagaagaaagaaatgttaaggaggatggagcacacagtgccgccactgccaggagtccccagccttgctccctgctggggacaaagttcaactgtaaggagtcccctagaataaacctaaggaaagtcaggaaagagtaagactgttaagaagaccgaagcatgtattaatgctgtggctatgagaggcctcctgctgcagaaacacacttccctacatcaagaaggagtaacttcaggttggatcctgtgtggatgatcttggtgctaagcagaaaagaaatttggaccttgaaaccagcagttcaacatatatactttttgcaaaatttccttgatttaaaatatttgttattttaaatatacaaaacattttagaaaatcttagagtaaattttagtcttaaagccagaaaataagtttatagccatctagatattttgcatattgctcttacagcaataatggtttggttcactttatgaaaaataaaatgtattaaaatatagtttaaatgctgttcttg

SEQ ID NO: 184717 - DNA, 521 bp, Homo sapiens
  Payload ID: 16375
  Gene Symbol: SLC9C1
  Gene Name: solute carrier family 9, subfamily C (Na+-transporting carboxylic acid decarboxylase), member 1
  ENST ID: ENST00000486574
  CDS Start-End: 267-521
agactaggggcgagtttggagcaagtaactgtcagtgaggttgcagttggtctgggctgtttggctgtgagcgaaatagctgccccccacttctcacttgcacaccacgggatactcctcctgaggctccggatgcatttttgaaccggcacttggaagactttccaattcctgtccctgtgatattatttttacttggatgcagttttgaagtattaagctttacatcttcacaggtccaaagatacgcaaacgccatacaatggatgagtccagacttattttttcgtatatttacaccagtagttttctttactactgcatttgacatggatacgtacatgcttcaaaagttattttggcagatacttttaatttcaattcccggctttttggttaattatatcttagttctttggcatctggcatctgtaaatcaattacttttgaagcctacccaatggttattattttcagctatccttgtgagttcagatcccatgctaaccgcagctgctata

SEQ ID NO: 184718 - DNA, 2733 bp, Homo sapiens
  Payload ID: 16375
  Gene Symbol: SLC9C1
  Gene Name: solute carrier family 9, subfamily C (Na+-transporting carboxylic acid decarboxylase), member 1
  ENST ID: ENST00000471295
  CDS Start-End: 89-814
gattcagatggactgtgaaaaacaacaagatggatgatcatatggagattgcttctaacataaatctgcataaaaatttttctgaaacatggctggaatatttaaggagttttttttcagtactgaggacctccctgaagtcattctaacattgtctttgatcagctccattggagcatttttgaaccggcacttggaagactttccaattcctgtccctgtgatattatttttacttggatgcagttttgaagtattaagctttacatcttcacaggtccaaagatacgcaaacgccatacaatggatgagtccagacttattttttcgtatatttacaccagtagttttctttactactgcatttgacatggatacgtacatgcttcaaaagttattttggcagatacttttaatttcaattcccggctttttggttaattatatcttagttctttggcatctggcatctgtaaatcaattacttttgaagcctacccaatggttattattttcagctatccttgtgagttcagatcccatgctaaccgcagctgctataagagaccttgggctttctagaagcctcatcagtttaattaatggagaaagtctgatgacctctgttatatcattaattacatttactagtattatggattttgaccaaagactacaaagtaaaagaaaccataccttaggtgagttagttggaatgtcaggaatatttactctggccattgtgggacttcttttaaattctacaagttttaaagcagcaattgaagaaacacttcttcttgagtcttcgtgatgccacatcaacaaaatataaatcggtttgttgcacatttcaacactttcaagagctaaccaagtctgcagcctctgcccttaaatttgacaaagatcttgctaatgctgattggaacatgattgagaaagcaattacacttgaaaacccatacatgttgaacgaagaagaaacaacagaacatcagaaggtgaaatgtccacactgtaacaaggaaatagatgagatctttaacactgaagcaatggagctggccaacaggcgtctcttgtcagcacaaatagcaagctaccagagacaatacaggaatgagattctgtcccagagtgctgtccaggtgttggttggtgcagcagaaagttttggtgagaagaagggaaaatgtatgagtcttgatacaataaagaattattctgaaagccaaaaaacagttacctttgctagaaaactactacttaattgggtgtataataccagaaaggaaaaagagggcccatcaaactcatagcaccaaagttgctgcaaataatagataaaagaatgagtcatcagaagaccttttggtatggaatactaaaaggctatgtccaaggcgaagcagacataatgaccataattgatcagattacaagttctaaacagattaaacagatgttattaaagcaagtgataaggaatatggaacatgctataaaagagctaggctacttagagtatgatcacccagaaattgctgtcactgtgaaaacaaaggaagaaattaatgttatgctcaatatggctacagaaattcttaaggcttttggcttaaaaggaattattagtaaaactgaaggtgctggaattaataagttaatcatggccaaaaagaaagaggtgcttgattctcaatctattatcaggcctcttactgttgaagaagttctatatcatattccgtggctagataaaaacaaagattatataaacttcattcaggaaaaagccaaagttgtaacatttgattgtggaaatgatatatttgaagaaggtgatgagcccaaaggaatctatatcattatttcaggcatggtaaagcttgaaaaatcaaagccaggtttagggattgatcaaatggtggagtcaaaggagaaagattttccgataattgacacagactatatgctcagtggagaaataataggagagataaactgcttaactaatgaacctatgaaatattctgccacctgcaaaactgtagtggagacatgttttattcccaaaactcacttgtatgatgcttttgagcaatgctctcctctcattaaacaaaaaatgtggctaaaacttggactcgctattacagccagaaaaatcagagaacacttatcttatgaggattggaactacaatatgcaactaaagctctctaatatttatgtagtagatataccaatgagtaccaaaactgatatttatgatgaaaatctaatctatgttatcctcatacatggagctgtagaagattgtctgttacgaaaaacttatagagcacctttcttaattcctataacatgccatcagatacaaagtattgaagatttcacaaaagtagtgattattcaaactccgattaacatgaaaacattcagaaggaatattagaaagtttgttcctaaacataaaagttatcttacaccaggattaataggttcagttggaacattggaagaaggcattcaagaagaaagaaatgttaaggaggatggagcacacagtgccgccactgccaggagtccccagccttgctccctgctggggacaaagttcaactgtaaggagtcccctagaataaacctaaggaaagtcaggaaagagtaagactgttaagaagaccgaagcatgtattaatgctgtggctatgagaggcctcctgc

SEQ ID NO: 184719 - DNA, 3979 bp, Homo sapiens
  Payload ID: 16375
  Gene Symbol: SLC9C1
  Gene Name: solute carrier family 9, subfamily C (Na+-transporting carboxylic acid decarboxylase), member 1
  Uniprot ID: Q4G0N8
  ENST ID: ENST00000487372
  CDS Start-End: 223-3612
agactaggggcgagtttggagcaagtaactgtcagtgaggttgcagttggtctgggctgtttggctgtgagcgaaatagctgccccccacttctcacttgcacaccacgggatactcctcctgaggctccggatgattcagatggactgtgaaaaacaacaagatggatgatcatatggagattgcttctaacataaatctgcataaaaatttttctgaaacatggctggaatatttaaggagttttttttcagtactgaggacctccctgaagtcattctaacattgtctttgatcagctccattggagcatttttgaaccggcacttggaagactttccaattcctgtccctgtgatattatttttacttggatgcagttttgaagtattaagctttacatcttcacaggtccaaagatacgcaaacgccatacaatggatgagtccagacttattttttcgtatatttacaccagtagttttctttactactgcatttgacatggatacgtacatgcttcaaaagttattttggcagatacttttaatttcaattcccggctttttggttaattatatcttagttctttggcatctggcatctgtaaatcaattacttttgaagcctacccaatggttattattttcagctatccttgtgagttcagatcccatgctaaccgcagctgctataagagaccttgggctttctagaagcctcatcagtttaattaatggagaaagtctgatgacctctgttatatcattaattacatttactagtattatggattttgaccaaagactacaaagtaaaagaaaccataccttagctgaagagatcgtgggtggaatttgttcatatattatagcaagtttcttgtttggaattctaagttcaaaactgattcaattttggatgtcaactgtttttggtgatgatgtcaatcatataagtctcatcttttcaattctgtatctcatcttttatatttgtgagttagttggaatgtcaggaatatttactctggccattgtgggacttcttttaaattctacaagttttaaagcagcaattgaagaaacacttcttcttgaatttctgacccttcttttaataagccctgttttgtctcgagttggtcatgagttcagttggcgctggatattcataatggtctgtagtgaaatgaaggggatgcctaatataaacatggcccttctgcttgcctactctgatctttattttggatctgacaaagaaaaatctcaaatattatttcatggagtgttagtatgcctaataacccttgttgtcaatagatttattttgccagtggcagttactatactaggtcttcgtgatgccacatcaacaaaatataaatcggtttgttgcacatttcaacactttcaagagctaaccaagtctgcagcctctgcccttaaatttgacaaagatcttgctaatgctgattggaacatgattgagaaagcaattacacttgaaaacccatacatgttgaacgaagaagaaacaacagaacatcagaaggtgaaatgtccacactgtaacaaggaaatagatgagatctttaacactgaagcaatggagctggccaacaggcgtctcttgtcagcacaaatagcaagctaccagagacaatacaggaatgagattctgtcccagagtgctgtccaggtgttggttggtgcagcagaaagttttggtgagaagaagggaaaatgtatgagtcttgatacaataaagaattattctgaaagccaaaaaacagttacctttgctagaaaactactacttaattgggtgtataataccagaaaggaaaaagagggcccatcaaaatacttcttttttcgtatatgccatacaatagtatttactgaggaatttgaacatgttggataccttgtgatattaatgaatatatttccctttataatctcttggatatcccagttaaatgtaatctaccacagcgaattaaaacacactaactactgttttcttacactttatattctagaggcactacttaagatagcagcaatgaggaaggactttttttcacatgcctggaacatattcgagttagcaattacattaattggcatcttacatgtaatacttattgaaatagacaccattaagtatatttttaatgagactgaagtaatagtctttataaaagttgttcaattttttcgtatactacgcattttcaagctcatagcaccaaagttgctgcaaataatagataaaagaatgagtcatcagaagaccttttggtatggaatactaaaaggctatgtccaaggcgaagcagacataatgaccataattgatcagattacaagttctaaacagattaaacagatgttattaaagcaagtgataaggaatatggaacatgctataaaagagctaggctacttagagtatgatcacccagaaattgctgtcactgtgaaaacaaaggaagaaattaatgttatgctcaatatggctacagaaattcttaaggcttttggcttaaaaggaattattagtaaaactgaaggtgctggaattaataagttaatcatggccaaaaagaaagaggtgcttgattctcaatctattatcaggcctcttactgttgaagaagttctatatcatattccgtggctagataaaaacaaagattatataaacttcattcaggaaaaagccaaagttgtaacatttgattgtggaaatgatatatttgaagaaggtgatgagcccaaaggaatctatatcattatttcaggcatggtaaagcttgaaaaatcaaagccaggtttagggattgatcaaatggtggagtcaaaggagaaagattttccgataattgacacagactatatgctcagtggagaaataataggagagataaactgcttaactaatgaacctatgaaatattctgccacctgcaaaactgtagtggagacatgttttattcccaaaactcacttgtatgatgcttttgagcaatgctctcctctcattaaacaaaaaatgtggctaaaacttggactcgctattacagccagaaaaatcagagaacacttatcttatgaggattggaactacaatatgcaactaaagctctctaatatttatgtagtagatataccaatgagtaccaaaactgatatttatgatgaaaatctaatctatgttatcctcatacatggagctgtagaagattgtctgttacgaaaaacttatagagcacctttcttaattcctataacatgccatcagatacaaagtattgaagatttcacaaaagtagtgattattcaaactccgattaacatgaaaacattcagaaggaatattagaaagtttgttcctaaacataaaagttatcttacaccaggattaataggttcagttggaacattggaagaaggcattcaagaagaaagaaatgttaaggaggatggagcacacagtgccgccactgccaggagtccccagccttgctccctgctggggacaaagttcaactgtaaggagtcccctagaataaacctaaggaaagtcaggaaagagtaagactgttaagaagaccgaagcatgtattaatgctgtggctatgagaggcctcctgctgcagaaacacacttccctacatcaagaaggagtaacttcaggttggatcctgtgtggatgatcttggtgctaagcagaaaagaaatttggaccttgaaaccagcagttcaacatatatactttttgcaaaatttccttgatttaaaatatttgttattttaaatatacaaaacattttagaaaatcttagagtaaattttagtcttaaagccagaaaataagtttatagccatctagatattttgcatattgctcttacagcaataatggtttggttcactttatgaaaaataaaatgtattaaaatata

SEQ ID NO: 184720 - DNA, 7682 bp, Homo sapiens
  Payload ID: 16376
  Gene Symbol: SLCO1A2
  Gene Name: solute carrier organic anion transporter family, member 1A2
  Uniprot ID: P46721
  ENST ID: ENST00000307378
  CDS Start-End: 722-2734
ctcgctgctgccttgcagtttgatctcagactgctgtgctagcaatcagcgagactccatgggcgtaggaccctccgagccaggtgcgggatataatcttgtggcgcgccgttttttaagcctgttggaagagcgcagtattcgggtgggagtgacccgattttccaggtgcgtccgtcacccctttctttgactcagaaagggaactccctgaccccttgagcttcccaagtgaggcaatgcctcaccctgctttggcttgcgcacggtgcgcgcacccactgacctgcgcccattgtctggcactccctagtgagatgaacccggtacctcagatggaaatgcagaaatcacccgtcttctgcgtcgctcacgctgggagctgtgcaccggagctgttcctatttggccatcttggctcctctccccttgttcctgattttaatgggactaccttggttatttcacagcacacttacggtgctttgtgaagtgcctgctatgttactatcatcatcttcctgacaagatggtgctgtagaaatctttgcatattgctatgggcttccaagaaaaactacctcgaaggaaaacaaagacaagatgacgatcattctaatgagaagaattataatatgacatgcacactctttacaaagggtagaagtaagacatatcaagatttaaaacataaatagcttggaacaccctgaagagcaacatgggagaaactgagaaaagaattgaaacccatagaataagatgtctttccaagttgaagatgtttctgttggcaataacatgtgcatttgtatccaaaacactgtctggatcttatatgaattccatgctcacacaaatagagagacaattcaacatcccaacatctctagttggattcattaatggaagctttgagattggaaatcttttgttgattatatttgtgagttattttggaaccaaactgcatagacctataatgattggcattggatgtgtggttatgggcttaggctgtttcttaaaatcactacctcatttcctcatgaaccaatatgaatatgaatctacagtttcagtttcaggcaacttgtcctcaaacagtttcttgtgtatggaaaatggaacccagattttaagaccaacgcaggatccatcagagtgtacaaaggaagttaaatcattaatgtgggtgtacgtcctagtaggcaatattgtacgtggaatgggtgaaactcccatcctgcctttgggtatttcctatatagaagattttgccaaatttgaaaattctcctttatatattgggcttgtagaaacaggagctattattggtcctttgattggacttttgttggcatcattctgtgcaaatgtttatgttgacactggatttgtgaacacagatgatctgatcataactcccactgacactcgttgggtcggtgcatggtggtttggctttctgatttgtgcaggagttaacgtgctcactgccattccttttttctttttgcccaacacacttccaaaggaaggactagagactaatgctgacatcattaaaaatgaaaatgaagacaaacaaaaagaagaggtcaagaaggaaaaatatggaatcactaaagattttctacctttcatgaaaagtctttcctgcaatccaatttatatgcttttcatacttgtaagtgtgatacagttcaatgcattcgttaacatgatctccttcatgcctaaatacctagaacagcaatatggaatatcatcttcagatgcaatctttctaatgggtatttataacttacctccaatatgtattggatatataattggtggtttaattatgaagaagttcaagattactgtcaaacaagctgcccacataggatgttggttatccttacttgagtatcttctctattttttatcttttctcatgacttgtgaaaattcttcagttgttggaataaatacctcttatgaaggaattccacaagatttatatgtggaaaatgacatctttgctgattgcaatgtggattgcaactgtccatctaaaatatgggatcctgtgtgtggaaacaatggcttgtcatatctgtcagcttgtcttgctggttgtgagacatccattggaacgggaataaacatggtgttccaaaattgcagctgtattcaaacatcaggaaattcatctgcagttcttgggctgtgcgacaaaggacctgactgttccttgatgctccagtacttcctaatcttgtcagcgatgagcagtttcatttattctttggctgccatacctggatatatggttctcttgaggtgtatgaaatctgaagagaagtcccttggtgtgggattacatacattttgcacaagagtatttgctggcattcctgcacctatatattttggcgctttaatggattccacatgtttacactggggaactttgaaatgtggtgagtcaggggcatgcaggatatatgattccaccaccttcagatacatctacctcggattgccggcagcactaagaggatcaagctttgttccagccttaatcatcttaattcttttgaggaagtgtcatctacctggtgaaaatgcctcttcaggaacagagcttatagagacaaaagtcaaagggaaggaaaatgagtgcaaagatatataccaaaagtccacggttttgaaagatgatgaattgaaaactaaattgtaattgtcctattatattacttttttcagaattagagaacatgctgtacaacttaattgttttaaaaatcagtagagatataatagataactttttcttgtctttaagaacctaaaaaacctcttaactcaaaataataaaatgttcactaatgatatttctaaggtatcagtgacacttgagttttcctaggagggacatcaataacagccccctaaagaagattcttagagccagctttatttttatgttgaaacagcaatttcccttaattcatcgaagtaagggtgtacttcctacatctccttctactaatacttctaaaaattttctgttatgaaaacctatttaattccactaaatttgttctttgatattggaattattcagatgcctaaattctcattctgttatgtgaagatttaaatattttattcaagtttatcgcttccatgtgagagaagcctacatcttcttattctatttaggaatcgttctttaactcttcttattcattctaggcatgactcctatataatagattactcataaatataccctcctactttcaattttttcttttctttattactcatacatttgctcaatttgtacagaatactgacaaacttaagcaggttattaaacatcatgaggcaaagattgttggattttttttcagtaattcaaatccagtgactaaagtttttcttacaaacaagtgtctgaatcaaaggatgaaaggacaatattataaaaactccagttcttaaaggctgtttgtaatgtcagatattgtcaaagaaccactttctaagattcaggactctttagaccgatgtttatatcacccattgtgtcctaaggtagaacacaaacactaattttcccaaaataatcttagacaatagcttctgttatgaaacagaggttagtaaaggctaaggtacatattaaaagctaaatctacttatattattattttgtaaattatggataaaattaaaaattgaaggattttagacatagaagaggacttattgattaatatagggcttctggtaaaagagaatagaatgaacagacaaatacctgtttgtctactccttactctccttcctgttgaaatgacagtcaatatataagaatgacataaatccctaatggatgaagagaatggagtaaggaagggtgggagaagtgggtgtcaatacactatggttatttatgtgtactataaatggagtgagagtgtctgcagggatacaacagagtggaggaagctgaaatacagaatatacctagaaggagcctggaatggaagtgtgaaactgagttgccagttcaaagtgtgagttggtagctggacagaaagcaggccagttaactgaaggactttgtacagatgctttacaggttaatatgatttcctaaatgatcagatgcatcatatgaaaaaagaaagcaaatgagaagagaaaggctgtatagaacaggtttagggggaaggatgaaaagttaagtttcagtttcatgaagtttgagacttcaactctgggcatataaaaaataaccaaggttcaaaccaagactggctttgaaacaagagagaggaactaaaatcattggaaagggggagtttaactttgatgtaggtatgactgcagcagtgagatatcgtattaagatctgatgacatgaaatttggagccacttcctttgtggtgggaggaagtgaggagaatggcctggaaactaaaacaaggagaagagacttacctatattcacagagcagcaagaaaaagtaaacagccactgcatgagaaggtttcaggggaatcagattttgctgagtgtgcgatggtgaagagaatgctcatttctgaactggaatctgagctaaaaagaagcaaataggatatatatggaagttagacttatggaaattagaagaaggggaatgagagatagtttggaattctgtggctatttaggtgactgacataaatgggggcagaggacataatgaggttagttcttacggattcaaggcagatagtgttggtgaaacagtgagtgtcaaaattaggcgaggtggtgactgggctccctgatgacctcttgtcgtggagcaaaactgaataagcaaaaacttactcaagctcctgaggcccattcatcatccctattgatagatttgaggtgatctgagaaagctgagtcttgctttgtggacaattcacccacttgaactccctcaatggagcatcataggcccagagagacatggctatggacttagtaccttggcatcacttttatcccctcatggaggagatggcattttactctgaaaacatagggttctcctttgacacttcttggtgggagaaagcaggtcagagaaagtgggtgttggagtgctttgggatccctcatgacctcttttgttggtatacatgaagcctgggagtttagttcttattctgagcacttgtactactctcatgagggtagagataatggcatagcggacagacatggagaagagaaacaagagaacaggtagtgagaagtcgagagtcagtaattttcttacttaatattgtggggatcttacttaatacataaagttaatgaaactagaaatagtggtttaatatattacttataattcaaaaattaacctatatttacagatgcttacacagtttctttgtgaatccacctatggttttattttaattaattttttattgcaaagcaatgaaatgttgctttgtggagccagatagcattacagcaggtaaatgggtttctgctagatctccacattattggggagatgctcgaagacctcagaatatacacacccttaaggttcaagggctggggttgagctctccataaggaacttttcctcctcccagaagggcgatcattgtgtatatagacatggagacagaaccagaatgacttctgtgggtggaaatagtgccatcagaatcatttattattatgaaataaatattatttatctacattgaaaaaatactactcctcctaaaatcattaacttttcctcagatgattttaagaaatttgagtaatagcacacgaagtggtaaagacccttagtctttctggtatattagaaaagccttttaatcagtctctggaaggacactagggattgcagctgaataaatatattaagaataacaaatcagttcaacaaggagtagagtctgaagtgggattttccgtggaaattctcttatgtctgtactaacaataagaaagacaagacaaagactaagtaattaaagaaaagctcgaaatgttttgtaaccaaaagcttgaaatgttatgtaaccagaatgttatgtaaccagagctgttagatcagatactggctgattcataggtgaacgtcctctttgtgggtcctctcatgcatccccattttcagaatgtaaataatttggctttgtagcccttccaaaaagggtactatcccacttctcctggcataaatcatacattgactgaacgttcaccatctaaaaatcactcatgctccttgaaccaaggtgattatcagagacagctcctggtagaagaggttgtagatgttaaaagagtatgatttctatataagaaaatatagaaattgacagaatggttcttatttactgggcctggagaattcctgttctggcattcttagatccctcaaatttattaccaaggggaaaaggaaaaagaggcaagtaggcagtagggtaagctgttgtttgcttgccaaggaactggagagtgcaggtttcaagacaccttgaggaaattctcctgagcccttagccaagagaagagagcagaaaatgcttttctgtagaatcccaagaggcataaaagaggatgagtaactgggtcctgtgccaagttcccaacccctaagccttcccaacatggagaaactacaccagtgtttaaaagtttctaggttggaggaacaaacttgagcatcaagggcagatgatttgttaacacagtcctgtgcagagggctccttcagaaggcatcccctgtgacccaaacacagtgagcaccttctactttctggccttatgccatcaatgcatccagctgcaatctatcctcaaacctggaatccatctcttgacttcccagccagaccaccttccatcccttcactgtgtcccaccctgcccagaatgcatgctgttctcccagagtctcatggaaataaggccttgcactgaaataggctgtgggaaacaaaaggataagcaggtctggaccagtctgtaatggtagcaggtgaaaacaacttacggaaaaacacatgaattcattaggaaataaggtgacagatccccagctgctgaagaactagaatgtctattacactcatacaattgatgttttattttaatacaccagagctaccacacaaaacttccttccatgtgaaaggctccagataaaattctgccatccctcctctcctcatgtcctcctgctcagacccaccttcatgcccctaaaccaatctgcatcatgcctgtttcagagagtcatgggaagatgggcagtgcctccattgtcaccattccccacacctctgcacacttctgccccttcccctctagacgccacaacttcacagtcttactgttgtaaatattcctgcacagttagtaatgatcaaatgatcctgtggtcagaggcctctttggcagtgtcttcttacccttaagaaaggtcatgaaatccagaaggggcaacctttccaggagagctttggagtcatttctgtgtgagacactattgcataatcctgtaagattgcttttatatttaaggaatgatgttacttaacaaatgaacaaaaaaaattgcaaataaattttttaacaatgttta

SEQ ID NO: 184721 - DNA, 448 bp, Homo sapiens
  Payload ID: 16376
  Gene Symbol: SLCO1A2
  Gene Name: solute carrier organic anion transporter family, member 1A2
  ENST ID: ENST00000421294
  CDS Start-End: 150-448
ttatttgatgtaccttttgaaatagaaaaccaacaactaaatcttctctaacaccatgattttctaatctgtattaaagcgttccagggtagaagtaagacatatcaagatttaaaacataaatagcttggaacaccctgaagagcaacatgggagaaactgagaaaagaattgaaacccatagaataagatgtctttccaagttgaagatgtttctgttggcaataacatgtgcatttgtatccaaaacactgtctggatcttatatgaattccatgctcacacaaatagagagacaattcaacatcccaacatctctagttggattcattaatggaagctttgagattggaaatcttttgttgattatatttgtgagttattttggaaccaaactgcatagacctataatgattggcattggatgtgtggttatgggcttaggctg

SEQ ID NO: 184722 - DNA, 702 bp, Homo sapiens
  Payload ID: 16376
  Gene Symbol: SLCO1A2
  Gene Name: solute carrier organic anion transporter family, member 1A2
  ENST ID: ENST00000421287
  CDS Start-End: 550-702
agcaatcagcgagactccatgggcgtaggaccctccgagccaggtgcgggatataatcttgtggcgcgccgttttttaagcctgttggaagagcgcagtattcgggtgggagtgacccgattttccaggtgcgtccgtcacccctttctttgactcagaaagggaactccctgaccccttgagcttcccaagtgaggcaatgcctcaccctgctttggcttgcgcacggtgcgcgcacccactgacctgcgcccattgtctggcactccctagtgagatgaacccggtacctcagatggaaatgcagaaatcacccgtcttctgcgtcgctcacgctgggagctgtgcaccggagctgttcctatttggccatcttggctcctctccccttgttcctgattttaatgggactaccttggttatttcacagcacacttacggtgctttgtgaagtgcctgctatgttactatcatcatcttcctgacaagatgaagtaagacatatcaagatttaaaacataaatagcttggaacaccctgaagagcaacatgggagaaactgagaaaagaattgaaacccatagaataagatgtctttccaagttgaagatgtttctgttggcaataacatgtgcatttgtatccaaaacactgtctggatcttatatgaattccatgctcacacaaatagagagacaattc

SEQ ID NO: 184723 - DNA, 356 bp, Homo sapiens
  Payload ID: 16376
  Gene Symbol: SLCO1A2
  Gene Name: solute carrier organic anion transporter family, member 1A2
  ENST ID: ENST00000416627
  CDS Start-End: 318-356
agcaatcagcgagactccatgggcgtaggaccctccgagccaggtgcgggatataatcttgtggcgcgccgttttttaagcctgttggaagagcgcagtattcgggtgggagtgacccgattttccaggtgctgtagaaatctttgcatattgctatgggcttccaagaaaaactacctcgaaggaaaacaaagacaagatgacgatcattctaatgagaagaattataatatgacatgcacactctttacaaagggtagaagtaagacatatcaagatttaaaacataaatagcttggaacaccctgaagagcaacatgggagaaactgagaaaagaattgaaacccatagaata

SEQ ID NO: 184724 - DNA, 2008 bp, Homo sapiens
  Payload ID: 16376
  Gene Symbol: SLCO1A2
  Gene Name: solute carrier organic anion transporter family, member 1A2
  ENST ID: ENST00000458504
  CDS Start-End: 258-1874
cttttgaaatagaaaaccaacaactaaatcttctctaacaccatgattttctaatctgtattaaagcgttccagggtagaagtaagacatatcaagatttaaaacataaatagcttggaacaccctgaagagcaacatgggagaaactgagaaaagaattgaaacccatagaataagatgtctttccaagttgaagatatgaatatgaatctacagtttcagtttcaggcaacttgtcctcaaacagtttcttgtgtatggaaaatggaacccagattttaagaccaacgcaggatccatcagagtgtacaaaggaagttaaatcattaatgtgggtgtacgtcctagtaggcaatattgtacgtggaatgggtgaaactcccatcctgcctttgggtatttcctatatagaagattttgccaaatttgaaaattctcctttatatattgggcttgtagaaacaggagctattattggtcctttgattggacttttgttggcatcattctgtgcaaatgtttatgttgacactggatttgtgaacacagatgatctgatcataactcccactgacactcgttgggtcggtgcatggtggtttggctttctgatttgtgcaggagttaacgtgctcactgccattccttttttctttttgcccaacacacttccaaaggaaggactagagactaatgctgacatcattaaaaatgaaaatgaagacaaacaaaaagaagaggtcaagaaggaaaaatatggaatcactaaagattttctacctttcatgaaaagtctttcctgcaatccaatttatatgcttttcatacttgtaagtgtgatacagttcaatgcattcgttaacatgatctccttcatgcctaaatacctagaacagcaatatggaatatcatcttcagatgcaatctttctaatgggtatttataacttacctccaatatgtattggatatataattggtggtttaattatgaagaagttcaagattactgtcaaacaagctgcccacataggatgttggttatccttacttgagtatcttctctattttttatcttttctcatgacttgtgaaaattcttcagttgttggaataaatacctcttatgaaggaattccacaagatttatatgtggaaaatgacatctttgctgattgcaatgtggattgcaactgtccatctaaaatatgggatcctgtgtgtggaaacaatggcttgtcatatctgtcagcttgtcttgctggttgtgagacatccattggaacgggaataaacatggtgttccaaaattgcagctgtattcaaacatcaggaaattcatctgcagttcttgggctgtgcgacaaaggacctgactgttccttgatgctccagtacttcctaatcttgtcagcgatgagcagtttcatttattctttggctgccatacctggatatatggttctcttgaggtgtatgaaatctgaagagaagtcccttggtgtgggattacatacattttgcacaagagtatttgctggcattcctgcacctatatattttggcgctttaatggattccacatgtttacactggggaactttgaaatgtggtgagtcaggggcatgcaggatatatgattccaccaccttcagatacatctacctcggattgccggcagcactaagaggatcaagctttgttccagccttaatcatcttaattcttttgaggaagtgtcatctacctggtgaaaatgcctcttcaggaacagagcttatagagacaaaagtcaaagggaaggaaaatgagtgcaaagatatataccaaaagtccacggttttgaaagatgatgaattgaaaactaaattgtaattgtcctattatattacttttttcagaattagagaacatgctgtacaacttaattgttttaaaaatcagtagagatataatagataactttttcttgtctttaagaacctaaaaaacctcttaactcaaaataa

SEQ ID NO: 184725 - DNA, 562 bp, Homo sapiens
  Payload ID: 16376
  Gene Symbol: SLCO1A2
  Gene Name: solute carrier organic anion transporter family, member 1A2
  ENST ID: ENST00000435179
  CDS Start-End: 299-562
gagactccgtgggcgtaggaccctcagagccagtgagatgaacccggtacctcagatggaaatgcagaaatcacccgtcttctgcgtcgctcacgctgggagctgtagaccggagctgttcctattcggccatcttgggggagctcgagattattaaccaaaaaatttcctgtccaaaagctgtgttctttagtgggaaagtcttgcagaactcccctctgaactaatactggaagcaaagaagtaagacatatcaagatttaaaacataaatagcttggaacaccctgaagagcaacatgggagaaactgagaaaagaattgaaacccatagaataagatgtctttccaagttgaagatgtttctgttggcaataacatgtgcatttgtatccaaaacactgtctggatcttatatgaattccatgctcacacaaatagagagacaattcaacatcccaacatctctagttggattcattaatggaagctttgagattggaaatcttttgttgattatatttgtgagttattttggaaccaaactgcatagacctataatg

SEQ ID NO: 184726 - DNA, 543 bp, Homo sapiens
  Payload ID: 16376
  Gene Symbol: SLCO1A2
  Gene Name: solute carrier organic anion transporter family, member 1A2
  ENST ID: ENST00000413682
  CDS Start-End: 447-543
aggatatttttagacctcccctacctcaatagagacccatggtgtgttgtaaaagtgtgttttctttacagaagctgtgttctttagtgggaaagtcttgcagaactcccctctgaactaatactggaagcaaagaagtaagacatatcaagatttaaaacataaatagcttggaacaccctgaagagcaacatgggagaaactgagaaaagaattgaaacccatagaataagatgtctttccaagttgaaggaaatcttttgttgattatatttgtgagttattttggaaccaaactgcatagacctataatgattggcattggatgtgtggttatgggcttaggctgtttcttaaaatcactacctcatttcctcatgaaccaatatgaatatgaatctacagtttcagtttcaggcaacttgtcctcaaacagtttcttgtgtatggaaaatggaacccagattttaagaccaacgcaggatccatcagagtgtacaaaggaagttaaatcattaatgtgggtgtacgtcctagtaggca

SEQ ID NO: 184727 - DNA, 569 bp, Homo sapiens
  Payload ID: 16376
  Gene Symbol: SLCO1A2
  Gene Name: solute carrier organic anion transporter family, member 1A2
  ENST ID: ENST00000450590
  CDS Start-End: 297-569
aagattataacctgctttatgcaaccatcagagccaaagaaacttaaccaaaggtttaaaacttacataaacaaagattcttttatttacaactctgcttctctgatgaacaagaagctgcagcttacacgtttgaggtgccttattcatactggctactcaatatgtaattttttaaaaaatctgttggtcttacagtatggaagcaaaaatgaatggtgatgttggtgaatgctaagaagtaagacatatcaagatttaaaacataaatagcttggaacaccctgaagagcaacatgggagaaactgagaaaagaattgaaacccatagaataagatgtctttccaagttgaagatgtttctgttggcaataacatgtgcatttgtatccaaaacactgtctggatcttatatgaattccatgctcacacaaatagagagacaattcaacatcccaacatctctagttggattcattaatggaagctttgagattggaaatcttttgttgattatatttgtgagttattttggaaccaaactgcatagacctataatgattggcatt

SEQ ID NO: 184728 - DNA, 717 bp, Homo sapiens
  Payload ID: 16376
  Gene Symbol: SLCO1A2
  Gene Name: solute carrier organic anion transporter family, member 1A2
  ENST ID: ENST00000453443
  CDS Start-End: 308-717
gttcccaagattataacctgctttatgcaaccatcagagccaaagaaacttaaccaaaggtttaaaacttacataaacaaagattcttttatttacaactctgcttctctgatgaacaagaagctgcagcttacacgtttgaggtgccttattcatactggctactcaatatgtaattttttaaaaaatctgttggtcttacagtatggaagcaaaaatgaatggtgatgttggtgaatgctaagggtagaagtaagacatatcaagatttaaaacataaatagcttggaacaccctgaagagcaacatgggagaaactgagaaaagaattgaaacccatagaataagatgtctttccaagttgaagatgtttctgttggcaataacatgtgcatttgtatccaaaacactgtctggatcttatatgaattccatgctcacacaaatagagagacaattcaacatcccaacatctctagttggattcattaatggaagctttgagattggaaatcttttgttgattatatttgtgagttattttggaaccaaactgcatagacctataatgattggcattggatgtgtggttatgggcttaggctgtttcttaaaatcactacctcatttcctcatgaaccaatatgaatatgaatctacagtttcagtttcaggcaacttgtcctcaaacagtttcttgtgtatggaaaatggaac

SEQ ID NO: 184729 - DNA, 559 bp, Homo sapiens
  Payload ID: 16376
  Gene Symbol: SLCO1A2
  Gene Name: solute carrier organic anion transporter family, member 1A2
  ENST ID: ENST00000445053
  CDS Start-End: 346-559
gaaatagaaaaccaacaactaaatcttctctaacaccatgattttctaatctgtattaaagcgttccagggtagaagtaagacatatcaagatttaaaacataaatagcttggaacaccctgaagagcaacatgggagaaactgagaaaagaattgaaacccatagaataagatgtctttccaagttgaagctgagaaaccctgaaaatactctgtcctgggcttatatgccttagacacaactgggattgctgagctcaagggttgcagagcatcctactatgggaagaatgaggacataactcagattgttctggatatttccctcattgctgagaatgcagaatgtttctgaccaagaattgcaagcaagaacaggaaagagtggagtcggccaagatgtttctgttggcaataacatgtgcatttgtatccaaaacactgtctggatcttatatgaattccatgctcacacaaatagagagacaattcaacatcccaacatctctagttggattcattaatggaagctttgagattggaaatcttttgttgatta

SEQ ID NO: 184730 - DNA, 559 bp, Homo sapiens
  Payload ID: 16376
  Gene Symbol: SLCO1A2
  Gene Name: solute carrier organic anion transporter family, member 1A2
  ENST ID: ENST00000430803
  CDS Start-End: 19-23
agcaatcagcgagactccatgggcgtaggaccctccgagccaggtgcgggatataatcttgtggcgcgccgttttttaagcctgttggaagagcgcagtattcgggtgggagtgacccgattttccaggtgcgtccgtcacccctttctttgactcagaaagggaactccctgaccccttgagcttcccaagtgaggcaatgcctcaccctgctttggcttgcgcacggtgcgcgcacccactgacctgcgcccattgtctggcactccctagtgagatgaacccggtacctcagatggaaatgcagaaatcacccgtcttctgcgtcgctcacgctgggagctgtgcaccggagctgttcctatttggccatcttggctcctctccccttgttcctgattttaatgggactaccttggttatttcacagcacacttacggtgctttgtgaagtgcctgctatgttactatcatcatcttcctgacaagatgggtagaagtaagacatatcaagatttaaaacataaatagcttggaacaccctgaagagcaacatggg

SEQ ID NO: 184731 - DNA, 580 bp, Homo sapiens
  Payload ID: 16376
  Gene Symbol: SLCO1A2
  Gene Name: solute carrier organic anion transporter family, member 1A2
  ENST ID: ENST00000422327
  CDS Start-End: 139-580
gatgtaccttttgaaatagaaaaccaacaactaaatcttctctaacaccatgattttctaatctgtattaaagcgttccagaagtaagacatatcaagatttaaaacataaatagcttggaacaccctgaagagcaacatgggagaaactgagaaaagaattgaaacccatagaataagatgtctttccaagttgaagatgtttctgttggcaataacatgtgcatttgtatccaaaacactgtctggatcttatatgaattccatgctcacacaaatagagagacaattcaacatcccaacatctctagttggattcattaatggaagctttgagattggaaatcttttgttgattatatttgtgagttattttggaaccaaactgcatagacctataatgattggcattggatgtgtggttatgggcttaggctgtttcttaaaatcactacctcatttcctcatgaaccaatatgaatatgaatctacagtttcagtttcaggcaacttgtcctcaaacagtttcttgtgtatggaaaatggaacccagattttaagaccaacgcaggatccatcag

SEQ ID NO: 184732 - DNA, 2382 bp, Homo sapiens
  Payload ID: 16376
  Gene Symbol: SLCO1A2
  Gene Name: solute carrier organic anion transporter family, member 1A2
  ENST ID: ENST00000544290
  CDS Start-End: 414-701
gtcacccctttctttgactcagaaagggaactccctgaccccttgagcttcccaagtgaggcaatgcctcaccctgctttggcttgcgcacggtgcgcgcacccactgacctgcgcccattgtctggcactccctagtgagatgaacccggtacctcagatggaaatgcagaaatcacccgtcttctgcgtcgctcacgctgggagctgtgcaccggagctgttcctatttggccatcttggctcctctccccttgttcctgattttaatgggactaccttggttatttcacagcacacttacggtgctttgtgaagtgcctgctatgttactatcatcatcttcctgacaagatgaagtaagacatatcaagatttaaaacataaatagcttggaacaccctgaagagcaacatgggagaaactgagaaaagaattgaaacccatagaataagatgtctttccaagttgaagatgtttctgttggcaataacatgtgcatttgtatccaaaacactgtctggatcttatatgaattccatgctcacacaaatagagagacaattcaacatcccaacatctctagttggattcattaatggaagctttgagattgatatgaatatgaatctacagtttcagtttcaggcaacttgtcctcaaacagtttcttgtgtatggaaaatggaacccagattttaagaccaacgcaggatccatcagagtgtacaaaggaagttaaatcattaatgtgggtgtacgtcctagtaggcaatattgtacgtggaatgggtgaaactcccatcctgcctttgggtatttcctatatagaagattttgccaaatttgaaaattctcctttatatattgggcttgtagaaacaggagctattattggtcctttgattggacttttgttggcatcattctgtgcaaatgtttatgttgacactggatttgtgaacacagatgatctgatcataactcccactgacactcgttgggtcggtgcatggtggtttggctttctgatttgtgcaggagttaacgtgctcactgccattccttttttctttttgcccaacacacttccaaaggaaggactagagactaatgctgacatcattaaaaatgaaaatgaagacaaacaaaaagaagaggtcaagaaggaaaaatatggaatcactaaagattttctacctttcatgaaaagtctttcctgcaatccaatttatatgcttttcatacttgtaagtgtgatacagttcaatgcattcgttaacatgatctccttcatgcctaaatacctagaacagcaatatggaatatcatcttcagatgcaatctttctaatgggtatttataacttacctccaatatgtattggatatataattggtggtttaattatgaagaagttcaagattactgtcaaacaagctgcccacataggatgttggttatccttacttgagtatcttctctattttttatcttttctcatgacttgtgaaaattcttcagttgttggaataaatacctcttatgaaggaattccacaagatttatatgtggaaaatgacatctttgctgattgcaatgtggattgcaactgtccatctaaaatatgggatcctgtgtgtggaaacaatggcttgtcatatctgtcagcttgtcttgctggttgtgagacatccattggaacgggaataaacatggtgttccaaaattgcagctgtattcaaacatcaggaaattcatctgcagttcttgggctgtgcgacaaaggacctgactgttccttgatgctccagtacttcctaatcttgtcagcgatgagcagtttcatttattctttggctgccatacctggatatatggttctcttgaggtgtatgaaatctgaagagaagtcccttggtgtgggattacatacattttgcacaagagtatttgctggcattcctgcacctatatattttggcgctttaatggattccacatgtttacactggggaactttgaaatgtggtgagtcaggggcatgcaggatatatgattccaccaccttcagatacatctacctcggattgccggcagcactaagaggatcaagctttgttccagccttaatcatcttaattcttttgaggaagtgtcatctacctggtgaaaatgcctcttcaggaacagagcttatagagacaaaagtcaaagggaaggaaaatgagtgcaaagatatataccaaaagtccacggttttgaaagatgatgaattgaaaactaaattgtaattgtcctattatattacttttttcagaattagagaacatgctgtacaacttaattgttttaaaaatcagtagagatataatagataact

SEQ ID NO: 184733 - DNA, 2322 bp, Homo sapiens
  Payload ID: 16376
  Gene Symbol: SLCO1A2
  Gene Name: solute carrier organic anion transporter family, member 1A2
  ENST ID: ENST00000544020
  CDS Start-End: 239-520
gcttggaacaccctgaagagcaacatgggagaaactgagaaaagaattgaaacccatagaataagatgtctttccaagttgaagctgagaaaccctgaaaatactctgtcctgggcttatatgccttagacacaactgggattgctgagctcaagggttgcagagcatcctactatgggaagaatgaggacataactcagattgttctggatatttccctcattgctgagaatgcagaatgtttctgaccaagaattgcaagcaagaacaggaaagagtggagtcggccaagatgtttctgttggcaataacatgtgcatttgtatccaaaacactgtctggatcttatatgaattccatgctcacacaaatagagagacaattcaacatcccaacatctctagttggattcattaatggaagctttgagattgatatgaatatgaatctacagtttcagtttcaggcaacttgtcctcaaacagtttcttgtgtatggaaaatggaacccagattttaagaccaacgcaggatccatcagagtgtacaaaggaagttaaatcattaatgtgggtgtacgtcctagtaggcaatattgtacgtggaatgggtgaaactcccatcctgcctttgggtatttcctatatagaagattttgccaaatttgaaaattctcctttatatattgggcttgtagaaacaggagctattattggtcctttgattggacttttgttggcatcattctgtgcaaatgtttatgttgacactggatttgtgaacacagatgatctgatcataactcccactgacactcgttgggtcggtgcatggtggtttggctttctgatttgtgcaggagttaacgtgctcactgccattccttttttctttttgcccaacacacttccaaaggaaggactagagactaatgctgacatcattaaaaatgaaaatgaagacaaacaaaaagaagaggtcaagaaggaaaaatatggaatcactaaagattttctacctttcatgaaaagtctttcctgcaatccaatttatatgcttttcatacttgtaagtgtgatacagttcaatgcattcgttaacatgatctccttcatgcctaaatacctagaacagcaatatggaatatcatcttcagatgcaatctttctaatgggtatttataacttacctccaatatgtattggatatataattggtggtttaattatgaagaagttcaagattactgtcaaacaagctgcccacataggatgttggttatccttacttgagtatcttctctattttttatcttttctcatgacttgtgaaaattcttcagttgttggaataaatacctcttatgaaggaattccacaagatttatatgtggaaaatgacatctttgctgattgcaatgtggattgcaactgtccatctaaaatatgggatcctgtgtgtggaaacaatggcttgtcatatctgtcagcttgtcttgctggttgtgagacatccattggaacgggaataaacatggtgttccaaaattgcagctgtattcaaacatcaggaaattcatctgcagttcttgggctgtgcgacaaaggacctgactgttccttgatgctccagtacttcctaatcttgtcagcgatgagcagtttcatttattctttggctgccatacctggatatatggttctcttgaggtgtatgaaatctgaagagaagtcccttggtgtgggattacatacattttgcacaagagtatttgctggcattcctgcacctatatattttggcgctttaatggattccacatgtttacactggggaactttgaaatgtggtgagtcaggggcatgcaggatatatgattccaccaccttcagatacatctacctcggattgccggcagcactaagaggatcaagctttgttccagccttaatcatcttaattcttttgaggaagtgtcatctacctggtgaaaatgcctcttcaggaacagagcttatagagacaaaagtcaaagggaaggaaaatgagtgcaaagatatataccaaaagtccacggttttgaaagatgatgaattgaaaactaaattgtaattgtcctattatattacttttttcagaattagagaacatgctgtacaacttaattgttttaaaaatcagtagagatataatagataactttttcttgtctttaagaacctaaaaaacctcttaactcaaaataataaaatgttcactaatgatatttctaaggtatcagtgacacttgagttttcctaggagggacatcaataacagccc

SEQ ID NO: 184734 - DNA, 2229 bp, Homo sapiens
  Payload ID: 16377
  Gene Symbol: SLCO1B1
  Gene Name: solute carrier organic anion transporter family, member 1B1
  Uniprot ID: Q9Y6L6
  ENST ID: ENST00000256958
  CDS Start-End: 97-2172
gacttgttgcagttgctgtaggattctaaatccaggtgattgtttcaaactgagcatcaacaacaaaaacatttgtatgatatctatatttcaatcatggaccaaaatcaacatttgaataaaacagcagaggcacaaccttcagagaataagaaaacaagatactgcaatggattgaagatgttcttggcagctctgtcactcagctttattgctaagacactaggtgcaattattatgaaaagttccatcattcatatagaacggagatttgagatatcctcttctcttgttggttttattgacggaagctttgaaattggaaatttgcttgtgattgtatttgtgagttactttggatccaaactacatagaccaaagttaattggaatcggttgtttcattatgggaattggaggtgttttgactgctttgccacatttcttcatgggatattacaggtattctaaagaaactaatatcaattcatcagaaaattcaacatcgaccttatccacttgtttaattaatcaaattttatcactcaatagagcatcacctgagatagtgggaaaaggttgtttaaaggaatctgggtcatacatgtggatatatgtgttcatgggtaatatgcttcgtggaataggggagactcccatagtaccattggggctttcttacattgatgatttcgctaaagaaggacattcttctttgtatttaggtatattgaatgcaatagcaatgattggtccaatcattggctttaccctgggatctctgttttctaaaatgtacgtggatattggatatgtagatctaagcactatcaggataactcctactgattctcgatgggttggagcttggtggcttaatttccttgtgtctggactattctccattatttcttccataccattctttttcttgccccaaactccaaataaaccacaaaaagaaagaaaagcttcactgtctttgcatgtgctggaaacaaatgatgaaaaggatcaaacagctaatttgaccaatcaaggaaaaaatattaccaaaaatgtgactggttttttccagtcttttaaaagcatccttactaatcccctgtatgttatgtttgtgcttttgacgttgttacaagtaagcagctatattggtgcttttacttatgtcttcaaatacgtagagcaacagtatggtcagccttcatctaaggctaacatcttattgggagtcataaccatacctatttttgcaagtggaatgtttttaggaggatatatcattaaaaaattcaaactgaacaccgttggaattgccaaattctcatgttttactgctgtgatgtcattgtccttttacctattatattttttcatactctgtgaaaacaaatcagttgccggactaaccatgacctatgatggaaataatccagtgacatctcatagagatgtaccactttcttattgcaactcagactgcaattgtgatgaaagtcaatgggaaccagtctgtggaaacaatggaataacttacatctcaccctgtctagcaggttgcaaatcttcaagtggcaataaaaagcctatagtgttttacaactgcagttgtttggaagtaactggtctccagaacagaaattactcagcccatttgggtgaatgcccaagagatgatgcttgtacaaggaaattttacttttttgttgcaatacaagtcttgaatttatttttctctgcacttggaggcacctcacatgtcatgctgattgttaaaattgttcaacctgaattgaaatcacttgcactgggtttccactcaatggttatacgagcactaggaggaattctagctccaatatattttggggctctgattgatacaacgtgtataaagtggtccaccaacaactgtggcacacgtgggtcatgtaggacatataattccacatcattttcaagggtctacttgggcttgtcttcaatgttaagagtctcatcacttgttttatatattatattaatttatgccatgaagaaaaaatatcaagagaaagatatcaatgcatcagaaaatggaagtgtcatggatgaagcaaacttagaatccttaaataaaaataaacattttgtcccttctgctggggcagatagtgaaacacattgttaaggggagaaaaaaagccacttctgcttctgtgtttccaaacagcattgcattgattca

SEQ ID NO: 184735 - DNA, 2840 bp, Homo sapiens
  Payload ID: 16378
  Gene Symbol: SLCO1B3
  Gene Name: solute carrier organic anion transporter family, member 1B3
  Uniprot ID: Q9NPD5
  ENST ID: ENST00000261196
  CDS Start-End: 68-2176
aggtgatcatttcaaaccaagcatcagcaacaattaaaaatattcacttggtatctgtagtttaataatggaccaacatcaacatttgaataaaacagcagagtcagcatcttcagagaaaaagaaaacaagacgctgcaatggattcaagatgttcttggcagccctgtcattcagctatattgctaaagcactaggtggaatcattatgaaaatttccatcactcaaatagaaaggagatttgacatatcctcttctcttgctggtttaattgatggaagctttgaaattggaaatttgcttgtgattgtatttgtaagttactttggatctaaactacacagaccgaagttaattggaattggttgtctccttatgggaactggaagtattttgacatctttaccacatttcttcatgggatattataggtattctaaagaaacccatattaatccatcagaaaattcaacatcaagtttatcaacctgtttaattaatcaaaccttatcattcaatggaacatcacctgagatagtagaaaaagattgtgtaaaggaatctgggtcacacatgtggatctatgtcttcatggggaatatgcttcgtggcataggggaaacccccatagtaccattggggatttcatacattgatgattttgcaaaagaaggacattcttccttgtatttaggtagtttgaatgcaataggaatgattggtccagtcattggctttgcactgggatctctgtttgctaaaatgtacgtggatattggatatgtagatctgagcactatcagaataactcctaaggactctcgttgggttggagcttggtggcttggtttccttgtgtctggactattttccattatttcttccataccattttttttcttgccgaaaaatccaaataaaccacaaaaagaaagaaaaatttcactatcattgcatgtgctgaaaacaaatgatgatagaaatcaaacagctaatttgaccaaccaaggaaaaaatgttaccaaaaatgtgactggttttttccagtctttgaaaagcatccttaccaatcccctgtatgttatatttctgcttttgacattgttacaagtaagcagctttattggttcttttacttacgtctttaaatatatggagcaacagtacggtcagtctgcatctcatgctaactttttgttgggaatcataaccattcctacggttgcaactggaatgtttttaggaggatttatcattaaaaaattcaaattgtctttagttggaattgccaaattttcatttcttacttcgatgatatccttcttgtttcaacttctatatttccctctaatctgcgaaagcaaatcagttgccggcctaaccttgacctatgatggaaataattcagtggcatctcatgtagatgtaccactttcttattgcaactcagagtgcaattgtgatgaaagtcagtgggaaccagtctgtgggaacaatggaataacttacctgtcaccttgtctagcaggatgcaaatcctcaagtggtattaaaaagcatacagtgttttataactgtagttgtgtggaagtaactggtctccagaacagaaattactcagcacacttgggtgaatgcccaagagataatacttgtacaaggaaatttttcatctatgttgcaattcaagtcataaactctttgttctctgcaacaggaggtaccacatttatcttgttgactgtgaagattgttcaacctgaattgaaagcacttgcaatgggtttccagtcaatggttataagaacactaggaggaattctagctccaatatattttggggctctgattgataaaacatgtatgaagtggtccaccaacagctgtggagcacaaggggcttgtaggatatataattccgtattttttggaagggtctacttgggcttatctatagctttaagattcccagcacttgttttatatattgttttcatttttgctatgaagaaaaaatttcaaggaaaagataccaaggcatcggacaatgaaagaaaagtaatggatgaagcaaacttagaattcttaaataatggtgaacattttgtaccttctgctggaacagatagtaaaacatgtaatttggacatgcaagacaatgctgctgccaactaacattgcattgattcattaagatgttatttttgaggtgttcctggtctttcactgacaattccaacattctttacttacagtggaccaatggataagtctatgcatctataataaactataaaaaatgggagtacccatggttaggatatagctatgcctttatggttaagattagaatatatgatccataaaaatttaaagtgagaggcatggttagtgtgtgatacaataaaaagtaattgtttggtagttgtaactgctaataaaaccagtgactagaatataagggaggtaaaaaggacaagatagattaatagcctaaataaagagaaaagcctgatgcctttaaaaaaaatgaaacactttggatgtattacttaggccaaaatctggcctggatttatgctataatatatattttcatgttaagttgtatatttttcagaaattataaatattattaatttaaaatttgaatttgtgtttgactaacaacctcgatggatcttcttccaacctcccattaagatcctgcagaagaaatagaaatattcaaatattgcaaggtgtaattgtgagacaacttattataatacgtgttaagtttctactggacccatggaagtggattaagaaaaaccgactttagcttgagaaagcaaaa

SEQ ID NO: 184736 - DNA, 2805 bp, Homo sapiens
  Payload ID: 16378
  Gene Symbol: SLCO1B3
  Gene Name: solute carrier organic anion transporter family, member 1B3
  Uniprot ID: Q9NPD5
  ENST ID: ENST00000381545
  CDS Start-End: 220-2328
gatggacttgttgcagttgctgtagcattcaaagtcaagttgtgctttgcgatgctgagtttactgttttaaatggacttcaagcatagccctgaagtgttgtcccgttgttcccacctcctagagggcctgacagaagaggtacatatgctatgtgatcatttcaaaccaagcatcagcaacaattaaaaatattcacttggtatctgtagtttaataatggaccaacatcaacatttgaataaaacagcagagtcagcatcttcagagaaaaagaaaacaagacgctgcaatggattcaagatgttcttggcagccctgtcattcagctatattgctaaagcactaggtggaatcattatgaaaatttccatcactcaaatagaaaggagatttgacatatcctcttctcttgctggtttaattgatggaagctttgaaattggaaatttgcttgtgattgtatttgtaagttactttggatctaaactacacagaccgaagttaattggaattggttgtctccttatgggaactggaagtattttgacatctttaccacatttcttcatgggatattataggtattctaaagaaacccatattaatccatcagaaaattcaacatcaagtttatcaacctgtttaattaatcaaaccttatcattcaatggaacatcacctgagatagtagaaaaagattgtgtaaaggaatctgggtcacacatgtggatctatgtcttcatggggaatatgcttcgtggcataggggaaacccccatagtaccattggggatttcatacattgatgattttgcaaaagaaggacattcttccttgtatttaggtagtttgaatgcaataggaatgattggtccagtcattggctttgcactgggatctctgtttgctaaaatgtacgtggatattggatatgtagatctgagcactatcagaataactcctaaggactctcgttgggttggagcttggtggcttggtttccttgtgtctggactattttccattatttcttccataccattttttttcttgccgaaaaatccaaataaaccacaaaaagaaagaaaaatttcactatcattgcatgtgctgaaaacaaatgatgatagaaatcaaacagctaatttgaccaaccaaggaaaaaatgttaccaaaaatgtgactggttttttccagtctttgaaaagcatccttaccaatcccctgtatgttatatttctgcttttgacattgttacaagtaagcagctttattggttcttttacttacgtctttaaatatatggagcaacagtacggtcagtctgcatctcatgctaactttttgttgggaatcataaccattcctacggttgcaactggaatgtttttaggaggatttatcattaaaaaattcaaattgtctttagttggaattgccaaattttcatttcttacttcgatgatatccttcttgtttcaacttctatatttccctctaatctgcgaaagcaaatcagttgccggcctaaccttgacctatgatggaaataattcagtggcatctcatgtagatgtaccactttcttattgcaactcagagtgcaattgtgatgaaagtcagtgggaaccagtctgtgggaacaatggaataacttacctgtcaccttgtctagcaggatgcaaatcctcaagtggtattaaaaagcatacagtgttttataactgtagttgtgtggaagtaactggtctccagaacagaaattactcagcacacttgggtgaatgcccaagagataatacttgtacaaggaaatttttcatctatgttgcaattcaagtcataaactctttgttctctgcaacaggaggtaccacatttatcttgttgactgtgaagattgttcaacctgaattgaaagcacttgcaatgggtttccagtcaatggttataagaacactaggaggaattctagctccaatatattttggggctctgattgataaaacatgtatgaagtggtccaccaacagctgtggagcacaaggggcttgtaggatatataattccgtattttttggaagggtctacttgggcttatctatagctttaagattcccagcacttgttttatatattgttttcatttttgctatgaagaaaaaatttcaaggaaaagataccaaggcatcggacaatgaaagaaaagtaatggatgaagcaaacttagaattcttaaataatggtgaacattttgtaccttctgctggaacagatagtaaaacatgtaatttggacatgcaagacaatgctgctgccaactaacattgcattgattcattaagatgttatttttgaggtgttcctggtctttcactgacaattccaacattctttacttacagtggaccaatggataagtctatgcatctataataaactataaaaaatgggagtacccatggttaggatatagctatgcctttatggttaagattagaatatatgatccataaaaatttaaagtgagaggcatggttagtgtgtgatacaataaaaagtaattgtttggtagttgtaactgctaataaaaccagtgactagaatataagggaggtaaaaaggacaagatagattaatagcctaaataaagagaaaagcctgatgcctttaaaaaaaatgaaacactttggatgtattacttaggccaaaatctggcctggatttatgctataatatatattttcatgttaagttgtatatttttcagaaattataaatattattaatttaaaatttgaa

SEQ ID NO: 184737 - DNA, 1002 bp, Homo sapiens
  Payload ID: 16378
  Gene Symbol: SLCO1B3
  Gene Name: solute carrier organic anion transporter family, member 1B3
  ENST ID: ENST00000540853
  CDS Start-End: 129-1002
gtgagactttaacatcagaaaaaggatggacttgttgcagttgctgtagcattcaaagtcaaggtgatcatttcaaaccaagcatcagcaacaattaaaaatattcacttggtatctgtagtttaataatggaccaacatcaacatttgaataaaacagcagagtcagcatcttcagagaaaaagaaaacaagacgctgcaatggattcaagatgttcttggcagccctgtcattcagctatattgctaaagcactaggtggaatcattatgaaaatttccatcactcaaatagaaaggagatttgacatatcctcttctcttgctggtttaattgatggaagctttgaaattggaaatttgcttgtgattgtatttgtaagttactttggatctaaactacacagaccgaagttaattggaattggttgtctccttatgggaactggaagtattttgacatctttaccacatttcttcatgggatattataggtattctaaagaaacccatattaatccatcagaaaattcaacatcaagtttatcaacctgtttaattaatcaaaccttatcattcaatggaacatcacctgagatagtagaaaaagattgtgtaaaggaatctgggtcacacatgtggatctatgtcttcatggggaatatgcttcgtggcataggggaaacccccatagtaccattggggatttcatacattgatgattttgcaaaagaaggacattcttccttgtatttaggtagtttgaatgcaataggaatgattggtccagtcattggctttgcactgggatctctgtttgctaaaatgtacgtggatattggatatgtagatctgagcactatcagaataactcctaaggactctcgttgggttggagcttggtggcttggtttccttgtgtctggactattttccattatttcttccataccattttttttcttgccgaaaaatccaaataaaccacaaaaagaaagaaaaa

SEQ ID NO: 184738 - DNA, 1771 bp, Homo sapiens
  Payload ID: 16378
  Gene Symbol: SLCO1B3
  Gene Name: solute carrier organic anion transporter family, member 1B3
  ENST ID: ENST00000544370
  CDS Start-End: 1-1440
gggaatatgcttcgtggcataggggaaacccccatagtaccattggggatttcatacattgatgattttgcaaaagaaggacattcttccttgtatttaggtagtttgaatgcaataggaatgattggtccagtcattggctttgcactgggatctctgtttgctaaaatgtacgtggatattggatatgtagatctgagcactatcagaataactcctaaggactctcgttgggttggagcttggtggcttggtttccttgtgtctggactattttccattatttcttccataccattttttttcttgccgaaaaatccaaataaaccacaaaaagaaagaaaaatttcactatcattgcatgtgctgaaaacaaatgatgatagaaatcaaacagctaatttgaccaaccaaggaaaaaatgttaccaaaaatgtgactggttttttccagtctttgaaaagcatccttaccaatcccctgtatgttatatttctgcttttgacattgttacaagtaagcagctttattggttcttttacttacgtctttaaatatatggagcaacagtacggtcagtctgcatctcatgctaactttttgttgggaatcataaccattcctacggttgcaactggaatgtttttaggaggatttatcattaaaaaattcaaattgtctttagttggaattgccaaattttcatttcttacttcgatgatatccttcttgtttcaacttctatatttccctctaatctgcgaaagcaaatcagttgccggcctaaccttgacctatgatggaaataattcagtggcatctcatgtagatgtaccactttcttattgcaactcagagtgcaattgtgatgaaagtcagtgggaaccagtctgtgggaacaatggaataacttacctgtcaccttgtctagcaggatgcaaatcctcaagtggtattaaaaagcatacagtgttttataactgtagttgtgtggaagtaactggtctccagaacagaaattactcagcacacttgggtgaatgcccaagagataatacttgtacaaggaaatttttcatctatgttgcaattcaagtcataaactctttgttctctgcaacaggaggtaccacatttatcttgttgactgtgaagattgttcaacctgaattgaaagcacttgcaatgggtttccagtcaatggttataagaacactaggaggaattctagctccaatatattttggggctctgattgataaaacatgtatgaagtggtccaccaacagctgtggagcacaaggggcttgtaggatatataattccgtattttttgggcagaagtatcctgcaagtgacattaagacaactagattatctggaagaaacaaaaagctgctgcaattgtaccttacctcttatagaagcattaatttgtaatttatatattgatcaatatataaatttgatttctgaaactataagtattagaactactcatagtagaatttcttttaattatctaggaagaataaatgtgtttgtaagtatgacccaaatgcctgaaagtataatagaaaaataatggtgaaaggatttatattgctttgtgtatatacccaataataggactgatgggttgaatggtaattctgttttatgttctttgagaaatcgtcagactgctttctacaatgacagaacttatttacattcccactagtagtgtataagcgttcccttttctccactatgtcttcagtatctgtta

SEQ ID NO: 184739 - DNA, 1923 bp, Homo sapiens
  Payload ID: 16379
  Gene Symbol: SLCO1B7
  Gene Name: solute carrier organic anion transporter family, member 1B7 (non-functional)
  Uniprot ID: G3V0H7
  ENST ID: ENST00000421593
  CDS Start-End: 1-1923
atgaaaatatcaaccactcaaatagaaaggagatttgagatatcctcttctcttgttggtttaattgatggaagcttcgaaataggaaatttgtttgtgattgtatttgtaagttactttggatctaaactacacagaccgaagttaattggaattggttgttttcttatgggaactggaagtattttgatggctttaccacatttcttcatgggatattacaggtattctaaagaaaccaatattgatccatcagaaaattcaacatcaaacttaccaaactgtttaattaatcaaatgttatcactcaatagaacaccgtctgagataatagaaagaggttgtgtgaaggaatctgggtcacacatgtggatctatgtcttcatgggtaatatgcttcgtggcataggggaaacccccatagtaccattggggatttcttacattgatgattttgcaaaagaaggacattcttccttgtatttaggtactgtgaatgtaatgggaatgactggtctagtttttgcctttatgctgggatctctgtttgctaaaatgtatgtggatatcggatatgtggatctgagcactatcaggataactcctaaggactctcgttgggttggagcttggtggcttggtttccttgtgtctggaatagtatccattatttcttctataccattctttttcttgcctctaaatccaaataaaccacagaaagaaaggaaagtttcactatttttgcatgtgctaaaaactaatgataaaaggaatcaaatagctaatttgaccaaccgaagaaaatatattaccaaaaatgtgactggctttttccagtctttgaaaagcatccttaccaatcccctgtatgttatatttgtaatttttacattgttacacatgagcagctacattgcttctcttacttatatcattaaaatggtggagcaacagtatggttggtctgcatctaagactaactttttgttgggagtcctcgccctacctgctgttgcaattggcatgttttcaggaggatatatcattaaaaaattcaaattgtctttagttggacttgccaaattggcattttgttctgcaacagtgcatctcttatctcaagttttatatttctttctaatctgtgaaagcaaatcagttgccggcctaaccttgacctatgatggaaatagtccagtaagatctcatgtagatgtaccactttcttattgcaactcagagtgcaattgtgatgaaagtcaatgggaacccgtctgtggaaacaatggaataacttacctgtcaccttgtctagcaggatgcaaatcttcaagtggtaataaagagcccatagtgttttataactgtagctgtgtggaagtaattggtctccagaacaaaaattactcagcgcacttgggtgaatgcccaagagatgatgcttgtacaaggaaatcttacgtttattttgtaattcaagtcttagatgctttcctctgtgcagttggacttacctcatattccgtgctggtgattaggattgttcaacctgaattgaaagcacttgcaatcggcttccattcaatgattatgcgatcgctaggaggtattctagttccaatatattttggggctctgattgatacaacgtgtatgaagtggtccaccaacagctgtggagcacgaggggcttgtaggatatataattccacatatttgggaagagccttcttcggcttgaaggtagccctaatatttccagtacttgttttacttactgtatttatttttgttgtaaggaaaaaatcccatggaaaggataccaaagtattagaaaatgaaagacaagtaatggatgaagcaaacttagaattcttaaacgacagtgaacattttgtaccttctgctgaagaacagtaa

SEQ ID NO: 184740 - DNA, 506 bp, Homo sapiens
  Payload ID: 16379
  Gene Symbol: SLCO1B7
  Gene Name: solute carrier organic anion transporter family, member 1B7 (non-functional)
  ENST ID: ENST00000545916
  CDS Start-End: 1-300
gtaattcaagtcttagatgctttcctctgtgcagttggacttacctcatattccgtgctggtgattaggattgttcaacctgaattgaaagcacttgcaatcggcttccattcaatgattatgcgatcgctaggaggtattctagttccaatatattttggggctctgattgatacaacgtgtatgaagtggtccaccaacagctgtggagcacgaggggcttgtaggatatataattccacatatttgggaagagccttcttcggcttgaaggttgattccatgccttggataatatgaatacatgccttggataatatgaacagtgctgcaataaacatgaaagtgcagaatgactcttcaacatatttatttcattttctttggccatatacccagtagtgggattgctggatcatatgatagatctatttttaaatttttgaggagcttccatactgtttttcataacccctgtactaatttacattaacaactgtgtataa

SEQ ID NO: 184741 - DNA, 3365 bp, Homo sapiens
  Payload ID: 16380
  Gene Symbol: SLCO1C1
  Gene Name: solute carrier organic anion transporter family, member 1C1
  Uniprot ID: Q9NYB5
  ENST ID: ENST00000266509
  CDS Start-End: 369-2507
gcaaagaaatggctcaaaagcttcagctctttctgtgccctgggagctgagatgcacgtcagtggccttgccagcgtggccaattctctgctgactgccagaaaaaagaggccaggaagaaagaggaaagagaagagatcgctcaggggtgagaccatgcccttcatcttttcttttccctaatctcctctgcttgtgtccacccacactctccccacctggcaaaattgttcaaaattgctgtggagtttacctcagtttcctctttcagtctgtggtgtgtggtccatcctcttgctgagcacattgaaaggaactggctatctttgatctcttcctccagatcagagtcaaggaatgtgtttataatggacacttcatccaaagaaaatatccagttgttctgcaaaacttcagtgcaacctgttggaaggccttcttttaaaacagaatatccctcctcagaagaaaagcaaccatgctgtggtgaactaaaggtgttcttgtgtgccttgtcttttgtttactttgccaaagcattggcagaaggctatctgaagagcaccatcactcagatagagagaaggtttgatatcccttcttcactggtgggagttattgatggtagttttgaaattgggaatctcttagttataacatttgttagctactttggagccaaacttcacaggccaaaaataattggagcagggtgtgtaatcatgggagttggaacactgctcattgcaatgcctcagttcttcatggagcagtacaaatatgagagatattctccttcctccaattccactctcagcatctctccgtgtctcctagagtcaagcagtcaattaccagtttcagttatggaaaaatcaaaatccaaaataagtaacgaatgtgaagtggacactagctcttccatgtggatttatgttttcctgggcaatcttcttcgtggaataggagaaactcccattcagcctttgggcattgcctacctggatgattttgccagtgaagacaatgcagctttctatattgggtgtgtgcagacggttgcaattataggaccaatctttggtttcctgttaggctcattatgtgccaaactatatgttgacattggctttgtaaacctagatcacataaccattaccccaaaagatccccagtgggtaggagcctggtggcttggctatctaatagcaggaatcataagtcttcttgcagctgtgcctttctggtatttaccaaagagtttaccaagatcccaaagtagagaggattctaattcttcctctgagaaatccaagtttattatagatgatcacacagactaccaaacaccccagggagaaaatgcaaaaataatggaaatggcaagagattttcttccatcactgaagaatctttttggaaacccagtatacttcctatatttatgtacaagcactgttcagttcaattctctgttcggcatggtgacgtacaaaccaaagtacattgagcagcagtatggacagtcatcctccagggccaactttgtgatcgggctcatcaacattccagcagtggcccttggaatattctctggggggatagttatgaaaaaattcagaatcagtgtgtgtggagctgcaaaactctacttgggatcatctgtctttggttacctcctatttctttccctgtttgcactgggctgtgaaaattctgatgtggcaggactaactgtctcctaccaaggaaccaaacctgtctcttatcatgaacgagctctcttttcagattgcaactcaagatgcaaatgttcagagacaaaatgggaacccatgtgcggtgaaaatggaatcacatatgtatcagcttgtcttgctggttgtcaaacctccaacaggagtggaaaaaatattatattttacaactgcacttgtgtgggaattgcagcttctaaatccggaaattcctcaggcatagtgggaagatgtcagaaagacaatggatgtccccaaatgtttctgtatttccttgtaatttcagtcatcacatcctatactttatccctaggtggcatacctggatacatattacttctgaggtgcattaagccacagcttaagtcttttgccttgggtatctacacattagcaataagagttcttgcaggaatcccagctccagtgtattttggagttttgattgatacttcatgcctcaaatggggatttaaaagatgtggaagtagaggatcatgcagattatatgattcaaatgtcttcagacatatatatctgggactaactgtgatactgggcacagtgtcaattctcctaagcattgcagtacttttcattttaaagaaaaattatgtttcaaaacacagaagttttataaccaagagagaaagaacaatggtgtctacaagattccaaaaggaaaattacactacaagtgatcatctgctacaacccaactactggccaggcaaggaaactcaactttagaaacatgatgactggaagtcatgtcttctaattggttgacattttgcaaacaaataaattgtaatcaaaagagctctaaatttgtaatttctttctcctttcaaaaaatgtctactttgttttggtcctaggcattaggtaatataactgataatatactgaaacatataatggaagatgcagatgataaaactaattttgaactttttaatttatataaattattttatatcacttacttatttcactttattttgctttgtgctcattgatatatattagctgtactcctagaagaacaattgtctctattgtcacacatggttatatttaaagtaatttctgaactgtgtaatgtgtctagagtaagcaaatactgctaacaattaactcataccttgggttccttcaagtattactcctatagtattttctcccatagctgtcttcatctgtgtattttaataatgatcttaggatggagcagaacatggagaggaagatttcattttaagctcctccttttctttgaaatacaataatttatatagaaatgtgtagcagcaaattatattggggattagaattttgaattaatagctctcctactattaatttacatgtgctttttgtgtggcgctataagtgactatggttgtaaagtaataaaattgatgttaacatgcccaattattgttcttttatgaatccaatgaatttaaaactattgttaaatataatactgccccactttaatatatgtaagcaacttcctacttatacacgacgtgttcctaaaacatgtttgaaaggtgaatttctgaaagtctacaataaatgtaggtgttacaacaggaa

SEQ ID NO: 184742 - DNA, 2414 bp, Homo sapiens
  Payload ID: 16380
  Gene Symbol: SLCO1C1
  Gene Name: solute carrier organic anion transporter family, member 1C1
  ENST ID: ENST00000539415
  CDS Start-End: 280-420
tttatcacgtgtggccttaaacttgcagcaaattgcaaagaaatggctcaaaagcttcagctctttctgtgccctgggagctgagatgcacgtcagtggccttgccagcgtggccaattctctgctgactgccagaaaaaagaggccaggaagaaagaggaaagagaagagatcgctcagggtctgtggtgtgtggtccatcctcttgctgagcacattgaaaggaactggctatctttgatctcttcctccagatcagagtcaaggaatgtgtttataatggacacttcatccaaagaaaatatccagttgttctgcaaaacttcagtgcaacctgttggaaggccttcttttaaaacagaatatccctcctcagaagaaaagcaaccatgctgtggtgaactaaaggtacaaatatgagagatattctccttcctccaattccactctcagcatctctccgtgtctcctagagtcaagcagtcaattaccagtttcagttatggaaaaatcaaaatccaaaataagtaacgaatgtgaagtggacactagctcttccatgtggatttatgttttcctgggcaatcttcttcgtggaataggagaaactcccattcagcctttgggcattgcctacctggatgattttgccagtgaagacaatgcagctttctatattgggtgtgtgcagacggttgcaattataggaccaatctttggtttcctgttaggctcattatgtgccaaactatatgttgacattggctttgtaaacctagatcacataaccattaccccaaaagatccccagtgggtaggagcctggtggcttggctatctaatagcaggaatcataagtcttcttgcagctgtgcctttctggtatttaccaaagagtttaccaagatcccaaagtagagaggattctaattcttcctctgagaaatccaagtttattatagatgatcacacagactaccaaacaccccagggagaaaatgcaaaaataatggaaatggcaagagattttcttccatcactgaagaatctttttggaaacccagtatacttcctatatttatgtacaagcactgttcagttcaattctctgttcggcatggtgacgtacaaaccaaagtacattgagcagcagtatggacagtcatcctccagggccaactttgtgatcgggctcatcaacattccagcagtggcccttggaatattctctggggggatagttatgaaaaaattcagaatcagtgtgtgtggagctgcaaaactctacttgggatcatctgtctttggttacctcctatttctttccctgtttgcactgggctgtgaaaattctgatgtggcaggactaactgtctcctaccaaggaaccaaacctgtctcttatcatgaacgagctctcttttcagattgcaactcaagatgcaaatgttcagagacaaaatgggaacccatgtgcggtgaaaatggaatcacatatgtatcagcttgtcttgctggttgtcaaacctccaacaggagtggaaaaaatattatattttacaactgcacttgtgtgggaattgcagcttctaaatccggaaattcctcaggcatagtgggaagatgtcagaaagacaatggatgtccccaaatgtttctgtatttccttgtaatttcagtcatcacatcctatactttatccctaggtggcatacctggatacatattacttctgaggtgcattaagccacagcttaagtcttttgccttgggtatctacacattagcaataagagttcttgcaggaatcccagctccagtgtattttggagttttgattgatacttcatgcctcaaatggggatttaaaagatgtggaagtagaggatcatgcagattatatgattcaaatgtcttcaggtaccaaatcaaaagcattcccgcatctcattgctacagcatcccagatttacacaatgccactgacactaacaagttttcatgtcatttcactgcttgtaagacatatatatctgggactaactgtgatactgggcacagtgtcaattctcctaagcattgcagtacttttcattttaaagaaaaattatgtttcaaaacacagaagttttataaccaagagagaaagaacaatggtgtctacaagattccaaaaggaaaattacactacaagtgatcatctgctacaacccaactactggccaggcaaggaaactcaactttagaaacatgatgactggaagtcatgtcttctaattggttgacattttgcaaacaaataaattgtaatcaaaagagctctaaatttgtaatttctttctcctttcaaaaaatgtctactttgttttggtcctaggcattaggtaatataactgataatatactgaaacata

SEQ ID NO: 184743 - DNA, 2529 bp, Homo sapiens
  Payload ID: 16380
  Gene Symbol: SLCO1C1
  Gene Name: solute carrier organic anion transporter family, member 1C1
  Uniprot ID: Q9NYB5
  ENST ID: ENST00000540354
  CDS Start-End: 249-2240
attgcaaagaaatggctcaaaagcttcagctctttctgtgccctgggagctgagatgcacgtcagtggccttgccagcgtggccaattctctgctgactgccagaaaaaagaggccaggaagaaagaggaaagagaagagatcgctcagggtctgtggtgtgtggtccatcctcttgctgagcacattgaaaggaactggctatctttgatctcttcctccagatcagagtcaaggaatgtgtttataatggacacttcatccaaagaaaatatccagttgttctgcaaaacttcagtgcaacctgttggaaggccttcttttaaaacagaatatccctcctcagaagaaaagcaaccatgctgtggtgaactaaaggtgttcttgtgtgccttgtcttttgtttactttgccaaagcattggcagaaggctatctgaagagcaccatcactcagatagagagaaggtttgatatcccttcttcactggtgggagttattgatggtagttttgaaattgggaatctcttagttataacatttgttagctactttggagccaaacttcacaggccaaaaataattggagcagggtgtgtaatcatgggagttggaacactgctcattgcaatgcctcagttcttcatggagcagtacaaatatgagagatattctccttcctccaattccactctcagcatctctccgtgtctcctagagtcaagcagtcaattaccagtttcagttatggaaaaatcaaaatccaaaataagtaacgggtgtgtgcagacggttgcaattataggaccaatctttggtttcctgttaggctcattatgtgccaaactatatgttgacattggctttgtaaacctagatcacataaccattaccccaaaagatccccagtgggtaggagcctggtggcttggctatctaatagcaggaatcataagtcttcttgcagctgtgcctttctggtatttaccaaagagtttaccaagatcccaaagtagagaggattctaattcttcctctgagaaatccaagtttattatagatgatcacacagactaccaaacaccccagggagaaaatgcaaaaataatggaaatggcaagagattttcttccatcactgaagaatctttttggaaacccagtatacttcctatatttatgtacaagcactgttcagttcaattctctgttcggcatggtgacgtacaaaccaaagtacattgagcagcagtatggacagtcatcctccagggccaactttgtgatcgggctcatcaacattccagcagtggcccttggaatattctctggggggatagttatgaaaaaattcagaatcagtgtgtgtggagctgcaaaactctacttgggatcatctgtctttggttacctcctatttctttccctgtttgcactgggctgtgaaaattctgatgtggcaggactaactgtctcctaccaaggaaccaaacctgtctcttatcatgaacgagctctcttttcagattgcaactcaagatgcaaatgttcagagacaaaatgggaacccatgtgcggtgaaaatggaatcacatatgtatcagcttgtcttgctggttgtcaaacctccaacaggagtggaaaaaatattatattttacaactgcacttgtgtgggaattgcagcttctaaatccggaaattcctcaggcatagtgggaagatgtcagaaagacaatggatgtccccaaatgtttctgtatttccttgtaatttcagtcatcacatcctatactttatccctaggtggcatacctggatacatattacttctgaggtgcattaagccacagcttaagtcttttgccttgggtatctacacattagcaataagagttcttgcaggaatcccagctccagtgtattttggagttttgattgatacttcatgcctcaaatggggatttaaaagatgtggaagtagaggatcatgcagattatatgattcaaatgtcttcagacatatatatctgggactaactgtgatactgggcacagtgtcaattctcctaagcattgcagtacttttcattttaaagaaaaattatgtttcaaaacacagaagttttataaccaagagagaaagaacaatggtgtctacaagattccaaaaggaaaattacactacaagtgatcatctgctacaacccaactactggccaggcaaggaaactcaactttagaaacatgatgactggaagtcatgtcttctaattggttgacattttgcaaacaaataaattgtaatcaaaagagctctaaatttgtaatttctttctcctttcaaaaaatgtctactttgttttggtcctaggcattaggtaatataactgataatatactgaaacatataatggaagatgcagatgataaaactaattttgaactttttaatttatataaattattttatatcacttacttatttcactttattttgctttgtgctcattgatatatattagctgtact

SEQ ID NO: 184744 - DNA, 2557 bp, Homo sapiens
  Payload ID: 16380
  Gene Symbol: SLCO1C1
  Gene Name: solute carrier organic anion transporter family, member 1C1
  Uniprot ID: Q9NYB5
  ENST ID: ENST00000545604
  CDS Start-End: 231-2423
aaaagcttcagctctttctgtgccctgggagctgagatgcacgtcagtggccttgccagcgtggccaattctctgctgactgccagaaaaaagaggccaggaagaaagaggaaagagaagagatcgctcagggtctgtggtgtgtggtccatcctcttgctgagcacattgaaaggaactggctatctttgatctcttcctccagatcagagtcaaggaatgtgtttataatggacacttcatccaaagaaaatatccagttgttctgcaaaacttcagtgcaacctgttggaaggccttcttttaaaacagaatatccctcctcagaagaaaagcaaccatgctgtggtgaactaaaggtgttcttgtgtgccttgtcttttgtttactttgccaaagcattggcagaaggctatctgaagagcaccatcactcagatagagagaaggtttgatatcccttcttcactggtgggagttattgatggtagttttgaaattgggaatctcttagttataacatttgttagctactttggagccaaacttcacaggccaaaaataattggagcagggtgtgtaatcatgggagttggaacactgctcattgcaatgcctcagttcttcatggagcagtacaaatatgagagatattctccttcctccaattccactctcagcatctctccgtgtctcctagagtcaagcagtcaattaccagtttcagttatggaaaaatcaaaatccaaaataagtaacgaatgtgaagtggacactagctcttccatgtggatttatgttttcctgggcaatcttcttcgtggaataggagaaactcccattcagcctttgggcattgcctacctggatgattttgccagtgaagacaatgcagctttctatattgggtgtgtgcagacggttgcaattataggaccaatctttggtttcctgttaggctcattatgtgccaaactatatgttgacattggctttgtaaacctagatcacataaccattaccccaaaagatccccagtgggtaggagcctggtggcttggctatctaatagcaggaatcataagtcttcttgcagctgtgcctttctggtatttaccaaagagtttaccaagatcccaaagtagagaggattctaattcttcctctgagaaatccaagtttattatagatgatcacacagactaccaaacaccccagggagaaaatgcaaaaataatggaaatggcaagagattttcttccatcactgaagaatctttttggaaacccagtatacttcctatatttatgtacaagcactgttcagttcaattctctgttcggcatggtgacgtacaaaccaaagtacattgagcagcagtatggacagtcatcctccagggccaactttgtgatcgggctcatcaacattccagcagtggcccttggaatattctctggggggatagttatgaaaaaattcagaatcagtgtgtgtggagctgcaaaactctacttgggatcatctgtctttggttacctcctatttctttccctgtttgcactgggctgtgaaaattctgatgtggcaggactaactgtctcctaccaaggaaccaaacctgtctcttatcatgaacgagctctcttttcagattgcaactcaagatgcaaatgttcagagacaaaatgggaacccatgtgcggtgaaaatggaatcacatatgtatcagcttgtcttgctggttgtcaaacctccaacaggagtggaaaaaatattatattttacaactgcacttgtgtgggaattgcagcttctaaatccggaaattcctcaggcatagtgggaagatgtcagaaagacaatggatgtccccaaatgtttctgtatttccttgtaatttcagtcatcacatcctatactttatccctaggtggcatacctggatacatattacttctgaggtgcattaagccacagcttaagtcttttgccttgggtatctacacattagcaataagagttcttgcaggaatcccagctccagtgtattttggagttttgattgatacttcatgcctcaaatggggatttaaaagatgtggaagtagaggatcatgcagattatatgattcaaatgtcttcaggtaccaaatcaaaagcattcccgcatctcattgctacagcatcccagatttacacaatgccactgacactaacaagttttcatgtcatttcactgcttgtaagacatatatatctgggactaactgtgatactgggcacagtgtcaattctcctaagcattgcagtacttttcattttaaagaaaaattatgtttcaaaacacagaagttttataaccaagagagaaagaacaatggtgtctacaagattccaaaaggaaaattacactacaagtgatcatctgctacaacccaactactggccaggcaaggaaactcaactttagaaacatgatgactggaagtcatgtcttctaattggttgacattttgcaaacaaataaattgtaatcaaaagagctctaaatttgt

SEQ ID NO: 184745 - DNA, 2868 bp, Homo sapiens
  Payload ID: 16380
  Gene Symbol: SLCO1C1
  Gene Name: solute carrier organic anion transporter family, member 1C1
  Uniprot ID: Q9NYB5
  ENST ID: ENST00000545102
  CDS Start-End: 295-2133
aagagatcgctcaggggtgagaccatgcccttcatcttttcttttccctaatctcctctgcttgtgtccacccacactctccccacctggcaaaattgttcaaaattgctgtggagtttacctcagtttcctctttcagtctgtggtgtgtggtccatcctcttgctgagcacattgaaaggaactggctatctttgatctcttcctccagggaatctcttagttataacatttgttagctactttggagccaaacttcacaggccaaaaataattggagcagggtgtgtaatcatgggagttggaacactgctcattgcaatgcctcagttcttcatggagcagtacaaatatgagagatattctccttcctccaattccactctcagcatctctccgtgtctcctagagtcaagcagtcaattaccagtttcagttatggaaaaatcaaaatccaaaataagtaacgaatgtgaagtggacactagctcttccatgtggatttatgttttcctgggcaatcttcttcgtggaataggagaaactcccattcagcctttgggcattgcctacctggatgattttgccagtgaagacaatgcagctttctatattgggtgtgtgcagacggttgcaattataggaccaatctttggtttcctgttaggctcattatgtgccaaactatatgttgacattggctttgtaaacctagatcacataaccattaccccaaaagatccccagtgggtaggagcctggtggcttggctatctaatagcaggaatcataagtcttcttgcagctgtgcctttctggtatttaccaaagagtttaccaagatcccaaagtagagaggattctaattcttcctctgagaaatccaagtttattatagatgatcacacagactaccaaacaccccagggagaaaatgcaaaaataatggaaatggcaagagattttcttccatcactgaagaatctttttggaaacccagtatacttcctatatttatgtacaagcactgttcagttcaattctctgttcggcatggtgacgtacaaaccaaagtacattgagcagcagtatggacagtcatcctccagggccaactttgtgatcgggctcatcaacattccagcagtggcccttggaatattctctggggggatagttatgaaaaaattcagaatcagtgtgtgtggagctgcaaaactctacttgggatcatctgtctttggttacctcctatttctttccctgtttgcactgggctgtgaaaattctgatgtggcaggactaactgtctcctaccaaggaaccaaacctgtctcttatcatgaacgagctctcttttcagattgcaactcaagatgcaaatgttcagagacaaaatgggaacccatgtgcggtgaaaatggaatcacatatgtatcagcttgtcttgctggttgtcaaacctccaacaggagtggaaaaaatattatattttacaactgcacttgtgtgggaattgcagcttctaaatccggaaattcctcaggcatagtgggaagatgtcagaaagacaatggatgtccccaaatgtttctgtatttccttgtaatttcagtcatcacatcctatactttatccctaggtggcatacctggatacatattacttctgaggtgcattaagccacagcttaagtcttttgccttgggtatctacacattagcaataagagttcttgcaggaatcccagctccagtgtattttggagttttgattgatacttcatgcctcaaatggggatttaaaagatgtggaagtagaggatcatgcagattatatgattcaaatgtcttcaggtaccaaatcaaaagcattcccgcatctcattgctacagcatcccagatttacacaatgccactgacactaacaagttttcatgtcatttcactgcttgtaagacatatatatctgggactaactgtgatactgggcacagtgtcaattctcctaagcattgcagtacttttcattttaaagaaaaattatgtttcaaaacacagaagttttataaccaagagagaaagaacaatggtgtctacaagattccaaaaggaaaattacactacaagtgatcatctgctacaacccaactactggccaggcaaggaaactcaactttagaaacatgatgactggaagtcatgtcttctaattggttgacattttgcaaacaaataaattgtaatcaaaagagctctaaatttgtaatttctttctcctttcaaaaaatgtctactttgttttggtcctaggcattaggtaatataactgataatatactgaaacatataatggaagatgcagatgataaaactaattttgaactttttaatttatataaattattttatatcacttacttatttcactttattttgctttgtgctcattgatatatattagctgtactcctagaagaacaattgtctctattgtcacacatggttatatttaaagtaatttctgaactgtgtaatgtgtctagagtaagcaaatactgctaacaattaactcataccttgggttccttcaagtattactcctatagtattttctcccatagctgtcttcatctgtgtattttaataatgatcttaggatggagcagaacatggagaggaagatttcattttaagctcctccttttctttgaaatacaataatttatatagaaatgtgtagcagcaaattatattggggattagaattttgaattaatagctctcctactattaatttacatgtgctttttgtgtggcgctataagtgactatggttgtaaagtaataaaattgatgttaacatgc

SEQ ID NO: 184746 - DNA, 4223 bp, Homo sapiens
  Payload ID: 16381
  Gene Symbol: SLCO2A1
  Gene Name: solute carrier organic anion transporter family, member 2A1
  Uniprot ID: Q92959
  ENST ID: ENST00000310926
  CDS Start-End: 275-2206
acacctgtctgagggggcggcggcggcggcggcggcggggcgggggctcgtagcgcctttgacacccgaggaaaagagggaggagggagagcgcgtttcatcatcggcggcggccacttataaaaacttctaggcgcgcactcgctggctcagtctccgctccgcgaatctcctccggccactgccgccgcggtcgcctctcacccgcccggccgctccagcccgaggcgccccgaccccgcgccactccgcgcccggccagccgcccgcagccatggggctcctgcccaagctcggcgcgtcccagggcagcgacacctctactagccgagccggccgctgtgcccgctcggtcttcggcaacattaaggtgtttgtgctctgccaaggcctcctgcagctctgccaactcctgtacagcgcctacttcaagagcagcctcaccaccattgagaagcgctttgggctctccagttcttcatcgggtctcatttccagcttgaatgagatcagcaatgccatcctcatcatctttgtcagctactttggcagccgggtgcaccgtccacgtctgattggcatcggaggtctcttcctggctgcaggtgccttcatcctcaccctcccacacttcctctccgagccctaccagtacaccttggccagcactgggaacaacagccgcttgcaggccgagctctgccagaagcattggcaggacctgcctcccagtaagtgccacagcaccacccagaacccccagaaggagaccagcagcatgtggggcctgatggtggttgcccagctgctggctggcatcgggacagtgcctattcagccatttgggatctcctatgtggatgacttctcagagcccagcaactcgcccctgtacatctccatcttatttgccatctctgtatttggaccggctttcgggtacctgctgggctctgtcatgctgcagatctttgtggactatggcagggtcaacacagctgcagttaacttggtcccgggtgacccccgatggattggagcctggtggctaggcctgctcatttcttcagctttattggttctcacctctttccccttttttttcttccctcgagcaatgcccataggagcaaagagggctcctgccacagcagatgaagcaaggaagttggaggaggccaagtcaagaggctccctggtggatttcattaaacggtttccatgcatctttctgaggctcctgatgaactcactcttcgtcctggtggtcctggcccagtgcaccttctcctccgtcattgctggcctctccaccttcctcaacaagttcctggagaagcagtatggcacctcagcagcctatgccaacttcctcattggtgctgtgaacctccctgctgcagccttggggatgctgtttggaggaatcctcatgaagcgctttgttttctctctacaagccattccccgcatagctaccaccatcatcaccatctccatgatcctttgtgttcctttgttcttcatgggatgctccaccccaactgtggccgaagtctacccccctagcacatcaagttctatacatccgcagtctcctgcctgccgcagggactgctcgtgcccagattctatcttccacccggtctgtggagacaatggaatcgagtacctctccccttgccatgccggctgcagcaacatcaacatgagctctgcaacctccaagcaactgatctatttgaactgcagctgtgtgaccgggggatccgcttcagcaaagacaggatcgtgccctgtcccctgtgcccacttcctgctcccggccatcttcctcatctccttcgtgtccctgatagcctgcatctcccacaaccccctctacatgatggttctgcgtgtggtgaaccaggaggaaaagtcatttgccatcggggtgcagttcttgttgatgcgcttgctggcctggctgccatctccagccctctatggcctcaccattgaccactcctgcatccggtggaactcgctgtgcttggggaggcgaggggcctgcgcctactatgacaacgatgctctccgagacaggtacctgggcctgcagatgggctacaaggcgctgggcatgctgctgctttgcttcatcagctggagggtgaagaagaacaaggagtacaacgtgcagaaggcggcaggcctcatctgaccccaccctgggccactgccctgctccagagagtggaccttgactcttccacacctgcctatactcactaatgttaacacgtcatttcctttttgtatttttaaacaagaaagaaaaccccagtcctcatttgccttccctacctcttcctcccagagtcctccccacagttcctaagggccactgtgtacccgggctgtgtgggccagaactggggggctgagtcttccctggccccttggaagaggcccccagatgcccaggctcacttcagtgttgagtcctccattgaggatgcccactgaggcagccaggcccctcaccagccctggggggaatcctaaacagagagagaaaaagggtatctgcccttcttgccaggcagctccactctcccgctgactgcccacaccctgcagagtggcaggggtgaaaggaagaaggaagtggctgagttattaatagccagagccactgggagactggggagactggctgtaacccccttcacacctgggtttggcatcagcacagactacgggaggggctggctccctccccctcagaccctcacttcctgtacctagaggccattctggatgctgccatgttgggaagtacagtctctgcccattacctgcatgcaggcaccagagcagggactgagaaaccccaaggatgggtcatctaagtgctgtccatatgaaccctggactttctgtccttagatcctcacatgttatccctgtctttctggggtacgtttcaaactgaggaagctacaacacagtgaagacccaaggaaggcctatgaaaaggtcctgatgcccaacctcccaccccttcaatgtggggacgagaccccctcatctcagagtaatgggaagaacctcccacatctccctggcagcagatgaggtggcttcacatgcacttccctgtctggacttcagcccgtattccgaggagtagagaggcagaagagatgtcagcaaagcaagtgatgaagcagagtggatgtccactgtcaccaagctggatggcaagctgcggcccacaaaacagccagtcaggttggctttcctggtttcagacatgctcataccattcccattttctcagcctcttctcactgcctccagagaggtgggtgcctgggttgagagacacagctgctacgtgatagatgttgagagacagaagccaacgaaggaggtcattcatcaacaaatatatttattggagaccgactttgtgcaaagcaatgctaatcagggttctccatggagcttccctcagctcttacctcacctccctccatttacattagggccttctcccagggtgtgctcggtgggcagtgtgggactgggggtgtgggagttggtgagagcaggaggagaggtggggacagcaagaagccacagattggcatgaaggatcctgacctgactatccatgccatccatggcccccagactgactctgcacctggccctttgccagacagctctgtctccccatgtcctctggaacagctgggcatgggtcatggccattcatgacccttaagtgccacccttcttggaagaccccctccagaagcatactggaagccacctctggaaaagcctcatatggtgatatgccaaaatatttatgtcaatgtccaaacaaagtccaatgccatgagactgaagtctttgtggaaaccactgttacagacaagcttatttccaaagccacctcatttccaaacatctcactcaggaagggaggctcaatgtaacctcaggggccagttttagcatttgaaatggttctgcttggaaaatgatgccctgcaactaaccctggtctttcccatggcaatttaaccacatttggaaggcactgccttcagctgagtttatgaacaatgaatgccaaccttcaggttctagaagattggttgcactcccaaacctttattctattatattactattaaaatattctaattttgctattgaggtaa

SEQ ID NO: 184747 - DNA, 1918 bp, Homo sapiens
  Payload ID: 16381
  Gene Symbol: SLCO2A1
  Gene Name: solute carrier organic anion transporter family, member 2A1
  ENST ID: ENST00000493729
  CDS Start-End: 113-1816
cgcgaatctcctccggccactgccgccgcggtcgcctctcacccgcccggccgctccagcccgaggcgccccgaccccgcgccactccgcgcccggccagccgcccgcagccatggggctcctgcccaagctcggcgcgtcccagggcagcgacacctctactagccgagccggccgctgtgcccgctcggtcttcggcaacattaaggtgtttgtgctctgccaaggcctcctgcagctctgccaactcctgtacagcgcctacttcaagagcagcctcaccaccattgagaagcgctttgggctctccagttcttcatcgggtctcatttccagcttgaatgagatcagcaatgccatcctcatcatctttgtcagctactttggcagccgggtgcaccgtccacgtctgattggcatcggaggtctcttcctggctgcaggtgccttcatcctcaccctcccacacttcctctccgagccctaccagtacaccttggccagcactgccatcttatttgccatctctgtatttggaccggctttcgggtacctgctgggctctgtcatgctgcagatctttgtggactatggcagggtcaacacagctgcagttaacttggtcccgggtgacccccgatggattggagcctggtggctaggcctgctcatttcttcagctttattggttctcacctctttccccttttttttcttccctcgagcaatgcccataggagcaaagagggctcctgccacagcagatgaagcaaggaagttggaggaggccaagtcaagaggctccctggtggatttcattaaacggtttccatgcatctttctgaggctcctgatgaactcactcttcgtcctggtggtcctggcccagtgcaccttctcctccgtcattgctggcctctccaccttcctcaacaagttcctggagaagcagtatggcacctcagcagcctatgccaacttcctcattggtgctgtgaacctccctgctgcagccttggggatgctgtttggaggaatcctcatgaagcgctttgttttctctctacaagccattccccgcatagctaccaccatcatcaccatctccatgatcctttgtgttcctttgttcttcatgggatgctccaccccaactgtggccgaagtctacccccctagcacatcaagttctatacatccgcagtctcctgcctgccgcagggactgctcgtgcccagattctatcttccacccggtctgtggagacaatggaatcgagtacctctccccttgccatgccggctgcagcaacatcaacatgagctctgcaacctccaagcaactgatctatttgaactgcagctgtgtgaccgggggatccgcttcagcaaagacaggatcgtgccctgtcccctgtgcccacttcctgctcccggccatcttcctcatctccttcgtgtccctgatagcctgcatctcccacaaccccctctacatgatggttctgcgtgtggtgaaccaggaggaaaagtcatttgccatcggggtgcagttcttgttgatgcgcttgctggcctggctgccatctccagccctctatggcctcaccattgaccactcctgcatccggtggaactcgctgtgcttggggaggcgaggggcctgcgcctactatgacaacgatgctctccgagacaggtacctgggcctgcagatgggctacaaggcgctgggcatgctgctgctttgcttcatcagctggagggtgaagaagaacaaggagtacaacgtgcagaaggcggcaggcctcatctgaccccaccctgggccactgccctgctccagagagtggaccttgactcttccacacctgcctatactcactaatgttaacacgtcatttcctttttgtattttt

SEQ ID NO: 184748 - DNA, 1937 bp, Homo sapiens
  Payload ID: 16381
  Gene Symbol: SLCO2A1
  Gene Name: solute carrier organic anion transporter family, member 2A1
  ENST ID: ENST00000481359
  CDS Start-End: 122-1369
tctccgctccgcgaatctcctccggccactgccgccgcggtcgcctctcacccgcccggccgctccagcccgaggcgccccgaccccgcgccactccgcgcccggccagccgcccgcagccatggggctcctgcccaagctcggcgcgtcccagggcagcgacacctctactagccgagccggccgctgtgcccgctcggtcttcggcaacattaaggtgtttgtgctctgccaaggcctcctgcagctctgccaactcctgtacagcgcctacttcaagagcagcctcaccaccattgagaagcgctttgggctctccagttcttcatcgggtctcatttccagcttgaatgagatcagcaatgccatcctcatcatctttgtcagctactttggcagccgggtgcaccgtccacgtctgattggcatcggaggtctcttcctggctgcaggtgccttcatcctcaccctcccacacttcctctccgagccctaccagtacaccttggccagcactgggaacaacagccgcttgcaggccgagctctgccagaagcattggcaggacctgcctcccagtaagtgccacagcaccacccagaacccccagaaggagaccagcagcatgtggggcctgatggtggttgcccagctgctggctggcatcgggacagtgcctattcagccatttgggatctcctatgtggatgacttctcagagcccagcaactcgcccctgtacatctccatcttatttgccatctctgtatttggaccggctttcgggtacctgctgggctctgtcatgctgcagatctttgtggactatggcagggtcaacacagctgcagttaacttggtcccgggtgacccccgatggattggagcctggtggctaggcctgctcatttcttcagctttattggttctcacctctttccccttttttttcttccctcgagcaatgcccataggagcaaagagggctcctgccacagcagatgaagcaaggaagttggaggaggccaagtcaagaggctccctggtggatttcattaaacggtttccatgcatctttctgaggctcctgatgaactcactcttcgtcctggtggtcctggcccagtgcaccttctcctccgtcattgctggcctctccaccttcctcaacaagttcctggagaagcagtatggcacctcagcagcctatgccaacttcctcattgcacatcaagttctatacatccgcagtctcctgcctgccgcagggactgctcgtgcccagattctatcttccacccggtctgtggagacaatggaatcgagtacctctccccttgccatgccggctgcagcaacatcaacatgagctctgcaacctccaagcaactgatctatttgaactgcagctgtgtgaccgggggatccgcttcagcaaagacaggatcgtgccctgtcccctgtgcccacttcctgctcccggccatcttcctcatctccttcgtgtccctgatagcctgcatctcccacaaccccctctacatgatggttctgcgtgtggtgaaccaggaggaaaagtcatttgccatcggggtgcagttcttgttgatgcgcttgctggcctggctgccatctccagccctctatggcctcaccattgaccactcctgcatccggtggaactcgctgtgcttggggaggcgaggggcctgcgcctactatgacaacgatgctctccgagacaggtacctgggcctgcagatgggctacaaggcgctgggcatgctgctgctttgcttcatcagctggagggtgaagaagaacaaggagtacaacgtgcagaaggcggcaggcctcatctgaccccaccctgggccactgccctgctccagagagtggaccttgactcttccacacctgcctatactcactaatgt

SEQ ID NO: 184749 - DNA, 4494 bp, Homo sapiens
  Payload ID: 16382
  Gene Symbol: SLCO2B1
  Gene Name: solute carrier organic anion transporter family, member 2B1
  ENST ID: ENST00000289575
  CDS Start-End: 396-2525
aaaaggacaggctgaggctgagcctcagggaggcggggtgcagcttcctcttcacagagaggctggacttgaacaaacccagccttctatacaaccgtggagccagggcaagggagagacagaaggagcaagtgacccagggagacaaacacttggagatacttggggctgagtttgagcaagactccctaacctgtgtctggacaagtctgatgtcctgtgtggcccaagaagaactgaccccgtgtctggagctcccaccgttattgcatccctgctgtggctcacctgctgctgtctccaggagcccctgagaagatttgcttcctctcccctgctaagctccaggtcctgagattaaattaggggctggagctcactgcactccagcagtcatgggacccaggatagggccagcgggtgaggtaccccaggtaccagacaaggaaaccaaagccacaatgggcacagaaaacacacctggaggcaaagccagcccagaccctcaggacgtgcggccaagtgtgttccataacatcaagctgttcgttctgtgccacagcctgctgcagctggcgcagctcatgatctccggctacctaaagagctccatctccacagtggagaagcgcttcggcctctccagccagacgtcggggctgctggcctccttcaacgaggtggggaacacagccttgattgtgtttgtgagctattttggcagccgggtgcaccgaccccgaatgattggctatggggctatccttgtggccctggcgggcctgctcatgactctcccgcacttcatctcggagccataccgctacgacaacaccagccctgaggatatgccacaggacttcaaggcttccctgtgcctgcccacaacctcggccccagcctcggccccctccaatggcaactgctcaagctacacagaaacccagcatctgagtgtggtggggatcatgttcgtggcacagaccctgctgggcgtgggcggggtgcccattcagccctttggcatctcctacatcgatgactttgcccacaacagcaactcgcccctctacctcgggatcctgtttgcagtgaccatgatggggccaggcctggcctttgggctgggcagcctcatgctgcgcctttatgtggacattaaccagatgccagaaggtggtatcagcctgaccataaaggacccccgatgggtgggtgcctggtggctgggtttcctcatcgctgccggtgcagtggccctggctgccatcccctacttcttcttccccaaggaaatgcccaaggaaaaacgtgagcttcagtttcggcgaaaggtcttagcagtcacagactcacctgccaggaagggcaaggactctccctctaagcagagccctggggagtccacgaagaagcaggatggcctagtccagattgcaccaaacctgactgtgatccagttcattaaagtcttccccagggtgctgctgcagaccctacgccaccccatcttcctgctggtggtcctgtcccaggtatgcttgtcatccatggctgcgggcatggccaccttcctgcccaagttcctggagcgccagttttccatcacagcctcctacgccaacctgctcatcggctgcctctccttcccttcggtcatcgtgggcatcgtggtgggtggcgtcctggtcaagcggctccacctgggccctgtgggatgcggtgccctttgcctgctggggatgctgctgtgcctcttcttcagcctgccgctcttctttatcggctgctccagccaccagattgcgggcatcacacaccagaccagtgcccaccctgggctggagctgtctccaagctgcatggaggcctgctcctgcccattggacggctttaaccctgtctgcgaccccagcactcgtgtggaatacatcacaccctgccacgcaggctgctcaagctgggtggtccaggatgctctggacaacagccaggttttctacaccaactgcagctgcgtggtggagggcaaccccgtgctggcaggatcctgcgactcaacgtgcagccatctggtggtgcccttcctgctcctggtcagcctgggctcggccctggcctgtctcacccacacaccctccttcatgctcatcctaagaggagtgaagaaagaagacaagactttggctgtgggcatccagttcatgttcctgaggattttggcctggatgcccagccccgtgatccacggcagcgccatcgacaccacctgtgtgcactgggccctgagctgtgggcgtcgagctgtctgtcgctactacaataatgacctgctccgaaaccggttcatcggcctccagttcttcttcaaaacaggttctgtgatctgcttcgccttagttttggctgtcctgaggcagcaggacaaagaggcaaggaccaaagagagcagatccagccctgccgtagagcagcaattgctagtgtcggggccagggaagaagccagaggattcccgagtgtgagctgtcttggggccccacctggccaagagtagcagccacagcagtacctcctctgagtcctttgcccaagattgggtgtcaagagccctgtgttccattctggctcctccactaaattgctgtgtgacttcaggcaagacattgatcctctctcagcctttgcttgctagtctgaaccaaagagttgtttgggcatttgctgtgttggccatttctggagcaagagggtcttcttcctccttcccccagccagccagctgtcctggggccaggctttcctgggtggaaagaagtatacctttccctggggccctaggatagcaaagtgagccatagtgggccaggctgccctccatgctgggccccagcccaggtctgcactcgcctggatcaccttctttgagccttagccatctcctgtcaggtaggaatgaacttgccagccttcaggctcgttcagctatgaccatctgtgcggtcagggtacactcagctctcctccccaactccagcagcctttaagaagtgtccctttggcgccccctggaggcagagcactgagctggaccctgggtagactcccacagggaggacggagctggcctcaggagtgggacacccagacttggcagggccttcaagaggcctgtgtgggggccccaggaatccttagctgaagcggggagactcactctccatctcaggaaattctagcccttgccctcagggagccacggttgagggtgaggcccaacacctgccttagggccctgggtgggcaagtctgggccctggggtagggagggagactcaggcccacacttgggtattttctaatttcagacaaacacacactcagcgcgcactcactgattcctacacattgccaagatttcacacatgtgaccaggggccaccaaagtccctgtgacctttgtgactaggatcctaatttctctattttctcctgggtgcctgggtctgtgtcacctggggcagtgtggataatgtttagttctgtgacactgttttttgggggtggcacctggttctccgatgcctgggctggtgtcaggcccaggactgtagtgctgggagcagtaaagctcagctctgtgtaatgagtgatgctatggcttgctcgtgtcttatgatccaatccttttctacatcagcccttgttttgttttatggctagtcttatctggcctggttatttccttgcggggaggagagggtttgctaatctgctcccagcccaacctattaccaccccacctcgctgggacctactgctcgggaggcagcagacagggagccaccagcagtggcttcctggccctgtgctgggggtggggggaagctgggggcacatgtggcccttgccttctgagcagctcccagtgccagggctttgagactttcccacatgataaaagaaaagggaggtacagaagttccaattccctttttattttgctggttggtatctgtaaatgtttaataaatatctgagcatgtatctatcaacgccaagaatttcaaagtctccttcaacaatatgaggcttttaggatgtttatattccttcatccctcttgtttcccaggttttgcagggaaaaaaagtctggaattatagatacagcttattattaaatttgttcttgcataatgtctcttctattacaaaaattctttcttcataaactgcattagaggtttgcaacaaccacatcatttccattaacttagatttaggttttactggattcattgctcaccattattgcttgtatattacatcttttccaatctttatattctggtctaatttttgtttgagtgtcttcgtctactaatggtttcaaaaatggaataaggtcatgaggatttctgaatcctcacctgtccaaattgtcattcacattttatagaagaggaaactggctcagaaagcacaagtgact

SEQ ID NO: 184750 - DNA, 2368 bp, Homo sapiens
  Payload ID: 16382
  Gene Symbol: SLCO2B1
  Gene Name: solute carrier organic anion transporter family, member 2B1
  Uniprot ID: O94956
  ENST ID: ENST00000428359
  CDS Start-End: 168-2231
atatctctaaaggataaagtactcccaggaaggctttgagccttggcagaaaaggctgggattgaagcttcagggagagccagaggtgaggctggagtgggagatcacctgaggcagggccagcgggtgaggtaccccaggtaccagacaaggaaaccaaagccacaatgggcacagaaaacacacctggaggcaaagccagcccagaccctcaggacgtgcggccaagtgtgttccataacatcaagctgttcgttctgtgccacagcctgctgcagctggcgcagctcatgatctccggctacctaaagagctccatctccacagtggagaagcgcttcggcctctccagccagacgtcggggctgctggcctccttcaacgaggtggggaacacagccttgattgtgtttgtgagctattttggcagccgggtgcaccgaccccgaatgattggctatggggctatccttgtggccctggcgggcctgctcatgactctcccgcacttcatctcggagccataccgctacgacaacaccagccctgaggatatgccacaggacttcaaggcttccctgtgcctgcccacaacctcggccccagcctcggccccctccaatggcaactgctcaagctacacagaaacccagcatctgagtgtggtggggatcatgttcgtggcacagaccctgctgggcgtgggcggggtgcccattcagccctttggcatctcctacatcgatgactttgcccacaacagcaactcgcccctctacctcgggatcctgtttgcagtgaccatgatggggccaggcctggcctttgggctgggcagcctcatgctgcgcctttatgtggacattaaccagatgccagaaggtggtatcagcctgaccataaaggacccccgatgggtgggtgcctggtggctgggtttcctcatcgctgccggtgcagtggccctggctgccatcccctacttcttcttccccaaggaaatgcccaaggaaaaacgtgagcttcagtttcggcgaaaggtcttagcagtcacagactcacctgccaggaagggcaaggactctccctctaagcagagccctggggagtccacgaagaagcaggatggcctagtccagattgcaccaaacctgactgtgatccagttcattaaagtcttccccagggtgctgctgcagaccctacgccaccccatcttcctgctggtggtcctgtcccaggtatgcttgtcatccatggctgcgggcatggccaccttcctgcccaagttcctggagcgccagttttccatcacagcctcctacgccaacctgctcatcggctgcctctccttcccttcggtcatcgtgggcatcgtggtgggtggcgtcctggtcaagcggctccacctgggccctgtgggatgcggtgccctttgcctgctggggatgctgctgtgcctcttcttcagcctgccgctcttctttatcggctgctccagccaccagattgcgggcatcacacaccagaccagtgcccaccctgggctggagctgtctccaagctgcatggaggcctgctcctgcccattggacggctttaaccctgtctgcgaccccagcactcgtgtggaatacatcacaccctgccacgcaggctgctcaagctgggtggtccaggatgctctggacaacagccaggttttctacaccaactgcagctgcgtggtggagggcaaccccgtgctggcaggatcctgcgactcaacgtgcagccatctggtggtgcccttcctgctcctggtcagcctgggctcggccctggcctgtctcacccacacaccctccttcatgctcatcctaagaggagtgaagaaagaagacaagactttggctgtgggcatccagttcatgttcctgaggattttggcctggatgcccagccccgtgatccacggcagcgccatcgacaccacctgtgtgcactgggccctgagctgtgggcgtcgagctgtctgtcgctactacaataatgacctgctccgaaaccggttcatcggcctccagttcttcttcaaaacaggttctgtgatctgcttcgccttagttttggctgtcctgaggcagcaggacaaagaggcaaggaccaaagagagcagatccagccctgccgtagagcagcaattgctagtgtcggggccagggaagaagccagaggattcccgagtgtgagctgtcttggggccccacctggccaagagtagcagccacagcagtacctcctctgagtcctttgcccaagattgggtgtcaagagccctgtgttccattctggctcctccactaaattgctgtgtgacttcaggcaa

SEQ ID NO: 184751 - DNA, 3219 bp, Homo sapiens
  Payload ID: 16382
  Gene Symbol: SLCO2B1
  Gene Name: solute carrier organic anion transporter family, member 2B1
  Uniprot ID: O94956
  ENST ID: ENST00000454962
  CDS Start-End: 249-1697
ccaagaagaactgaccccgtgtctggagctcccaccgttattgcatccctgctgtggctcacctgctgctgtctccaggagcccctgagaagatttgcttcctctcccctgctaagctccaggtcctgagattaaattaggggctggagctcactgcactccagcagtcatgggacccaggataggtggggaacacagccttgattgtgtttgtgagctattttggcagccgggtgcaccgaccccgaatgattggctatggggctatccttgtggccctggcgggcctgctcatgactctcccgcacttcatctcggagccataccgctacgacaacaccagccctggtggtatcagcctgaccataaaggacccccgatgggtgggtgcctggtggctgggtttcctcatcgctgccggtgcagtggccctggctgccatcccctacttcttcttccccaaggaaatgcccaaggaaaaacgtgagcttcagtttcggcgaaaggtcttagcagtcacagactcacctgccaggaagggcaaggactctccctctaagcagagccctggggagtccacgaagaagcaggatggcctagtccagattgcaccaaacctgactgtgatccagttcattaaagtcttccccagggtgctgctgcagaccctacgccaccccatcttcctgctggtggtcctgtcccaggtatgcttgtcatccatggctgcgggcatggccaccttcctgcccaagttcctggagcgccagttttccatcacagcctcctacgccaacctgctcatcggctgcctctccttcccttcggtcatcgtgggcatcgtggtgggtggcgtcctggtcaagcggctccacctgggccctgtgggatgcggtgccctttgcctgctggggatgctgctgtgcctcttcttcagcctgccgctcttctttatcggctgctccagccaccagattgcgggcatcacacaccagaccagtgcccaccctgggctggagctgtctccaagctgcatggaggcctgctcctgcccattggacggctttaaccctgtctgcgaccccagcactcgtgtggaatacatcacaccctgccacgcaggctgctcaagctgggtggtccaggatgctctggacaacagccaggttttctacaccaactgcagctgcgtggtggagggcaaccccgtgctggcaggatcctgcgactcaacgtgcagccatctggtggtgcccttcctgctcctggtcagcctgggctcggccctggcctgtctcacccacacaccctccttcatgctcatcctaagaggagtgaagaaagaagacaagactttggctgtgggcatccagttcatgttcctgaggattttggcctggatgcccagccccgtgatccacggcagcgccatcgacaccacctgtgtgcactgggccctgagctgtgggcgtcgagctgtctgtcgctactacaataatgacctgctccgaaaccggttcatcggcctccagttcttcttcaaaacaggttctgtgatctgcttcgccttagttttggctgtcctgaggcagcaggacaaagaggcaaggaccaaagagagcagatccagccctgccgtagagcagcaattgctagtgtcggggccagggaagaagccagaggattcccgagtgtgagctgtcttggggccccacctggccaagagtagcagccacagcagtacctcctctgagtcctttgcccaagattgggtgtcaagagccctgtgttccattctggctcctccactaaattgctgtgtgacttcaggcaagacattgatcctctctcagcctttgcttgctagtctgaaccaaagagttgtttgggcatttgctgtgttggccatttctggagcaagagggtcttcttcctccttcccccagccagccagctgtcctggggccaggctttcctgggtggaaagaagtatacctttccctggggccctaggatagcaaagtgagccatagtgggccaggctgccctccatgctgggccccagcccaggtctgcactcgcctggatcaccttctttgagccttagccatctcctgtcaggtaggaatgaacttgccagccttcaggctcgttcagctatgaccatctgtgcggtcagggtacactcagctctcctccccaactccagcagcctttaagaagtgtccctttggcgccccctggaggcagagcactgagctggaccctgggtagactcccacagggaggacggagctggcctcaggagtgggacacccagacttggcagggccttcaagaggcctgtgtgggggccccaggaatccttagctgaagcggggagactcactctccatctcaggaaattctagcccttgccctcagggagccacggttgagggtgaggcccaacacctgccttagggccctgggtgggcaagtctgggccctggggtagggagggagactcaggcccacacttgggtattttctaatttcagacaaacacacactcagcgcgcactcactgattcctacacattgccaagatttcacacatgtgaccaggggccaccaaagtccctgtgacctttgtgactaggatcctaatttctctattttctcctgggtgcctgggtctgtgtcacctggggcagtgtggataatgtttagttctgtgacactgttttttgggggtggcacctggttctccgatgcctgggctggtgtcaggcccaggactgtagtgctgggagcagtaaagctcagctctgtgtaatgagtgatgctatggcttgctcgtgtcttatgatccaatccttttctacatcagcccttgttttgttttatggctagtcttatctggcctggttatttccttgcggggaggagagggtttgctaatctgctcccagcccaacctattaccaccccacctcgctgggacctactgctcgggaggcagcagacagggagccaccagcagtggcttcctggccctgtgctgggggtggggggaagctgggggcacatgtggcccttgccttctgagcagctcccagtgccagggctttgagactttcccacatgataaaagaaaagggaggtacagaagttccaattccctttttattttgctggttggtatctgtaaatgtttaataaatatctgagcatgta

SEQ ID NO: 184752 - DNA, 373 bp, Homo sapiens
  Payload ID: 16382
  Gene Symbol: SLCO2B1
  Gene Name: solute carrier organic anion transporter family, member 2B1
  ENST ID: ENST00000534004
  CDS Start-End: 243-373
atttgggcaaggccccacttgctcccagaagcccagcagggagagcttcataggccatggagacagacccagctgaggagcagctgcagggactccaggagaacgcagccatggcttggggactgcagtacggcaggaagggtgggatggatgcctcctctcggggcacctcacaggacagatgagaatgagggccagcgggtgaggtaccccaggtaccagacaaggaaaccaaagccacaatgggcacagaaaacacacctggaggcaaagccagcccagaccctcaggacgtgcggccaagtgtgttccataacatcaagctgttcgttctgtgccacagcctgctgcagctggcgcagctcatgatctc

SEQ ID NO: 184753 - DNA, 274 bp, Homo sapiens
  Payload ID: 16382
  Gene Symbol: SLCO2B1
  Gene Name: solute carrier organic anion transporter family, member 2B1
  ENST ID: ENST00000525845
  CDS Start-End: 144-274
aaacagccatatctctaaaggataaagtactcccaggaaggctttgagccttggcagaaaaggctgggattgaagcttcagggagagccagagggccagcgggtgaggtaccccaggtaccagacaaggaaaccaaagccacaatgggcacagaaaacacacctggaggcaaagccagcccagaccctcaggacgtgcggccaagtgtgttccataacatcaagctgttcgttctgtgccacagcctgctgcagctggcgcagctcatgatctc

SEQ ID NO: 184754 - DNA, 578 bp, Homo sapiens
  Payload ID: 16382
  Gene Symbol: SLCO2B1
  Gene Name: solute carrier organic anion transporter family, member 2B1
  ENST ID: ENST00000531713
  CDS Start-End: 316-578
aactgcagactgggaggttactaagtccttagcagctgagtacagaacacgatggaaatgaaaacatggtacaacagaggttacagccctctcctgacctgataaacttcatgatggagctaaagatggtttgggaagtttctttgaatcacaagcagaactgtatgtgctgtctcctcctgtctggatctactcactacttgctaaagagaagaattttggtttgggataaatttatgtggatcttcgctttggtgccataaagggccagcgggtgaggtaccccaggtaccagacaaggaaaccaaagccacaatgggcacagaaaacacacctggaggcaaagccagcccagaccctcaggacgtgcggccaagtgtgttccataacatcaagctgttcgttctgtgccacagcctgctgcagctggcgcagctcatgatctccggctacctaaagagctccatctccacagtggagaagcgcttcggcctctccagccagacgtcggggctgctggcctccttcaacgaggtggggaacacagccttgattgtgtttgtgagctattttggcag

SEQ ID NO: 184755 - DNA, 577 bp, Homo sapiens
  Payload ID: 16382
  Gene Symbol: SLCO2B1
  Gene Name: solute carrier organic anion transporter family, member 2B1
  ENST ID: ENST00000534186
  CDS Start-End: 197-577
agccatatctctaaaggataaagtactcccaggaaggctttgagccttggcagaaaaggctgggattgaagcttcagggagagccagaggtgaggctggagtgggagatcacctgaggcaggtgagcaggctccatgagtgggcagggccagcgggtgaggtaccccaggtaccagacaaggaaaccaaagccacaatgggcacagaaaacacacctggaggcaaagccagcccagaccctcaggacgtgcggccaagtgtgttccataacatcaagctgttcgttctgtgccacagcctgctgcagctggcgcagctcatgatctccggctacctaaagagctccatctccacagtggagaagcgcttcggcctctccagccagacgtcggggctgctggcctccttcaacgaggtggggaacacagccttgattgtgtttgtgagctattttggcagccgggtgcaccgaccccgaatgattggctatggggctatccttgtggccctggcgggcctgctcatgactctcccgcacttcatctcggagccataccgctacgacaacaccagccct

SEQ ID NO: 184756 - DNA, 2593 bp, Homo sapiens
  Payload ID: 16382
  Gene Symbol: SLCO2B1
  Gene Name: solute carrier organic anion transporter family, member 2B1
  ENST ID: ENST00000532236
  CDS Start-End: 401-2182
aaacccagccttctatacaaccgtggagccagggcaagggagagacagaaggagcaagtgacccagggagacaaacacttggagatacttggggctgagtttgagcaagactccctaacctgtgtctggacaagtctgatgtcctgtgtggcccaagaagaactgaccccgtgtctggagctcccaccgttattgcatccctgctgtggctcacctgctgctgtctccaggagcccctgagaagatttgcttcctctcccctgctaagctccaggtcctgagattaaattaggggctggagctcactgcactccagcagtcatgggacccaggataggtggggaacacagccttgattgtgtttgtgagctattttggcagccgggtgcaccgaccccgaatgattggctatggggctatccttgtggccctggcgggcctgctcatgactctcccgcacttcatctcggagccataccgctacgacaacaccagccctgaggatatgccacaggacttcaaggcttccctgtgcctgcccacaacctcggccccagcctcggccccctccaatggcaactgctcaagctacacagaaacccagcatctgagtgtggtggggatcatgttcgtggcacagaccctgctgggcgtgggcggggtgcccattcagccctttggcatctcctacatcgatgactttgcccacaacagcaactcgcccctctacctcgggatcctgtttgcagtgaccatgatggggccaggcctggcctttgggctgggcagcctcatgctgcgcctttatgtggacattaaccagatgccagaaggtggtatcagcctgaccataaaggacccccgatgggtgggtgcctggtggctgggtttcctcatcgctgccggtgcagtggccctggctgccatcccctacttcttcttccccaaggaaatgcccaaggaaaaacgtgagcttcagtttcggcgaaaggtcttagcagtcacagactcacctgccaggaagggcaaggactctccctctaagcagagccctggggagtccacgaagaagcaggatggcctagtccagattgcaccaaacctgactgtgatccagttcattaaagtcttccccagggtgctgctgcagaccctacgccaccccatcttcctgctggtggtcctgtcccaggtatgcttgtcatccatggctgcgggcatggccaccttcctgcccaagttcctggagcgccagttttccatcacagcctcctacgccaacctgctcatcggctgcctctccttcccttcggtcatcgtgggcatcgtggtgggtggcgtcctggtcaagcggctccacctgggccctgtgggatgcggtgccctttgcctgctggggatgctgctgtgcctcttcttcagcctgccgctcttctttatcggctgctccagccaccagattgcgggcatcacacaccagaccagtgcccaccctgggctggagctgtctccaagctgcatggaggcctgctcctgcccattggacggctttaaccctgtctgcgaccccagcactcgtgtggaatacatcacaccctgccacgcaggctgctcaagctgggtggtccaggatgctctggacaacagccaggttttctacaccaactgcagctgcgtggtggagggcaaccccgtgctggcaggatcctgcgactcaacgtgcagccatctggtggtgcccttcctgctcctggtcagcctgggctcggccctggcctgtctcacccacacaccctccttcatgctcatcctaagaggagtgaagaaagaagacaagactttggctgtgggcatccagttcatgttcctgaggattttggcctggatgcccagccccgtgatccacggcagcgccatcgacaccacctgtgtgcactgggccctgagctgtgggcgtcgagctgtctgtcgctactacaataatgacctgctccgaaaccggttcatcggcctccagttcttcttcaaaacaggttctgtgatctgcttcgccttagttttggctgtcctgaggcagcaggacaaagaggcaaggaccaaagagagcagatccagccctgccgtagagcagcaattgctagtgtcggggccagggaagaagccagaggattcccgagtgtgagctgtcttggggccccacctggccaagagtagcagccacagcagtacctcctctgagtcctttgcccaagattgggtgtcaagagccctgtgttccattctggctcctccactaaattgctgtgtgacttcaggcaagacattgatcctctctcagcctttgcttgctagtctgaaccaaagagttgtttgggcatttgctgtgttggccatttctggagcaagagggtcttcttcctccttcccccagccagccagctgtcctggggccaggctttcctgggtggaaagaagtatacctttccctggggccctaggatagcaaagtgagccatagtgggccaggctgccctccatgctgggccccagcccaggtctgcactcgcctggatcaccttctttgagccttagc

SEQ ID NO: 184757 - DNA, 649 bp, Homo sapiens
  Payload ID: 16382
  Gene Symbol: SLCO2B1
  Gene Name: solute carrier organic anion transporter family, member 2B1
  ENST ID: ENST00000526839
  CDS Start-End: 1-444
gtggccctggcgggcctgctcatgactctcccgcacttcatctcggagccataccgctacgacaacaccagccctgaggatatgccacaggacttcaaggcttccctgtgcctgcccacaacctcggccccagcctcggccccctccaatggcaactgctcaagctacacagaaacccagcatctgagtgtggtggggatcatgttcgtggcacagaccctgctgggcgtgggcggggtgcccattcagccctttggcatctcctacatcgatgactttgcccacaacagcaactcgcccctctacctcgggatcctgtttgcagtgaccatgatggggccaggcctggcctttgggctgggcagcctcatgctgcgcctttatgtggacattaaccagatgccagaaggtgagcctcaggagcacatgtttgctagaccctagctaactgactgccactctcataggagacattgagccaggggacctcggttcaaatcctagcagcaccactgaccttgggcaagtctcttagcctctctgaacctcagctttctcatctgtgagataatctctgtcctgtctgtctcctaaagctgtgatcagagtccagcgagatggtggagataaactgtaaagtgccatcaaa

SEQ ID NO: 184758 - DNA, 224 bp, Homo sapiens
  Payload ID: 16382
  Gene Symbol: SLCO2B1
  Gene Name: solute carrier organic anion transporter family, member 2B1
  ENST ID: ENST00000530556
  CDS Start-End: 94-224
aacgaagaggcacacaggaggtcggagaacacaatatcaacagggccagcgggtgaggtaccccaggtaccagacaaggaaaccaaagccacaatgggcacagaaaacacacctggaggcaaagccagcccagaccctcaggacgtgcggccaagtgtgttccataacatcaagctgttcgttctgtgccacagcctgctgcagctggcgcagctcatgatctc

SEQ ID NO: 184759 - DNA, 2121 bp, Homo sapiens
  Payload ID: 16382
  Gene Symbol: SLCO2B1
  Gene Name: solute carrier organic anion transporter family, member 2B1
  ENST ID: ENST00000525650
  CDS Start-End: 268-1965
caagtgacccagggagacaaacacttggagatacttggggctgagtttgagcaagactccctaacctgtgtctggacaagtctgatgtcctgtgtggcccaagaagaactgaccccgtgtctggagctcccaccgttattgcatccctgctgtggctcacctgctgctgtctccaggagcccctgagaagatttgcttcctctcccctgctaagctccaggtcctgagattaaattaggggctggagctcactgcactccagcagtcatgggacccaggatagaggatatgccacaggacttcaaggcttccctgtgcctgcccacaacctcggccccagcctcggccccctccaatggcaactgctcaagctacacagaaacccagcatctgagtgtggtggggatcatgttcgtggcacagaccctgctgggcgtgggcggggtgcccattcagccctttggcatctcctacatcgatgactttgcccacaacagcaactcgcccctctacctcgggatcctgtttgcagtgaccatgatggggccaggcctggcctttgggctgggcagcctcatgctgcgcctttatgtggacattaaccagatgccagaaggtggtatcagcctgaccataaaggacccccgatgggtgggtgcctggtggctgggtttcctcatcgctgccggtgcagtggccctggctgccatcccctacttcttcttccccaaggaaatgcccaaggaaaaacgtgagcttcagtttcggcgaaaggtcttagcagtcacagactcacctgccaggaagggcaaggactctccctctaagcagagccctggggagtccacgaagaagcaggatggcctagtccagattgcaccaaacctgactgtgatccagttcattaaagtcttccccagggtgctgctgcagaccctacgccaccccatcttcctgctggtggtcctgtcccaggtatgcttgtcatccatggctgcgggcatggccaccttcctgcccaagttcctggagcgccagttttccatcacagcctcctacgccaacctgctcatcggctgcctctccttcccttcggtcatcgtgggcatcgtggtgggtggcgtcctggtcaagcggctccacctgggccctgtgggatgcggtgccctttgcctgctggggatgctgctgtgcctcttcttcagcctgccgctcttctttatcggctgctccagccaccagattgcgggcatcacacaccagaccagtgcccaccctgggctggagctgtctccaagctgcatggaggcctgctcctgcccattggacggctttaaccctgtctgcgaccccagcactcgtgtggaatacatcacaccctgccacgcaggctgctcaagctgggtggtccaggatgctctggacaacagccaggttttctacaccaactgcagctgcgtggtggagggcaaccccgtgctggcaggatcctgcgactcaacgtgcagccatctggtggtgcccttcctgctcctggtcagcctgggctcggccctggcctgtctcacccacacaccctccttcatgctcatcctaagaggagtgaagaaagaagacaagactttggctgtgggcatccagttcatgttcctgaggattttggcctggatgcccagccccgtgatccacggcagcgccatcgacaccacctgtgtgcactgggccctgagctgtgggcgtcgagctgtctgtcgctactacaataatgacctgctccgaaaccggttcatcggcctccagttcttcttcaaaacaggttctgtgatctgcttcgccttagttttggctgtcctgaggcagcaggacaaagaggcaaggaccaaagagagcagatccagccctgccgtagagcagcaattgctagtgtcggggccagggaagaagccagaggattcccgagtgtgagctgtcttggggccccacctggccaagagtagcagccacagcagtacctcctctgagtcctttgcccaagattgggtgtcaagagccctgtgttccattctggctcctccactaaattgctgtgtgacttcaggcaagacattgatcctctctcag

SEQ ID NO: 184760 - DNA, 546 bp, Homo sapiens
  Payload ID: 16382
  Gene Symbol: SLCO2B1
  Gene Name: solute carrier organic anion transporter family, member 2B1
  ENST ID: ENST00000527180
  CDS Start-End: 96-546
attttacccaatccctactcaagatgaagatggagatggagatggggccagcgggtgaggtaccccaggtaccagacaaggaaaccaaagccacaatgggcacagaaaacacacctggaggcaaagccagcccagaccctcaggacgtgcggccaagtgtgttccataacatcaagctgttcgttctgtgccacagcctgctgcagctggcgcagctcatgatctccggctacctaaagagctccatctccacagtggagaagcgcttcggcctctccagccagacgtcggggctgctggcctccttcaacgaggtggggaacacagccttgattgtgtttgtgagctattttggcagccgggtgcaccgaccccgaatgattggctatggggctatccttgtggccctggcgggcctgctcatgactctcccgcacttcatctcggagccataccgctacgacaacaccagccctgaggatatgccacaggacttcaaggcttccctgtgcctgcccacaacctcggccccagcctcggccccct

SEQ ID NO: 184761 - DNA, 5115 bp, Homo sapiens
  Payload ID: 16383
  Gene Symbol: SLCO3A1
  Gene Name: solute carrier organic anion transporter family, member 3A1
  Uniprot ID: Q9UIG8
  ENST ID: ENST00000318445
  CDS Start-End: 215-2347
ggaggaggaaggggcgatcgcggcggcggcggcggcggcgaggagctgtgccttccacctctccagccccggcaggacgggggcggccgccgcgaacccggggcggggacagcacgcagcctcgaggcgcgcacccccgcccggcagcggccccgacacccggggcgagcgggaaagcggcagcggcggcggcggcggcggcggcgggggaaggatgcaggggaagaagccgggcggttcgtcgggcggcggccggagcggcgagctgcagggggacgaggcgcagaggaacaagaaaaagaaaaagaaggtgtcctgcttttccaacatcaagatcttcctggtgtccgagtgcgccctgatgctggcgcagggcacggtgggcgcctacctggtgagcgtcctgaccaccctggagcgtaggttcaacctgcagagcgctgacgtgggtgtgatcgctagcagcttcgagatcgggaacctggcgctcatcctcttcgtgagctacttcggggcacgcgggcaccggccgcgcctgatcggctgcggcggcatcgtcatggcgctgggcgcgctgctgtcggcgctgcccgagttcctgacccaccagtacaagtacgaggcgggcgagatccgctggggcgccgagggccgcgacgtctgcgcagccaacggctcgggcggcgacgaggggcccgaccccgacctcatctgccgcaaccggacggctaccaacatgatgtacttgctgctcattggggcccaggtgctcctgggcatcggtgctacccctgtgcagcccctgggcgtctcctacatcgacgaccacgtgcggaggaaggactcctcgctctatataggaatcctgttcacgatgctggtatttggaccagcctgcgggtttatcctgggctctttctgtaccaaaatctacgtggatgcggtcttcattgacacaagtaacctggacatcactccggacgacccccgctggatcggagcctggtggggtggctttctgctctgcggtgccttactcttcttctcttccctcttgatgtttgggtttccacagtccctgcccccgcactcagagcccgccatggaaagcgagcaggccatgctctccgaaagagaatacgagagacccaagcccagcaacggggtcctgaggcaccccctggagccagacagcagtgcctcctgtttccagcagctgagagtgatcccgaaggtcaccaagcacctgctctcaaaccctgtgttcacctgcatcatcctggccgcctgcatggagattgcagtggtggctggcttcgctgcctttttggggaagtacctggagcagcagtttaacctcaccacctcttctgccaaccagctgcttgggatgactgcgatcccgtgtgcttgtctgggtatcttcctgggaggtcttttggtgaagaagctcagcctgtctgccctgggggccattcggatggccatgctcgtcaacctggtgtccactgcttgctacgtctccttcctcttcctgggctgcgacactggccctgtggctggggttactgttccctatggaaacagcacagcacctggctcagccctggacccctactcgccctgcaataataactgtgaatgccaaaccgattccttcactccagtgtgtggggcagatggcatcacctacctgtctgcctgctttgctggctgcaacagcacgaatctcacgggctgtgcgtgcctcaccaccgtccctgctgagaacgcaaccgtggttcctggaaaatgccccagtcctgggtgccaagaggccttcctcactttcctctgtgtgatgtgtatctgcagcctgatcggtgccatggcacagacaccctcagtcatcatcctcatcaggacagtcagccctgaactcaagtcttacgctttgggagttctttttctcctccttcgtttgttgggcttcatccctccacccctcatcttcggggctggcatcgactccacctgcctgttctggagcacgttctgtggggagcaaggcgcctgcgtcctctacgacaatgtggtctaccgatacctgtatgtcagcatcgccatcgcgctcaaatccttcgccttcatcctgtacaccaccacgtggcagtgcctgaggaaaaactataaacgctacatcaaaaaccacgagggcgggctgagcaccagtgagttctttgcctctactctgaccctagacaacctggggagggaccctgtgcccgcaaaccagacacataggacaaagtttatctataacctggaagaccatgagtggtgtgaaaacatggagtccgttttatagtgactaaaggagggctgaactctgtattagtaatccaagggtcatttttttcttaaaaaaagaaaaaaaggttccaaaaaaaaccaaaactcagtacacacacacaggcacagatgcacacacacgcagacagacacaccgactttgtcctttttctcagcatcagagccagacaggattcagaataaggagagaatgacatcgtgcggcagggtcctggaggccacttgcgcggctgggccacagagtctactttgaaggcacctcatggttttcaggatgctgacagctgcaagcaacaggcactgccaaattcagggaacagtggtggccagcttggaggatggacatttctggatacacatacacatacaaaacagaaaacattttttaaaagaagtttcctaaaataaaaaaaattaaaaaaaaaaaacccacaagttgaaaacattgccagattaagcactagtgacacaccccgtgccaccctcttcctccaggtgggggtgggggcgggcgcacaagtcggaggggtggaagcaccactcctctctctgactttcgcaatatgggtcactgtgtagacgactcacccagtctgcatgtggttcaaggccccagagttctctcagtgatgctaatgggtgatccgtgctggagtttgtaattggcacctctcaccagctccatttccatgttcaagactgagggcctgagggggagccaggtggggggccagcacctcccagtggcgggcatccaccttcccccagccccacagagtgacctcaggaagcagtaggcctcgcctggctatgactgacccggctcagagctggtgagacccaacgcagtccaagtcatttgcttacatttgccaaaaacattttgccatttttaaaagaaaaaaatacaatccatatgaatttcaaactgttgtatgtataatcctctaatactatttttaactacttctaaaatctgtgttaacccttcaagtcactaacacagttctctaggccggatttattatgctggttgcttttactttttttctccttttttaatgcaccaaaaatatgtgatacaagggatgcaattaacctattgtaattttcatcattttatcctcattcgaatattctacaaaaacaagaatatacaatgtgttacaagaagaaaaaaaaatgcttcaaaaagagagtgtatatgcagcctgcctttaaaagaatcacatttgagacaacaggggataatgtgatgaattgcaaatttgccttttagcttccttccccatgattcagtgatcactgtcacgggaaacccttttatattcatgcttgacattccaagaggcgttcttttcagcctgtggaggagacactcttagatgtgggtttgtgtgtatgggtgcaacacttccggggataggaaagaagaacagttccctaacacaagctgttaagaagtctgtagcatctctgataacgaatagacccacaagctcctggaagctgtcgtgtgtccaatgcgtgaaaatgtctgtgacattttcagtgttagtcttgaactaaggcccttgtctgtgtgttttgaaggtgggtgaacctcagagaatgaacctgttatgatttggggtaagaatcacgttggaaaacctctcgcaaccagcacactaggccttctacggccatttctgtaaggggacagagcttaggtaaaggcacacactcatacacacacaacaaagggccctgctaacttactcctcatgctgcttcagtgacctttgttcatgtcacattcctggcgctggaaaaaaaactcaaaggttgattggtttgctttttcaccttggacacatttgcattttacccacaaggcaaacaaaagaatcaggaagtaaaaaatggttgggagtgggacaggtatggtaccgaatttttaatgaacattgtaaatgaagaggcttgaatgacagcccaaatctagagaaggcactcagcaagaccaaccaaaagaaaagctgtgtcgtggtatggggccaccgtgatcagctacctggggcaggatgcttctgagacaggcctttcaactgcttagtgttagtatgtccttgcttatgaaaatggggacactcatcagtacgttaactactaaaggggagatggttctccaaccacttcataaaatatgtatgttctgttgttcctaaggctttgataatatcctgtacagattttggtttagttttgcaaatatattgctaataggtcactcttatagattattgcttggcccttcaaactcagtacacacacactgaggccctttgacctagtgttttatggaactatttgctttgagagaaaaaaaaaagaaagttttttaaactctttgcattttggattttttttcctaagattttaggatgaatgtgaaaaagatgttagaataacaggaagacaactccagggctgagttttatcagcaattgggtataaatttaaagaccgctgttgcaggatggctctgaattctgttgtgtcgtcttttaaaattttaattattctcatatagtaccgaacagaaaactcagtctagttttaatttgccttttgtgctctaaagaagcattgtacatacaacactagatccagcccctcgattatctgtttggtttcaagtgaatgaaaagatttcctggtaagatcattggatttacagaatacaaaaatgtacgggatggaataaacctagaaagtgaa

SEQ ID NO: 184762 - DNA, 2705 bp, Homo sapiens
  Payload ID: 16383
  Gene Symbol: SLCO3A1
  Gene Name: solute carrier organic anion transporter family, member 3A1
  Uniprot ID: Q9UIG8
  ENST ID: ENST00000424469
  CDS Start-End: 54-2132
ggggcgagcgggaaagcggcagcggcggcggcggcggcggcggcgggggaaggatgcaggggaagaagccgggcggttcgtcgggcggcggccggagcggcgagctgcagggggacgaggcgcagaggaacaagaaaaagaaaaagaaggtgtcctgcttttccaacatcaagatcttcctggtgtccgagtgcgccctgatgctggcgcagggcacggtgggcgcctacctggtgagcgtcctgaccaccctggagcgtaggttcaacctgcagagcgctgacgtgggtgtgatcgctagcagcttcgagatcgggaacctggcgctcatcctcttcgtgagctacttcggggcacgcgggcaccggccgcgcctgatcggctgcggcggcatcgtcatggcgctgggcgcgctgctgtcggcgctgcccgagttcctgacccaccagtacaagtacgaggcgggcgagatccgctggggcgccgagggccgcgacgtctgcgcagccaacggctcgggcggcgacgaggggcccgaccccgacctcatctgccgcaaccggacggctaccaacatgatgtacttgctgctcattggggcccaggtgctcctgggcatcggtgctacccctgtgcagcccctgggcgtctcctacatcgacgaccacgtgcggaggaaggactcctcgctctatataggaatcctgttcacgatgctggtatttggaccagcctgcgggtttatcctgggctctttctgtaccaaaatctacgtggatgcggtcttcattgacacaagtaacctggacatcactccggacgacccccgctggatcggagcctggtggggtggctttctgctctgcggtgccttactcttcttctcttccctcttgatgtttgggtttccacagtccctgcccccgcactcagagcccgccatggaaagcgagcaggccatgctctccgaaagagaatacgagagacccaagcccagcaacggggtcctgaggcaccccctggagccagacagcagtgcctcctgtttccagcagctgagagtgatcccgaaggtcaccaagcacctgctctcaaaccctgtgttcacctgcatcatcctggccgcctgcatggagattgcagtggtggctggcttcgctgcctttttggggaagtacctggagcagcagtttaacctcaccacctcttctgccaaccagctgcttgggatgactgcgatcccgtgtgcttgtctgggtatcttcctgggaggtcttttggtgaagaagctcagcctgtctgccctgggggccattcggatggccatgctcgtcaacctggtgtccactgcttgctacgtctccttcctcttcctgggctgcgacactggccctgtggctggggttactgttccctatggaaacagcacagcacctggctcagccctggacccctactcgccctgcaataataactgtgaatgccaaaccgattccttcactccagtgtgtggggcagatggcatcacctacctgtctgcctgctttgctggctgcaacagcacgaatctcacgggctgtgcgtgcctcaccaccgtccctgctgagaacgcaaccgtggttcctggaaaatgccccagtcctgggtgccaagaggccttcctcactttcctctgtgtgatgtgtatctgcagcctgatcggtgccatggcacagacaccctcagtcatcatcctcatcaggacagtcagccctgaactcaagtcttacgctttgggagttctttttctcctccttcgtttgttgggcttcatccctccacccctcatcttcggggctggcatcgactccacctgcctgttctggagcacgttctgtggggagcaaggcgcctgcgtcctctacgacaatgtggtctaccgatacctgtatgtcagcatcgccatcgcgctcaaatccttcgccttcatcctgtacaccaccacgtggcagtgcctgaggaaaaactataaacgctacatcaaaaaccacgagggcgggctgagcaccagcacagagtaccaagacattgagactgagaaaacctgccccgaatcacattcaccttcagaagactcctttgtgagaagctgagggcctggccctcttcctcttcctggagagaacagcccaccaccacccacagacctcgcgggcctcacttagcgcgctcctccctgtccgagaacccgagggtccccatgtggattatccagccagtgtgtggtcctttgaggccccaagcgcaggcctgtgatgaggaccaaagaggtgacttatggtcaggagtactccaaacagctctcagagtaggcatctttcctgggtctctaaagagtcatgctgacctggtgtgcaaattcccttccacccatccctctacctcctctggggatggcttgccgacatgctttagaaactcccctcttgggaatgctcctctgactgagggctccaacagctttaatgaaatcagccgagagggtaaaaaccaacctgttgcatagaatggaggggggaaaaagcacatactcaatagatttttgagtgtggtactctgtatttttgcagcgtttattttccaaatgagcagtttagaaatatgtgatgtaaagtacatactgtacgtttgctgaaaattatattaaaagcactattttaattctt

SEQ ID NO: 184763 - DNA, 567 bp, Homo sapiens
  Payload ID: 16383
  Gene Symbol: SLCO3A1
  Gene Name: solute carrier organic anion transporter family, member 3A1
  ENST ID: ENST00000553304
  CDS Start-End: 176-567
cttccccagcccggctctcgagcggccgcctggcccgacgagggggccgcccggcgctgggggcaggcgggcatgacctcggcccggcgtggaggttggcgagtggtgcagaggcggccgccgggggagctgccggccggggctgccagcgagcgggtagcgggcgggaccgttgatgccggtgagcgtcctgaccaccctggagcgtaggttcaacctgcagagcgctgacgtgggtgtgatcgctagcagcttcgagatcgggaacctggcgctcatcctcttcgtgagctacttcggggcacgcgggcaccggccgcgcctgatcggctgcggcggcatcgtcatggcgctgggcgcgctgctgtcggcgctgcccgagttcctgacccaccagtacaagtacgaggcgggcgagatccgctggggcgccgagggccgcgacgtctgcgcagccaacggctcgggcggcgacgaggggcccgaccccgacctcatctgccgcaaccggacggctaccaacatgatgtacttgctgctcattggggcccaggtgctcctgggcat

SEQ ID NO: 184764 - DNA, 524 bp, Homo sapiens
  Payload ID: 16383
  Gene Symbol: SLCO3A1
  Gene Name: solute carrier organic anion transporter family, member 3A1
  ENST ID: ENST00000555892
  CDS Start-End: 67-330
cttgctacgtctccttcctcttcctgggctgcgacactggccctgtggctggggttactgttccctatggaaacagcacagcacctggctcagccctggacccctactcgccctgcaataataactgtgaatgccaaaccgattccttcactccagtgtgtggggcagatggcatcacctacctgtctgcctgctttgctggctgcaacagcacgaatctcacgggctgtgcgtgcctcaccaccgtccctgctgagaacgcaaccgtggttcctggaaaatgccccagtcctgggtgccaagaggccttcctcactttcctctgtgtgatgtgtatctgcagcctgatcggtgccatggcacagacaccctcagtcatcatcctcatcaggacagtcagccctgaactcaagtcttacgctttgggagttctttttctcctccttcgtttgttgggcacagagtaccaagacattgagactgagaaaacctgccccgaatcacattcaccttcagaagactcc

SEQ ID NO: 184765 - DNA, 640 bp, Homo sapiens
  Payload ID: 16383
  Gene Symbol: SLCO3A1
  Gene Name: solute carrier organic anion transporter family, member 3A1
  ENST ID: ENST00000555210
  CDS Start-End: 1-328
tgctacgtctccttcctcttcctgggctgcgacactggccctgtggctggggttactgttccctatggaaacagcacagcacctggctcagccctggacccctactcgccctgcaataataactgtgaatgccaaaccgattccttcactccagtgtgtggggcagatggcatcacctacctgtctgcctgctttgctggctgcaacagcacgaatctcacgggctgtgcgtgcctcaccaccgtccctgctgagaacgcaaccgtggttcctggaaaatgccccagtcctgggtgccaagaggccttcctcactttcctctgtgtgatgtgtatctgcagcctgatcggtgccatggcacagacaccctcagtcatcatcctcatcagtcagccctgaactcaagtcttacgctttgggagttctttttctcctccttcgtttgttgggcttcatccctccacccctcatcttcggggctggcatcgactccacctgcctgttctggagcacgttctgtggggagcaaggcgcctgcgtcctctacgacaatgtggtctaccgatacctgtatgtcagcatcgccatcgcgctcaaatccttcgccttcatcctgtacaccaccacgtggcagtgcctg

SEQ ID NO: 184766 - DNA, 2776 bp, Homo sapiens
  Payload ID: 16384
  Gene Symbol: SLCO4A1
  Gene Name: solute carrier organic anion transporter family, member 4A1
  Uniprot ID: Q96BD0
  ENST ID: ENST00000217159
  CDS Start-End: 206-2374
ctgcggcgggggcggccccagcggatgaatgaagcggcgcgtggctgccggggaggccagagcgtggagcgctgcgcggcgcggcggccgggccctcgagacggggacggacacaccagcccctcggataccacttggccactcccgctgaggccactcccactgcgtggctgaagcctcgaggtcaccaggcggaggcgcggagatgcccctgcatcagctgggggacaagccgctcaccttccccagccccaactcagccatggaaaacgggcttgaccacaccccacccagcaggagggcatccccgggcacacccctgagccccggctccctccgctccgctgcccatagccccctggacaccagcaagcagcccctctgccagctctgggccgagaagcatggcgcccgggggacccatgaggtgcggtacgtctcggccgggcagagcgtggcgtgcggctggtgggccttcgcaccgccgtgcctgcaggtcctcaacacgcccaagggcatcctgttcttcctgtgtgcggccgcattcctgcaggggatgactgtgaatggcttcatcaacacagtcatcacctccctggagcgccgctatgacctgcacagctaccagagcgggctcatcgccagctcctacgacattgccgcctgcctctgcctcaccttcgtcagctacttcgggggctcagggcacaagccgcgctggctgggctggggcgtgctgcttatgggcacggggtcgctggtgttcgcgctgccccacttcacggctggccgctatgaggtggagttggacgcgggtgtcaggacgtgccctgccaaccccggcgcggtgtgtgcggacagcacctcgggcctgtcccgctaccagctggtcttcatgctgggccagttcctgcatggcgtgggtgccacacccctctacacgctgggcgtcacctacctggatgagaacgtcaagtccagctgctcgcccgtctacattgccatcttctacacagcggccatcctgggcccagctgccggctacctgattggaggtgccctgctgaatatctacacggaaatgggccgacggacggagctgaccaccgagagcccactgtgggtcggcgcctggtgggtcggcttcctgggctctggggccgctgctttcttcaccgccgttcccatccttggttaccctcggcagctgccaggctcccagcgctacgcggtcatgagagcggcggaaatgcaccagttgaaggacagcagccgtggggaggcgagcaacccggactttgggaaaaccatcagagacctgcctctctccatctggctcctgctgaagaaccccacgttcatcctgctctgcctggccggggccaccgaggccactctcatcaccggcatgtccacgttcagccccaagttcttggagtcccagttcagcctgagtgcctcagaagctgccaccttgtttgggtacctggtggtgccagcgggtggtggcggcaccttcctgggcggcttctttgtgaacaagctcaggctccggggctccgcggtcatcaagttctgcctgttctgcaccgttgtcagcctgctgggcatcctcgtcttctcactgcactgccccagtgtgcccatggcgggcgtcacagccagctacggcgggagcctcctgcccgaaggccacctgaacctaacggctccctgcaacgctgcctgcagctgccagccagaacactacagccctgtgtgcggctcggacggcctcatgtacttctcactgtgccacgcagggtgccctgcagccacggagacgaatgtggacggccagaaggtgtaccgagactgtagctgtatccctcagaatctttcctctggttttggccatgccactgcagggaaatgcacttcaacttgtcagagaaagcccctccttctggttttcatattcgttgtaattttctttacattcctcagcagcattcctgcactaacggcaactctacgatgtgtccgtgaccctcagagatcctttgccctgggaatccagtggattgtagttagaatactagggggcatcccggggcccatcgccttcggctgggtgatcgacaaggcctgtctgctgtggcaggaccagtgtggccagcagggctcctgcttggtgtaccagaattcggccatgagccgctacatactcatcatggggctcctgtacaaggtgctgggcgtcctcttctttgccatagcctgcttcttatacaagcccctgtcggagtcttcagatggcctggaaacttgtctgcccagccagtcctcagcccctgacagtgccacagatagccagctccagagcagcgtctgaccaccgcccgcgcccacccggccacggcgggcactcagcatttcctgatgacagaacagtgccgttgggtgatgcaatcacacgggaacttctatttgacctgcaaccttctacttaacctgtggtttaaagtcggctgtgacctcctgtccccagagctgtacggccctgcagtgggtgggaggaacttgcataaatatatatttatggacacacagtttgcatcagaacgtgtttatagaatgtgttttatacccgatcgtgtgtggtgtgcgtgaggacaaactccgcaggggctgtgaatcccactgggagggcggtgggcctgcagcctgaggaaggcttgtgtgtcctcagttaaaactgtgcatatcgaaatatattttgttatttaagcctgcg

SEQ ID NO: 184767 - DNA, 2665 bp, Homo sapiens
  Payload ID: 16384
  Gene Symbol: SLCO4A1
  Gene Name: solute carrier organic anion transporter family, member 4A1
  Uniprot ID: Q96BD0
  ENST ID: ENST00000370507
  CDS Start-End: 97-2265
gacacaccagcccctcggataccacttggccactcccgctgaggccactcccactgcgtggctgaagcctcgaggtcaccaggcggaggcgcggagatgcccctgcatcagctgggggacaagccgctcaccttccccagccccaactcagccatggaaaacgggcttgaccacaccccacccagcaggagggcatccccgggcacacccctgagccccggctccctccgctccgctgcccatagccccctggacaccagcaagcagcccctctgccagctctgggccgagaagcatggcgcccgggggacccatgaggtgcggtacgtctcggccgggcagagcgtggcgtgcggctggtgggccttcgcaccgccgtgcctgcaggtcctcaacacgcccaagggcatcctgttcttcctgtgtgcggccgcattcctgcaggggatgactgtgaatggcttcatcaacacagtcatcacctccctggagcgccgctatgacctgcacagctaccagagcgggctcatcgccagctcctacgacattgccgcctgcctctgcctcaccttcgtcagctacttcgggggctcagggcacaagccgcgctggctgggctggggcgtgctgcttatgggcacggggtcgctggtgttcgcgctgccccacttcacggctggccgctatgaggtggagttggacgcgggtgtcaggacgtgccctgccaaccccggcgcggtgtgtgcggacagcacctcgggcctgtcccgctaccagctggtcttcatgctgggccagttcctgcatggcgtgggtgccacacccctctacacgctgggcgtcacctacctggatgagaacgtcaagtccagctgctcgcccgtctacattgccatcttctacacagcggccatcctgggcccagctgccggctacctgattggaggtgccctgctgaatatctacacggaaatgggccgacggacggagctgaccaccgagagcccactgtgggtcggcgcctggtgggtcggcttcctgggctctggggccgctgctttcttcaccgccgttcccatccttggttaccctcggcagctgccaggctcccagcgctacgcggtcatgagagcggcggaaatgcaccagttgaaggacagcagccgtggggaggcgagcaacccggactttgggaaaaccatcagagacctgcctctctccatctggctcctgctgaagaaccccacgttcatcctgctctgcctggccggggccaccgaggccactctcatcaccggcatgtccacgttcagccccaagttcttggagtcccagttcagcctgagtgcctcagaagctgccaccttgtttgggtacctggtggtgccagcgggtggtggcggcaccttcctgggcggcttctttgtgaacaagctcaggctccggggctccgcggtcatcaagttctgcctgttctgcaccgttgtcagcctgctgggcatcctcgtcttctcactgcactgccccagtgtgcccatggcgggcgtcacagccagctacggcgggagcctcctgcccgaaggccacctgaacctaacggctccctgcaacgctgcctgcagctgccagccagaacactacagccctgtgtgcggctcggacggcctcatgtacttctcactgtgccacgcagggtgccctgcagccacggagacgaatgtggacggccagaaggtgtaccgagactgtagctgtatccctcagaatctttcctctggttttggccatgccactgcagggaaatgcacttcaacttgtcagagaaagcccctccttctggttttcatattcgttgtaattttctttacattcctcagcagcattcctgcactaacggcaactctacgatgtgtccgtgaccctcagagatcctttgccctgggaatccagtggattgtagttagaatactagggggcatcccggggcccatcgccttcggctgggtgatcgacaaggcctgtctgctgtggcaggaccagtgtggccagcagggctcctgcttggtgtaccagaattcggccatgagccgctacatactcatcatggggctcctgtacaaggtgctgggcgtcctcttctttgccatagcctgcttcttatacaagcccctgtcggagtcttcagatggcctggaaacttgtctgcccagccagtcctcagcccctgacagtgccacagatagccagctccagagcagcgtctgaccaccgcccgcgcccacccggccacggcgggcactcagcatttcctgatgacagaacagtgccgttgggtgatgcaatcacacgggaacttctatttgacctgcaaccttctacttaacctgtggtttaaagtcggctgtgacctcctgtccccagagctgtacggccctgcagtgggtgggaggaacttgcataaatatatatttatggacacacagtttgcatcagaacgtgtttatagaatgtgttttatacccgatcgtgtgtggtgtgcgtgaggacaaactccgcaggggctgtgaatcccactgggagggcggtgggcctgcagcctgaggaaggcttgtgtgtcctcagttaaaactgtgcatatcgaaatatattttgttatttaagcctg

SEQ ID NO: 184768 - DNA, 856 bp, Homo sapiens
  Payload ID: 16384
  Gene Symbol: SLCO4A1
  Gene Name: solute carrier organic anion transporter family, member 4A1
  ENST ID: ENST00000451793
  CDS Start-End: 1-456
actacagccctgtgtgcggctcggacggcctcatgtacttctcactgtgccacgcagggtgccctgcagccacggagacgaatgtggacggccagaagatgtgtccgtgaccctcagagatcctttgccctgggaatccagtggattgtagttagaatactagggggcatcccggggcccatcgccttcggctgggtgatcgacaaggcctgtctgctgtggcaggaccagtgtggccagcagggctcctgcttggtgtaccagaattcggccatgagccgctacatactcatcatggggctcctgtacaaggtgctgggcgtcctcttctttgccatagcctgcttcttatacaagcccctgtcggagtcttcagatggcctggaaacttgtctgcccagccagtcctcagcccctgacagtgccacagatagccagctccagagcagcgtctgaccaccgcccgcgcccacccggccacggcgggcactcagcatttcctgatgacagaacagtgccgttgggtgatgcaatcacacgggaacttctatttgacctgcaaccttctacttaacctgtggtttaaagtcggctgtgacctcctgtccccagagctgtacggccctgcagtgggtgggaggaacttgcataaatatatatttatggacacacagtttgcatcagaacgtgtttatagaatgtgttttatacccgatcgtgtgtggtgtgcgtgaggacaaactccgcaggggctgtgaatcccactgggagggcggtgggcctgcagcctgaggaaggcttgtgtgtcctcagttaaaactgtgcatatcgaaatatattttgttatttaagcctg

SEQ ID NO: 184769 - DNA, 3092 bp, Homo sapiens
  Payload ID: 16384
  Gene Symbol: SLCO4A1
  Gene Name: solute carrier organic anion transporter family, member 4A1
  ENST ID: ENST00000497209
  CDS Start-End: 131-1993
gcggcgcggcggccgggccctcgagacggggacggacacaccagcccctcggataccacttggccactcccgctgaggccactcccactgcgtggctgaagcctcgaggtcaccaggcggaggcgcggagatgcccctgcatcagctgggggacaagccgctcaccttccccagccccaactcagccatggaaaacgggcttgaccacaccccacccagcaggagggcatccccgggcacacccctgagccccggctccctccgctccgctgcccatagccccctggacaccagcaagcagcccctctgccagctctgggccgagaagcatggcgcccgggggacccatgaggtgcggtacgtctcggccgggcagagcgtggcgtgcggctggtgggccttcgcaccgccgtgcctgcaggtcctcaacacgcccaagggcatcctgttcttcctgtgtgcggccgcattcctgcaggggatgactgtgaatggcttcatcaacacagtcatcacctccctggagcgccgctatgacctgcacagctaccagagcgggctcatcgccagctcctacgacattgccgcctgcctctgcctcaccttcgtcagctacttcgggggctcagggcacaagccgcgctggctgggctggggcgtgctgcttatgggcacggggtcgctggtgttcgcgctgccccacttcacggctggccgctatgaggtggagttggacgcgggtgtcaggacgtgccctgccaaccccggcgcggtgtgtgcggacagcacctcgggcctgtcccgctaccagctggtcttcatgctgggccagttcctgcatggcgtgggtgccacacccctctacacgctgggcgtcacctacctggatgagaacgtcaagtccagctgctcgcccgtctacattgccatcttctacacagcggccatcctgggcccagctgccggctacctgattggaggtgccctgctgaatatctacacggaaatgggccgacggacggagctgaccaccgagagcccactgtgggtcggcgcctggtgggtcggcttcctgggctctggggccgctgctttcttcaccgccgttcccatccttggttaccctcggcagctgccaggctcccagcgctacgcggtcatgagagcggcggaaatgcaccagttgaaggacagcagccgtggggaggcgagcaacccggactttgggaaaaccatcagagacctgcctctctccatctggctcctgctgaagaaccccacgttcatcctgctctgcctggccggggccaccgaggccactctcatcaccggcatgtccacgttcagccccaagttcttggagtcccagttcagcctgagtgcctcagaagctgccaccttgtttgggtacctggtggtgccagcgggtggtggcggcaccttcctgggcggcttctttgtgaacaagctcaggctccggggctccgcggtcatcaagttctgcctgttctgcaccgttgtcagcctgctgggcatcctcgtcttctcactgcactgccccagtgtgcccatggcgggcgtcacagccagctacggcgggagcctcctgcccgaaggccacctgaacctaacggctccctgcaacgctgcctgcagctgccagccagaacactacagccctgtgtgcggctcggacggcctcatgtacttctcactgtgccacgcagggtgccctgcagccacggagacgaatgtggacggccagaaggtgagtggagccgctgcctaccgcccctgtcctcccctggaccctgggaaggggcccccgtgccttccccttgtaatcggagctattgttgggcttcccaggtgtaccgagactgtagctgtatccctcagaatctttcctctggttttggccatgccactgcagggaaatgcacttcaacttgtcagagaaagcccctccttctggttttcatattcgttgtaattttctttacattcctcagcagcattcctgcactaacggcaactctacggtaagctggggtcgggtgtgcgcttgtccagagctttccttgcagcaccctgaggcggagctctgcagatcctgagacaggagcactccaggaaacacccaggtctaagcgggcctgtctgtcactggtggcaggagagacctcactgtctctgatctctgacgaggggcttcccacttgggggggggtgatgatgtggctggggactggtccaggaggccactggcctagggggtgacttggcatgcaaccccacttctgtgggtgctgacgctgtggttttctattgcagatgtgtccgtgaccctcagagatcctttgccctgggaatccagtggattgtagttagaatactagggggcatcccggggcccatcgccttcggctgggtgatcgacaaggcctgtctgctgtggcaggaccagtgtggccagcagggctcctgcttggtgtaccagaattcggccatgagccgctacatactcatcatggggctcctgtacaaggtgctgggcgtcctcttctttgccatagcctgcttcttatacaagcccctgtcggagtcttcagatggcctggaaacttgtctgcccagccagtcctcagcccctgacagtgccacagatagccagctccagagcagcgtctgaccaccgcccgcgcccacccggccacggcgggcactcagcatttcctgatgacagaacagtgccgttgggtgatgcaatcacacgggaacttctatttgacctgcaaccttctacttaacctgtggtttaaagtcggctgtgacctcctgtccccagagctgtacggccctgcagtgggtgggaggaacttgcataaatatatatttatggacacacagtttgcatcagaacgtgtttatagaatgtgttttatacccgatcgtgtgtggtgtgcgtgaggacaaactccgcaggggctgtgaatcccactgggagggcggtgggcctgcagcctgaggaaggcttgtgtgtcctcagttaaaactgtgcatatcgaaatatattttgttatttaagcctg

SEQ ID NO: 184770 - DNA, 5334 bp, Homo sapiens
  Payload ID: 16385
  Gene Symbol: SLCO4C1
  Gene Name: solute carrier organic anion transporter family, member 4C1
  Uniprot ID: Q6ZQN7
  ENST ID: ENST00000310954
  CDS Start-End: 288-2462
cccacgccgcgccttccggttggtccttgaggcgacgggtgaggcacagctgagcgccaaagccacaggctggggcgctaacgcccccgctcagcgctctgcgctccagacagctgcgagctggagtaggaaggttcaggcggtggcggagagtgcgctggaggctggagggccaggaggcgggaagcttcccgcacgggggcgctgtcacctgcctgtgggaggagccagagagggacctggctctgctgctctgaagcaccggagtcgggagaacccatccagacatgaagagcgccaaaggtattgagaacttggcttttgtcccctccagcccagacatcctgcgccgcttgtctgcgtcgccctcccaaatcgaagtctctgccttgtcctctgacccccaaagagagaattctcagccacaggagcttcagaagccccaggagccccagaagtcaccagagccatctctgccttcagcccctcccaatgtctccgaagagaagctccggtcactgtcgctgtccgagtttgaggaggggtcttacggctggaggaacttccatcctcaatgtctccagcgctgcaacacacctggaggctttctgcttcactactgcctcttggccgtcacgcaaggtattgtagttaatggcctagtaaatattagcatttccactgttgagaagcgttatgaaatgaagagttccctgactggcctgatttcatcaagctacgatatttcattctgtttgttgtctttatttgtatcattctttggtgaaagaggacataagccgagatggcttgcatttgcagcctttatgattggactgggagcacttgtattctcattgccacaatttttcagtggagaatataaattggggtctctttttgaagacacttgtgtaacaacaaggaatagcaccagttgtacatcttcaacttcttcactttctaactacttgtatgtcttcatcttgggacaactattgctgggggcaggaggaactcctctttatactctgggaacagcctttcttgatgattctgtgcccacacacaagtcttctctctatataggaaccggttatgctatgtcaatcttaggccctgctattggctatgtattgggaggacaactgctaaccatatacattgatgttgctatgggagaaagcactgatgtcactgaggatgatccgcgatggttgggagcttggtggattgggtttcttctatcatggatctttgcttggtctttaataatacctttttcttgctttccaaaacatttaccaggtacagcagaaattcaagctggaaaaacttcccaggctcatcagagtaatagtaatgcagatgtgaaatttggaaaaagtattaaagattttccagctgctctaaagaatttgatgaagaatgctgtctttatgtgtttagttctatcaacttcttcagaagccttaattactactggatttgctacatttttacctaaatttatagaaaatcaattcggattgacatccagcttcgcagctactcttggaggggctgttttaattcctggagctgctctcggtcaaattttaggtggcttccttgtttcaaaattcagaatgacatgtaaaaacacaatgaagtttgcactgttcacatctggagttgcacttacgctgagttttgtatttatgtatgccaaatgtgaaaatgagccatttgctggtgtatctgaatcatataatgggactggagaattgggaaacttgatagccccttgtaatgccaattgtaactgttcgcgatcatattattatcctgtctgtggagatggagtccaatatttttctccctgctttgcaggctgttcaaacccagttgcacacaggaagccaaaggtatattacaactgttcctgtattgaaaggaaaacagaaataacatccactgcagaaacttttggttttgaagctaaagctggaaaatgtgaaactcattgtgcgaaactgcccatattcctttgcattttctttattgtaattatttttacctttatggccggtactcctataactgtgtctatcctaaggtgtgttaatcacagacaacggtccctagccttgggaatacaatttatggtccttcgattattagggacaattcctggaccaattatatttggtttcacaatagacagcacatgtattctttgggatataaatgattgtggaattaaaggagcttgctggatttatgataacatcaagatggcccatatgctagtagccataagtgttacttgtaaagttatcaccatgttcttcaatggatttgcaatctttttgtataaaccacctccatcagccacagatgtgtcatttcataaagagaatgcagttgtgactaatgttttagcagaacaggatctcaacaaaatagtaaaagaagggtgaaatgggaaaagagaagactgttttacacctggaaaatttacctcgatttttaagaacacacattgccatggcaggattatctatccaatatggacaatcatatttacaaaattgatgtttttataatcaaatgtatttttttacttatgtagtttttgttttatgcaagaaacagacctgtgccttcaaagcccacgtaaagcctcaaaacacagcacacacacacacgagcacacacacacacacacacacgaacacacacacacacacacacacgcacacatacacacttatttcctattcccattgtctaggtatgaaatcctcaagcaataacaagaaaaaaggcccacaattagaaaaatttacatttaaaaaaaatgttgtttctatccccattacaacttgtttaattttaattttcattgtcaatattttgagcttagaacatttatggtataaaaatttaaactaatcaaagttgtgtgatgatttccgggaattattattgaaagcctatgaatttaaaaccaggtttaccatgtaatttgtttttaaatttatgtatactagcctggcctttctccaagcaaattattgaactattagaatatgttagttatcatccttgtgtcttagtatatagtgaatacagaaacatcagcattgtatacacatattttcactttaactcaagaattccaggaggtaatttgttgatattacaatttttaacacatttatgattctgtgataatattattcaattgcatatatttcagaggaaagtaccagtcagtaaagaaaaatgccaactaaacatgaaactattgatcaatacttatatacctttaatttttcctatttgaaaagccaaccacttaacacattactcatagcacctaagacagtgccttgcatagtgtagtcatctattattattgtttaattagaatattaaaccctaccctttaactcagcagtccccaaccttttttgcatcagggaccatttttgtggaagacaatttttccatgggggaagaaggtatggttttgagatgaaactgctccacctcagaccatcaggcattagttagattctcataaggagagtgcaacctagatcccttgcatgtgcagttcccaatggagtgtgcactcctatgagaatctaatgccactactgatctaacaagaggtggagctcaggcagtaatgctcactcacctgcctctcagctcaccaactgtgtggcccgattcctaacaggccacacacagcccagggctggggacccctgctttaactgatgcattgatttgataaagtattttacaagcctgataatgttataaccctgtttattcaggtcagatttatgccaactttgctgagaatatggagggtatagatgagtgaacatcaacaaacataacttctaccatggttaagaattttacttaggaaaagtattgaagttcaaatccagatagtattacatttgaaattgttataagggttattaatttaataaaattcatcatcaggtttcccctataagctttctcctaggttaattttccacaagcattgttttatatacactgtaatcaggataacacaagcttagtgttagatcttgtaggaaaccaagattagaaacattagaaatttgcagaatttaagaaattatgttttgtggtaatctatggccaacgatgttagaacctagcgcaattgtaaagtgaaattcaaggagaaggaatgaggagttagggaagcagcatacttgaatattagagaaggagaggagctgtgggtcaggaatcagagagacctgctaaaaccagacagatataaacaccaaagacggaagccaaataggtagccaaaaatccagatatttgagaagcaggaaatttatagcaaccaaagaaatagggcaagagaggcaggtgaacacacatgatacctcaattgacaatcttcctcccaccaagccagacacgttgtaaatgctgcttcctattggagcccagaaaaaaggaaaaggaaagtttaggctttctttgtcctttgtgtggaagcagggaattggattgaagactttcatagttgtaacataaaggcaaatcctgaggaactcactgatggagatgtgaaatggcagtaaggaagaaaacagaataactgaacaaatatattagtctagggccacttaatttagaggaagaaaaaaaatcaacccatccatagaaatagtttgataaacaggtcactaaatcattggcgtttataaagattcttagctatcaagggctgcattgtattttatatactcagttttataaggtgatactttttaaataagcgctttaatgaaaatggttagactgaaaataattttggtccttaaaaggagtcaggagcttttatatataaggtacatattttaaaagaatacctcctttataacagggttttacagacactaccataatttataatcattattttttacttttgggttcacctagatcatatgagttgatgtgatacttctagaacaaaattattcatagtgcgttttttgtaatttatgattgttaagtaagcttgacttataaattgacattgtaattgtgtacataattggatatatgtgttaaaatttaacatttagatttacttaattgtagaaaatacaaatgtaaaacttacacatggaaagaactgtatgcagttgactttactatgtaaattggagggaaacaaagttttagatccattttctttcaaaattttctttattgtaaagtatgcaaaatatatattcataccatttattaaatcagaatgtttatacaaaa

SEQ ID NO: 184771 - DNA, 9076 bp, Homo sapiens
  Payload ID: 16386
  Gene Symbol: SLCO5A1
  Gene Name: solute carrier organic anion transporter family, member 5A1
  Uniprot ID: Q9H2Y9
  ENST ID: ENST00000260126
  CDS Start-End: 708-3254
gtgcgcgtgtgtctgtttggagcggaggagaggcttgggtgacaggcgaggggtggggggaagagttcagcctgagtcacagtctcattcactgatttctcttcggctggacggaggctgcctcctcacgcggctcccaactattcccgtagctcagtgcccccctcccgccgctctactcagccaggcagacagactgacagactcgctagtcggcagcttcactcccgagggtgccgcgagcccaggcggcgaacacccggtacccctggcgcagcgaggtgggatgctgtacggacagcagcgctaagtgcccccccacccccggcgcagggtgcactcgctcctggccgcgggcccagcggcggcggcggcggcggcggcggaggggatgagcccgggacgcgcgaggcgcctgcctcaagctaccgcccggagagggacgccgagtagggctcatcgcagtaccgcgcggacccctgccccctgtggcacgcggctgcggagccttgaagccgtgtctgtgatcaggatgcactgggcgcctcgcagctggtgaggatgccctgctgcgcggccctgcgcccccagccccagtcccaggtgggcaagactgactgggcccggcttcggcccctcgtgccggtggatgaaacgtgccggagtgcttgggtgccatcagctatcaaatctgaattctaagcgccatggacgaaggcactggactgcagcccggggcgggagagcagctggaggcgccggccactgcagaagctgtccaagagaggtgcgagccggagaccctcaggtctaagagtttaccggtcctcagcagcgcctcctgccggccaagcctcagtcccactagtggagacgccaacccggcctttggctgtgtggattcttcgggccaccaggagttgaagcaaggcccgaacccgttggcccccagtccctctgccccgtccacttcggcggggctcggggactgtaaccacagggtggacctcagcaaaaccttctcggtgtcctccgccttggccatgctccaggagagaaggtgcctctacgtggtcctcacggattcccgttgcttcctggtgtgcatgtgctttctgaccttcatccaggcgttaatggtctctgggtacctgagcagcgtaattaccaccattgaaaggcgctacagtctgaagagttccgagtcggggctgctggtcagctgctttgacatcgggaacctggtggtggtggtgttcgtcagctacttcggcggccggggtcggcggcccctgtggctggccgtgggtggactcctcatcgccttcggggcagccctcttcgccttacctcacttcatctcgcccccctaccagatccaagagttgaacgcctcggcccccaacgacggcctgtgtcagggtggcaactccaccgccactttggagcctccggcctgtccgaaggactcgggaggaaataatcactgggtctacgtggctttattcatttgcgcgcagattctcattggaatgggctccacacctatttataccctgggaccaacctacttagatgacaatgtcaagaaagaaaactcctccttgtacctagccatcatgtatgtcatgggagcacttggccctgcagtgggatatttattaggtggacttcttattggtttttatgttgatcccagaaatcctgttcaccttgaccagaatgaccctcgtttcattggaaactggtggagtggattcctcctttgtgccattgcaatgtttcttgtgatattcccaatgtttactttcccaaaaaagcttccacctcgacacaagaaaaagaaaaagaaaaaattttctgttgatgctgttagtgatgacgatgttctgaaggagaaatcaaacaacagtgaacaagcggacaaaaaagtttcttcgatgggatttggaaaggatgtcagagacctaccaagagcagctgtcaggatcttaagcaacatgacattcctttttgtgagtttgtcatacacagctgagagtgccattgtaactgctttcattaccttcattcccaagttcatcgagtcacagtttggtatcccagcctccaatgccagcatctacactggggttattatcgtccccagtgctggtgttggtattgtcctcggaggctacattataaaaaaattgaaacttggtgccagagaatctgcaaaactagcaatgatctgcagtggtgtgtctttactatgtttttcaaccctatttattgttggatgtgaaagcattaatctagggggcataaacatcccttatacaacaggaccttctctcaccatgccccataggaatctgacaggaagctgcaacgttaattgtggttgtaaaatacacgagtatgagccagtctgtggatcagatggaattacatactttaacccttgtctggctggctgtgttaatagtggtaatcttagcactgggatacggaattatacagaatgcacctgtgtccaaagtcgccaagtgatcactccacccaccgtgggacagcgaagtcagctccgtgtggttattgtcaagacttatctcaatgagaacggctatgctgtgtctgggaaatgtaaacggacctgcaatactcttatcccattcttagtttttcttttcatagtcaccttcatcacagcatgtgcccaaccatcagctatcatagtaacactcaggtccgtagaagatgaggagagaccttttgcactgggaatgcagtttgttttgttgcgaacacttgcatacattcctactccaatctactttggagcagtcattgacaccacctgcatgctctggcaacaggaatgtggtgtgcagggttcttgctgggagtacaacgtgacgtcgtttcgttttgtgtattttggtttggctgccggcctcaaattcgttgggtttatttttatttttctggcctggtactccataaaatacaaggaggatggactgcagaggcggaggcagagagaatttcccctgagcaccgtgagtgagagagtgggacaccccgacaatgcccggactagatcttgcccagctttcagcacccagggagaattccacgaagagactggcctgcaaaaagggatccagtgcgcagcacagacctacccggggcccttcccagaagcaataagttcctctgcggacccggggctggaagagagccccgctgccttggagccgccctcctgaagcttgaaaatggaagaatttagttttgttggttgaattgaaaatggcgacttgagaaacaactgtgccttcttttctttctttcttttttttaacctctacagacacaatcctcaaaccaacaaaactcagtatacacagccgctattcattgagggctggatacctcaacaagactgagagcctttccccgcttctctccaagaaggagacgttcagctagatttgttcccatttccgttgtgttaattcaaagctcatgctcccctacggtacaggctgaggtacacggttagcaaaaccatgggaaggggaatggcggtgcatatcattaactaacactccaaacaaaggtgagcttgcccaggacttggcatttccaaatcaaagtttttagatatgaacacctactgtgagttctgctacaaagcacaaatgaatttgtctcaactatgcaatttgattggaaaaatgtatgtgcagcatgttacatttactttcacggaataaagcagatatgtttctgaaaagaggaagctgaactttccatccagtactgttgatagcattttaagccatagcagttataaatcaggtagagtttttcaaatgcttcagaggaaccataggcatagtgtgatagaaggaacagctacttcaggtcgtaggacacattctctttcagtctgcctgccccatcctaagataaagaggctgctgaatcataaatctgatagcttaaatataaactccagtattcttttgtaaggagcattaaaactagtgtgctaaacaatatggctagaaactgtaatttgaaatgcataatagggaaagaaaatgacagctttctcatccaagaaaattgttgcagaaattttctttagctctacgggcccacaaagtcactgggaaaagtcccacctgagtattttagttacatcttgaaagcactggcaaatctgtgtggttttctttttttctggacagaaaattgctgtggttgctcctgaaaatgcatacttatatcaggaaatctgtgcctgggatatgaaaatcacttagaatacaggaggagggagatctgtgttctggaacagaatatgatcttaagtaattgttgaaaattatgtaaaataaaccagtccatccgaaagaaccctactttatcagagatagaatcgttttacactaccctttgattcccccttactgtaagtttctggcagtgattctgagagaggatttttctgttcctaaatgcactttgggttcattacccatcattcttttcagtacctcccagcacatcactttgaagtaagcatcatagagaatgctttctacatggctcttaagatagatgcttcctgacggcgctaacggattgacagcaagttagctcaggggttctggctgccagggagtgtaagggccaaatgctgatataattgtgaactttttctgccaaggagcctatggtcatggagggctaattagggaaatgtttttctcttctggtttacccttatccccagaagagatgtgattgacagactgttccatgattcaggcttctgctctccaaccttgcttgactgcacaggtggaattgtgcaaatactcctgggtataaggctgtttccctctcttcctaggaatgacattggtcaaacagttctcttggttgcatacagtttgtgttaacactgttagactgaacaatgtctacaaggggtggagctagtggtctcaggggctaaggacttccctctggttcctgggcttggctctcggggaggtgaggattcttgcttggttaagactgtaattgcactggtaattgtcagactctggccaatgtggcatatattggaagtattcaaaaaatcttgctgattaagaaaaccttgctgattgaactagtgtctcctttggggcctcagggttcccctttaccctctatgggagagctctgatcctttaaaggagaaattttcctttggtgtgggagttaaagatatgtagattggagaggtgtggtgttttcttaattttcttctgatcattaagatactgcattgagagaattttggtgggattggcactttttctggtagctaagattgctggactcagcacggagtagttagagagcccccttactccctttgctgccatgaacagtcatccagtttggcgatcactgatcaggtgccaggtatcttcaggtgtcatattacctgattaccatctgccactccataaaatcctttgggatgattgggccagaactcaaagaaatgggcctgaaatgtgcaccacagtgttaatattgtacttcctcaagtatctgctccttataaatagcaggtatttcattaatgtgttgttggtgaatgtagactaagtagtaaaaatcatgagaaaataaagctttggaatatgtaccaattaagagtggttcacaaaatacttggggctatggtagcatcactggaatattacatagccaactgaagtgactgttttgtagatgataccatttaattgtatatatagggtcttatatgtttcttaataaattgatcccattactttatagtcacagctcctattagaagttttaatgaagactctccatgagcttaggcttcaaattacttgttttggaaaaggtcatcttgtcctttataaactgtaaattcatatattatttagctttaatatgcaaatacaatatccttgagttcatcctattaatttagaaactcccaggaggtaagatgggtggttggagcgcattctttggttattttcattagcattaagtccttattctttataggtggatttaattcttgaaaatattcaaaagtaattcagagtcaaggtgttggggatggagagaaaggaggaacagagaggaaaaaaattagcatttgttgagtgttgacgatttgtagagcattttgacaagcacttaatatacatcatcattcattttgatcctcttaattaccttgcaaagatttgattctttttttttttttgagacagagtcttgctctgtcacccaggctggagtgcagtggcttaatctcagctcactgcaacctccgcttcctgggttcaagtgattctcctgtttcagtctcctgaggaactgggattaaggtgtgtgccaccacacccagctattttttttctatttttagtagagagagggtttcaccatgttggccaggctggtcttgaactcctgacctcaagtgatccacctgccttggcctctcaaagtgctgggattacaggcatgagccaccatgcccggctgattttattatttttttaaaaaacatatgaaaccaagactcagagaagtaaaataactcatttaggatcatacagaatggtaaagtcaggattcagacatagatttctctcactccattattcattttttacactacgcaatgtatacaatagcttttggttaacaaaggcaaggtgactataaaatcgtgagattaaagcatttcaattttttgatatattaccgtttatgaagagtagagaggtttttttgtgtaaataaaaaaaactgtaggaaacatctgtaggaaatatcaagatttaatgtttaactagattttcaaggtaaatttacatttatttagctaagtgttatattaaagttatttgtcataacatacctcaaatatttatttatagttcatatttaatacagaacaaatctagtcttcgtgttaacatcgggtctcggcagagtttctgaaatgaaacattatgaagaaaggtagttcagatttgttgaatctgagctttagggatttcaagtgtatttttttttattttcctctttcagaatattaacatctctattagttttttgatgaatatgagttttaagattcctaataagggttttaagtgaacacacataaaatacatatcaaaccactgatcccgattgttccctttagtcgctgtgacattgttacctttagtggcatgcacttggaaatgtcagccttcagagaagggggagttacatggagtaaggcctcatggatgtcatggtggtcctccatgttcaccaaccaccaagaaaattcttcttcagtccacaattccagcttgcgctctttggtgcacttggagccagaaagtgtctttttggccctgttttgtagaaaccgtgcatgtaccaaagagaaactttagagtttggatggagctgaagcattgatgggaattccctagtgcacccaggagcaggaggcaagcccaagcctcgggtggtagccaattatattttgtgatcgtgtatgtacttaaaacatcagagatgacacagcacatgaatataactattgatatgtaggtgcatactgagtattctaagtagcagatagataccaaaatactgtataatcccagaattgcctaaactgcaggtttgctagttctctgttatacagaccagtaggtagcctttccacacatttgtgttttctcttccataataagagagtgctgcggctggcaggcaaaggtagttgcctcatgcactttatctttttgtctttttctcttcttcatcttttgggatgctgctggctgtatctgtcccaaacttcttgttgcattagaatcagatctgtgtatgtttgaggaggttttattttaaagacttcagttttactcagctctaggaagggtcaaatacaacaacaacaacaaaaaacagaaaacaaaaaaccctccctaggtgtttgcttttgcaacattaaaaaaaatgccttggtgctaaaaagtatttaatgacgcatgttcaccactaaaaagcgccactgaattcacagtatttcactgctaagtggctgcatgtactttgtgtttggaaatctgaagaattttccagaaaacaagcatccattactctcatttcaacagttactccatctatgctgcaaaaatgaagcgtgaaaggggggatacttttctatggaatactcagtgcttttgatatttattttagcaagaataatcagatgccaaaaataatttcagagaaaggtagaaaaaatatttcaggtaaccttttcttatttcttctccaaaaagattacacccatgtaaggtatttttaacactggggttttgaaggtgttatcttttctggtatcctatcactacatgttaaaattgaaggagaaaatattattgaaactaaagtaattgcagggacacattaaaccaaaggggtgaacaaaagaggtttaaagtttgtatctagaaatgaaaaataagaatcattggtaagactagtaccgattattggcaattggtaattgataattggtaagagtagtaccaaataatgggcatttttcttaaaatacatacctctaccccaaaccccaaatgttaatttagaatcctgaaacaggcaagtcaggctctgactcttttgtttaaggaaatgtaatactgtgtcaactaaactggcattaggttcttagtggagtgtgtgtttgtgtgtgtgtgtgtgtgttttgtgtagaggtatgtttgtgatgaaaggttttgcactgttgcataaagaagtttgattttgtgatttttaaaatgatattcatttggagactttttaaggtaatttaaaagatgtataatttccgtgtgtttaatgaaatctgttgtcgatgtactaatcttggtttacagcatcttgaatacttgattattgaaaattaagaaaaaagttaaaaatgaataaagtgtgttggactgaa

SEQ ID NO: 184772 - DNA, 2630 bp, Homo sapiens
  Payload ID: 16386
  Gene Symbol: SLCO5A1
  Gene Name: solute carrier organic anion transporter family, member 5A1
  Uniprot ID: Q9H2Y9
  ENST ID: ENST00000530307
  CDS Start-End: 43-2424
tgcttgggtgccatcagctatcaaatctgaattctaagcgccatggacgaaggcactggactgcagcccggggcgggagagcagctggaggcgccggccactgcagaagctgtccaagagaggtgcgagccggagaccctcaggtctaagagtttaccggtcctcagcagcgcctcctgccggccaagcctcagtcccactagtggagacgccaacccggcctttggctgtgtggattcttcgggccaccaggagttgaagcaaggcccgaacccgttggcccccagtccctctgccccgtccacttcggcggggctcggggactgtaaccacagggtggacctcagcaaaaccttctcggtgtcctccgccttggccatgctccaggagagaaggtgcctctacgtggtcctcacggattcccgttgcttcctggtgtgcatgtgctttctgaccttcatccaggcgttaatggtctctgggtacctgagcagcgtaattaccaccattgaaaggcgctacagtctgaagagttccgagtcggggctgctggtcagctgctttgacatcgggaacctggtggtggtggtgttcgtcagctacttcggcggccggggtcggcggcccctgtggctggccgtgggtggactcctcatcgccttcggggcagccctcttcgccttacctcacttcatctcgcccccctaccagatccaagagttgaacgcctcggcccccaacgacggcctgtgtcagggtggcaactccaccgccactttggagcctccggcctgtccgaaggactcgggaggaaataatcactgggtctacgtggctttattcatttgcgcgcagattctcattggaatgggctccacacctatttataccctgggaccaacctacttagatgacaatgtcaagaaagaaaactcctccttgtacctagccatcatgtatgtcatgggagcacttggccctgcagtgggatatttattaggtggacttcttattggtttttatgttgatcccagaaatcctgttcaccttgaccagaatgaccctcgtttcattggaaactggtggagtggattcctcctttgtgccattgcaatgtttcttgtgatattcccaatgtttactttcccaaaaaagcttccacctcgacacaagaaaaagaaaaagaaaaaattttctgttgatgctgttagtgatgacgatgttctgaaggagaaatcaaacaacagtgaacaagcggacaaaaaagtttcttcgatgggatttggaaaggatgtcagaggggttattatcgtccccagtgctggtgttggtattgtcctcggaggctacattataaaaaaattgaaacttggtgccagagaatctgcaaaactagcaatgatctgcagtggtgtgtctttactatgtttttcaaccctatttattgttggatgtgaaagcattaatctagggggcataaacatcccttatacaacaggaccttctctcaccatgccccataggaatctgacaggaagctgcaacgttaattgtggttgtaaaatacacgagtatgagccagtctgtggatcagatggaattacatactttaacccttgtctggctggctgtgttaatagtggtaatcttagcactgggatacggaattatacagaatgcacctgtgtccaaagtcgccaagtgatcactccacccaccgtgggacagcgaagtcagctccgtgtggttattgtcaagacttatctcaatgagaacggctatgctgtgtctgggaaatgtaaacggacctgcaatactcttatcccattcttagtttttcttttcatagtcaccttcatcacagcatgtgcccaaccatcagctatcatagtaacactcaggtccgtagaagatgaggagagaccttttgcactgggaatgcagtttgttttgttgcgaacacttgcatacattcctactccaatctactttggagcagtcattgacaccacctgcatgctctggcaacaggaatgtggtgtgcagggttcttgctgggagtacaacgtgacgtcgtttcgttttgtgtattttggtttggctgccggcctcaaattcgttgggtttatttttatttttctggcctggtactccataaaatacaaggaggatggactgcagaggcggaggcagagagaatttcccctgagcaccgtgagtgagagagtgggacaccccgacaatgcccggactagatcttgcccagctttcagcacccagggagaattccacgaagagactggcctgcaaaaagggatccagtgcgcagcacagacctacccggggcccttcccagaagcaataagttcctctgcggacccggggctggaagagagccccgctgccttggagccgccctcctgaagcttgaaaatggaagaatttagttttgttggttgaattgaaaatggcgacttgagaaacaactgtgccttcttttctttctttcttttttttaacctctacagacacaatcctcaaaccaacaaaactcagtatacacagccgctattcattgagggctggatacctcaacaagactgagagcctttccccgcttctctccaaga

SEQ ID NO: 184773 - DNA, 2650 bp, Homo sapiens
  Payload ID: 16386
  Gene Symbol: SLCO5A1
  Gene Name: solute carrier organic anion transporter family, member 5A1
  ENST ID: ENST00000526750
  CDS Start-End: 503-1441
tcgctagtcggcagcttcactcccgagggtgccgcgagcccaggcggcgaacacccggtacccctggcgcagcgaggtgggatgctgtacggacagcagcgctaagtgcccccccacccccggcgcagggtgcactcgctcctggccgcgggcccagcggcggcggcggcggcggcggcggaggggatgagcccgggacgcgcgaggcgcctgcctcaagctaccgcccggagagggacgccgagtagggctcatcgcagtaccgcgcggacccctgccccctgtggcacgcggctgcggagccttgaagccgtgtctgtgatcaggatgcactgggcgcctcgcagctggtgaggatgccctgctgcgcggccctgcgcccccagccccagtcccaggtgggcaagactgactgggcccggcttcggcccctcgtgccggtggatgaaacgtgccggagtgcttgggtgccatcagctatcaaatctgaattctaagcgccatggacgaaggcactggactgcagcccggggcgggagagcagctggaggcgccggccactgcagaagctgtccaagagaggtgcgagccggagaccctcaggtctaagagtttaccggtcctcagcagcgcctcctgccggccaagcctcagtcccactagtggagacgccaacccggcctttggctgtgtggattcttcgggccaccaggagttgaagcaaggcccgaacccgttggcccccagtccctctgccccgtccacttcggcggggctcggggactgtaaccacagggtggacctcagcaaaaccttctcggtgtcctccgccttggccatgctccaggagagaaggtgcctctacgtggtcctcacggattcccgttgcttcctggtgtgcatgtgctttctgaccttcatccaggcgttaatggtctctgggtacctgagcagcgtaattaccaccattgaaaggcgctacagtctgaagagttccgagtcggggctgctggtcagctgctttgacatcgggaacctggtggtggtggtgttcgtcagctacttcggcggccggggtcggcggcccctgtggctggccgtgggtggactcctcatcgccttcggggcagccctcttcgccttacctcacttcatctcgcccccctaccagatccaagagttgaacgcctcggcccccaacgacggcctgtgtcagggtggcaactccaccgccactttggagcctccggcctgtccgaaggactcgggaggaaataatcactgggtctacgtggctttattcatttgcgcgcagattctcattggaatgggctccacacctatttataccctgggaccaacctacttagatgacaatgtcaagaaagaaaactcctccttgtacctagaccttctctcaccatgccccataggaatctgacaggaagctgcaacgttaattgtggttgtaaaatacacgagtatgagccagtctgtggatcagatggaattacatactttaacccttgtctggctggctgtgttaatagtggtaatcttagcactgggatacggaattatacagaatgcacctgtgtccaaagtcgccaagtgatcactccacccaccgtgggacagcgaagtcagctccgtgtggttattgtcaagacttatctcaatgagaacggctatgctgtgtctgggaaatgtaaacggacctgcaatactcttatcccattcttagtttttcttttcatagtcaccttcatcacagcatgtgcccaaccatcagctatcatagtaacactcaggtccgtagaagatgaggagagaccttttgcactgggaatgcagtttgttttgttgcgaacacttgcatacattcctactccaatctactttggagcagtcattgacaccacctgcatgctctggcaacaggaatgtggtgtgcagggttcttgctgggagtacaacgtgacgtcgtttcgttttgtgtattttggtttggctgccggcctcaaattcgttgggtttatttttatttttctggcctggtactccataaaatacaaggaggatggactgcagaggcggaggcagagagaatttcccctgagcaccgtgagtgagagagtgggacaccccgacaatgcccggactagatcttgcccagctttcagcacccagggagaattccacgaagagactggcctgcaaaaagggatccagtgcgcagcacagacctacccggggcccttcccagaagcaataagttcctctgcggacccggggctggaagagagccccgctgccttggagccgccctcctgaagcttgaaaatggaagaatttagttttgttggttgaattgaaaatggcgacttgagaaacaactgtgccttcttttctttctttcttttttttaacctctacagacacaatcctcaaaccaacaaaactcagtatacacagccgctattcattgagggctggatacctcaacaagactgagagcctttccccgcttctctccaagaaggagacgttcagctagatttgttcccatttccgttgtgttaattcaaagctcatgctcccctacggtacaggctgaggtacacggttagcaaaaccatgggaaggggaa

SEQ ID NO: 184774 - DNA, 3725 bp, Homo sapiens
  Payload ID: 16386
  Gene Symbol: SLCO5A1
  Gene Name: solute carrier organic anion transporter family, member 5A1
  Uniprot ID: Q9H2Y9
  ENST ID: ENST00000524945
  CDS Start-End: 718-2781
agacaatgagggagagtctccgccgaccgcctgctgcttattgttccgggactggagactgcagccggctgctgcctagtcctccggggctccgctcctgactagctcctccgtccctctagggacggttcggggtcacctaaccctggtccccggggcgctgggacgctagccccaagccgcagccgctcttcgctgaccgccctctttctgctttgcaggtcggcagcttcactcccgagggtgccgcgagcccaggcggcgaacacccggtacccctggcgcagcgaggtgggatgctgtacggacagcagcgctaagtgcccccccacccccggcgcagggtgcactcgctcctggccgcgggcccagcggcggcggcggcggcggcggcggaggggatgagcccgggacgcgcgaggcgcctgcctcaagctaccgcccggagagggacgccgagtagggctcatcgcagtaccgcgcggacccctgccccctgtggcacgcggctgcggagccttgaagccgtgtctgtgatcaggatgcactgggcgcctcgcagctggtgaggatgccctgctgcgcggccctgcgcccccagccccagtcccaggtgggcaagactgactgggcccggcttcggcccctcgtgccggtggatgaaacgtgccggagtgcttgggtgccatcagctatcaaatctgaattctaagcgccatggacgaaggcactggactgcagcccggggcgggagagcagctggaggcgccggccactgcagaagctgtccaagagaggtgcgagccggagaccctcaggtctaagagtttaccggtcctcagcagcgcctcctgccggccaagcctcagtcccactagtggagacgccaacccggcctttggctgtgtggattcttcgggccaccaggagttgaagcaaggcccgaacccgttggcccccagtccctctgccccgtccacttcggcggggctcggggactgtaaccacagggtggacctcagcaaaaccttctcggtgtcctccgccttggccatgctccaggagagaaggtgcctctacgtggtcctcacggattcccgttgcttcctggtgtgcatgtgctttctgaccttcatccaggcgttaatggtctctgggtacctgagcagcgtaattaccaccattgaaaggcgctacagtctgaagagttccgagtcggggctgctggtcagctgctttgacatcgggaacctggtggtggtggtgttcgtcagctacttcggcggccggggtcggcggcccctgtggctggccgtgggtggactcctcatcgccttcggggcagccctcttcgccttacctcacttcatctcgcccccctaccagatccaagagttgaacgcctcggcccccaacgacggcctgtgtcagggtggcaactccaccgccactttggagcctccggcctgtccgaaggactcgggaggaaataatcactgggtctacgtggctttattcatttgcgcgcagattctcattggaatgggctccacacctatttataccctgggaccaacctacttagatgacaatgtcaagaaagaaaactcctccttgtacctagccatcatgtatgtcatgggagcacttggccctgcagtgggatatttattaggtggacttcttattggtttttatgttgatcccagaaatcctgttcaccttgaccagaatgaccctcgtttcattggaaactggtggagtggattcctcctttgtgccattgcaatgtttcttgtgatattcccaatgtttactttcccaaaaaagcttccacctcgacacaagaaaaagaaaaagaaaaaattttctgttgatgctgttagtgatgacgatgttctgaaggagaaatcaaacaacagtgaacaagcggacaaaaaagtttcttcgatgggatttggaaaggatgtcagagacctaccaagagcagctgtcaggatcttaagcaacatgacattcctttttgtgagtttgtcatacacagctgagagtgccattgtaactgctttcattaccttcattcccaagttcatcgagtcacagtttggtatcccagcctccaatgccagcatctacactggggttattatcgtccccagtgctggtgttggtattgtcctcggaggctacattataaaaaaattgaaacttggtgccagagaatctgcaaaactagcaatgatctgcagtggtgtgtctttactatgtttttcaaccctatttattgttggatgtgaaagcattaatctagggggcataaacatcccttatacaacaggaccttctctcaccatgccccataggaatctgacaggaagctgcaacgttaattgtggttgtaaaatacacgagtatgagccagtctgtggatcagatggaattacatactttaacccttgtctggctggctgtgttaatagtggtaatcttagcactgggatacggaattatacagaatgcacctgtgtccaaagtcgccaagtgatcactccacccaccgtgggacagcgaagtcagctccgtgtggttattgtcaagacttatctcaatgagaacggctatgctgtgtctgggaaatgtaaacggacctgcaatactcttatcccattcttagtttttcttttcatagtcaccttcatcacagcatgtgcccaaccatcagctatcatagtaacactcagcatacattcctactccaatctactttggagcagtcattgacaccacctgcatgctctggcaacaggaatgtggtgtgcagggttcttgctgggagtacaacgtgacgtcgtttcgttttgtgtattttggtttggctgccggcctcaaattcgttgggtttatttttatttttctggcctggtactccataaaatacaaggaggatggactgcagaggcggaggcagagagaatttcccctgagcaccgtgagtgagagagtgggacaccccgacaatgcccggactagatcttgcccagctttcagcacccagggagaattccacgaagagactggcctgcaaaaagggatccagtgcgcagcacagacctacccggggcccttcccagaagcaataagttcctctgcggacccggggctggaagagagccccgctgccttggagccgccctcctgaagcttgaaaatggaagaatttagttttgttggttgaattgaaaatggcgacttgagaaacaactgtgccttcttttctttctttcttttttttaacctctacagacacaatcctcaaaccaacaaaactcagtatacacagccgctattcattgagggctggatacctcaacaagactgagagcctttccccgcttctctccaagaaggagacgttcagctagatttgttcccatttccgttgtgttaattcaaagctcatgctcccctacggtacaggctgaggtacacggttagcaaaaccatgggaaggggaatggcggtgcatatcattaactaacactccaaacaaaggtgagcttgcccaggacttggcatttccaaatcaaagtttttagatatgaacacctactgtgagttctgctacaaagcacaaatgaatttgtctcaactatgcaatttgattggaaaaatgtatgtgcagcatgttacatttactttcacggaataaagcagatatgtttctg

SEQ ID NO: 184775 - DNA, 2437 bp, Homo sapiens
  Payload ID: 16387
  Gene Symbol: SLCO6A1
  Gene Name: solute carrier organic anion transporter family, member 6A1
  Uniprot ID: Q86UG4
  ENST ID: ENST00000379807
  CDS Start-End: 136-2295
gcttgggcggcaagagccccttgtggccaccgagtcctccgacgccctcgccaggctggcctttgggttggcccaggcaggacgggcagccgagagcactcgggccgcgtcgccaggagccgcccagggtgagccatgttcgtaggcgtcgcccggcactctgggagccaggatgaagtctcaaggggagtagagccgctggaggccgcgcgggcccagcctgctaaggacaggagggccaagggaaccccgaagtcctcgaagcccgggaaaaaacaccggtatctgagactacttccagaggccttgataaggttcggcggtttccgaaaaaggaaaaaagccaagtcctcagtttccaagaagccgggagaagtggatgacagtttggagcagccctgtggtttgggctgcttagtcagcacctgctgtgagtgttgcaataacattcgctgcttcatgattttctactgcatcctgctcatatgtcaaggtgtggtgtttggtcttatagatgtcagcattggcgattttcagaaggaatatcaactgaaaaccattgagaagttggcattggaaaagagttacgatatttcatctggcctggtagcaatatttatagcattctatggagacagaaaaaaagtaatatggtttgtagcttcctcctttttaataggacttggatcacttttatgtgcttttccatccattaatgaagaaaataaacaaagtaaggtaggaattgaagatatttgcgaagaaataaaggttgtcagtggttgccagagcagtggtatatcattccaatcaaaatacctgtctttcttcatccttgggcagactgtgcagggaatagcaggaatgcctctttatatccttggaataacctttattgatgagaatgttgctacacactcagctggtatctatttaggtattgcagaatgtacatcaatgattggatatgctctgggttatgtgctaggagcaccactagttaaagtccctgagaatactacttctgcaacaaacactacagtcaataatggtagtccagaatggctatggacttggtggattaattttctttttgccgctgtcgttgcatggtgtacattaataccattgtcatgctttccaaacaatatgccaggttcaacacggataaaagctaggaaacgtaaacagcttcatttttttgacagcagacttaaagatctgaaacttggaactaatatcaaggatttatgtgctgctctttggattctgatgaagaatccagtgctcatatgcctagctctgtcaaaagctacagaatatttagttattattggagcttctgaatttttgcctatatatttagaaaatcagtttatattaacacccactgtggcaactacacttgcaggacttgttttaattccaggaggtgcacttggccagcttctgggaggtgtcattgtttccacattagaaatgtcttgtaaagcccttatgagatttataatggttacatctgtgatatcacttatactgcttgtgtttattatttttgtacgctgtaatccagtgcaatttgctgggatcaatgaagattatgatggaacagggaagttgggaaacctcacggctccttgcaatgaaaaatgtagatgctcatcttcaatttattcttctatatgtggaagagatgatattgaatatttttctccctgctttgcagggtgtacatattctaaagcacaaaaccaaaaaaagatgtactacaattgttcttgcattaaagaaggattaataactgcagatgcagaaggtgattttattgatgccagacccgggaaatgtgatgcaaagtgctataagttacctttgttcattgcttttatcttttctacacttatattttctggtttttctggtgtaccaatcgtcttggccatgacgcgggttgtacctgacaaactgcgttctctggccttgggtgtaagctatgtgattttgagaatatttgggactattcctggaccatcaatctttaaaatgtcaggagaaacttcttgtattttacgggatgttaataaatgtggacacacaggacgttgttggatatataacaagacaaaaatggctttcttattggtaggaatatgttttctttgcaaactatgcactatcatcttcactactattgcatttttcatatacaaacgtcgtctaaatgagaacactgacttcccagatgtaactgtgaagaatccaaaagttaagaaaaaagaagaaactgacttgtaactggatcatcattgtattctccaagatttgtttctgtgcccaactttcagaagaggaaaatcacacattatgtttacataagtagcaaaaatatatttatggtgatctgcattttcataataaagtgtcctattgtgaaaca

SEQ ID NO: 184776 - DNA, 2340 bp, Homo sapiens
  Payload ID: 16387
  Gene Symbol: SLCO6A1
  Gene Name: solute carrier organic anion transporter family, member 6A1
  Uniprot ID: Q86UG4
  ENST ID: ENST00000389019
  CDS Start-End: 173-2146
tttgcctcctgccctaggagaaacgttcgctctggaggcttgggcggcaagagccccttgtggccaccgagtcctccgacgccctcgccaggctggcctttgggttggcccaggcaggacgggcagccgagagcactcgggccgcgtcgccaggagccgcccagggtgagccatgttcgtaggcgtcgcccggcactctgggagccaggatgaagtctcaaggggagtagagccgctggaggccgcgcgggcccagcctgctaaggacaggagggccaagggaaccccgaagtcctcgaagcccgggaaaaaacaccggtatctgagactacttccagaggccttgataaggttcggcggtttccgaaaaaggaaaaaagccaagtcctcagtttccaagaagccgggagaagtggatgacagtttggagcagccctgtggtttgggctgcttagtcagcacctgctgtgagtgttgcaataacattcgctgcttcatgattttctactgcatcctgctcatatgtcaaggtgtggtgtttggtcttatagatgtcagcattggcgattttcagaaggaatatcaactgaaaaccattgagaagttggcattggaaaagagttacgatatttcatctggcctggtagcaatatttatagcattctatggagacagaaaaaaagtaatatggtttgtagcttcctcctttttaataggacttggatcacttttatgtgcttttccatccattaatgaagaaaataaacaaagtaaggtaggaattgaaggtattgcagaatgtacatcaatgattggatatgctctgggttatgtgctaggagcaccactagttaaagtccctgagaatactacttctgcaacaaacactacagtcaataatggtagtccagaatggctatggacttggtggattaattttctttttgccgctgtcgttgcatggtgtacattaataccattgtcatgctttccaaacaatatgccaggttcaacacggataaaagctaggaaacgtaaacagcttcatttttttgacagcagacttaaagatctgaaacttggaactaatatcaaggatttatgtgctgctctttggattctgatgaagaatccagtgctcatatgcctagctctgtcaaaagctacagaatatttagttattattggagcttctgaatttttgcctatatatttagaaaatcagtttatattaacacccactgtggcaactacacttgcaggacttgttttaattccaggaggtgcacttggccagcttctgggaggtgtcattgtttccacattagaaatgtcttgtaaagcccttatgagatttataatggttacatctgtgatatcacttatactgcttgtgtttattatttttgtacgctgtaatccagtgcaatttgctgggatcaatgaagattatgatggaacagggaagttgggaaacctcacggctccttgcaatgaaaaatgtagatgctcatcttcaatttattcttctatatgtggaagagatgatattgaatatttttctccctgctttgcagggtgtacatattctaaagcacaaaaccaaaaaaagatgtactacaattgttcttgcattaaagaaggattaataactgcagatgcagaaggtgattttattgatgccagacccgggaaatgtgatgcaaagtgctataagttacctttgttcattgcttttatcttttctacacttatattttctggtttttctggtgtaccaatcgtcttggccatgacgcgggttgtacctgacaaactgcgttctctggccttgggtgtaagctatgtgattttgagaatatttgggactattcctggaccatcaatctttaaaatgtcaggagaaacttcttgtattttacgggatgttaataaatgtggacacacaggacgttgttggatatataacaagacaaaaatggctttcttattggtaggaatatgttttctttgcaaactatgcactatcatcttcactactattgcatttttcatatacaaacgtcgtctaaatgagaacactgacttcccagatgtaactgtgaagaatccaaaagttaagaaaaaagaagaaactgacttgtaactggatcatcattgtgattgcagatcatttgaggatcagagtgtgaaaacgagtttctcttttacagattctccaagatttgtttctgtgcccaactttcagaagaggaaaatcacacattatgtttacataagtagcaaaaatatatttatggtgatctgcattttcataataaagtgtcctattgtgaaaca

SEQ ID NO: 184777 - DNA, 2689 bp, Homo sapiens
  Payload ID: 16387
  Gene Symbol: SLCO6A1
  Gene Name: solute carrier organic anion transporter family, member 6A1
  Uniprot ID: Q86UG4
  ENST ID: ENST00000506729
  CDS Start-End: 173-2332
tttgcctcctgccctaggagaaacgttcgctctggaggcttgggcggcaagagccccttgtggccaccgagtcctccgacgccctcgccaggctggcctttgggttggcccaggcaggacgggcagccgagagcactcgggccgcgtcgccaggagccgcccagggtgagccatgttcgtaggcgtcgcccggcactctgggagccaggatgaagtctcaaggggagtagagccgctggaggccgcgcgggcccagcctgctaaggacaggagggccaagggaaccccgaagtcctcgaagcccgggaaaaaacaccggtatctgagactacttccagaggccttgataaggttcggcggtttccgaaaaaggaaaaaagccaagtcctcagtttccaagaagccgggagaagtggatgacagtttggagcagccctgtggtttgggctgcttagtcagcacctgctgtgagtgttgcaataacattcgctgcttcatgattttctactgcatcctgctcatatgtcaaggtgtggtgtttggtcttatagatgtcagcattggcgattttcagaaggaatatcaactgaaaaccattgagaagttggcattggaaaagagttacgatatttcatctggcctggtagcaatatttatagcattctatggagacagaaaaaaagtaatatggtttgtagcttcctcctttttaataggacttggatcacttttatgtgcttttccatccattaatgaagaaaataaacaaagtaaggtaggaattgaagatatttgcgaagaaataaaggttgtcagtggttgccagagcagtggtatatcattccaatcaaaatacctgtctttcttcatccttgggcagactgtgcagggaatagcaggaatgcctctttatatccttggaataacctttattgatgagaatgttgctacacactcagctggtatctatttaggtattgcagaatgtacatcaatgattggatatgctctgggttatgtgctaggagcaccactagttaaagtccctgagaatactacttctgcaacaaacactacagtcaataatggtagtccagaatggctatggacttggtggattaattttctttttgccgctgtcgttgcatggtgtacattaataccattgtcatgctttccaaacaatatgccaggttcaacacggataaaagctaggaaacgtaaacagcttcatttttttgacagcagacttaaagatctgaaacttggaactaatatcaaggatttatgtgctgctctttggattctgatgaagaatccagtgctcatatgcctagctctgtcaaaagctacagaatatttagttattattggagcttctgaatttttgcctatatatttagaaaatcagtttatattaacacccactgtggcaactacacttgcaggacttgttttaattccaggaggtgcacttggccagcttctgggaggtgtcattgtttccacattagaaatgtcttgtaaagcccttatgagatttataatggttacatctgtgatatcacttatactgcttgtgtttattatttttgtacgctgtaatccagtgcaatttgctgggatcaatgaagattatgatggaacagggaagttgggaaacctcacggctccttgcaatgaaaaatgtagatgctcatcttcaatttattcttctatatgtggaagagatgatattgaatatttttctccctgctttgcagggtgtacatattctaaagcacaaaaccaaaaaaagatgtactacaattgttcttgcattaaagaaggattaataactgcagatgcagaaggtgattttattgatgccagacccgggaaatgtgatgcaaagtgctataagttacctttgttcattgcttttatcttttctacacttatattttctggtttttctggtgtaccaatcgtcttggccatgacgcgggttgtacctgacaaactgcgttctctggccttgggtgtaagctatgtgattttgagaatatttgggactattcctggaccatcaatctttaaaatgtcaggagaaacttcttgtattttacgggatgttaataaatgtggacacacaggacgttgttggatatataacaagacaaaaatggctttcttattggtaggaatatgttttctttgcaaactatgcactatcatcttcactactattgcatttttcatatacaaacgtcgtctaaatgagaacactgacttcccagatgtaactgtgaagaatccaaaagttaagaaaaaagaagaaactgacttgtaactggatcatcattgtgattgcagatcatttgaggatcagagtgtgaaaacgagtttctcttttacagattctccaagatttgtttctgtgcccaactttcagaagaggaaaatcacacattatgtttacataagtagcaaaaatatatttatggtgatctgcattttcataataaagtgtcctattgtgaaacatttctgataatgtttttaatgtatgtagaatttttaggatttactgggagaattaaagtttaataattttagattatttacatttcttcttaatattctgctgtctagaaatattaaaaattatacaactaggaaataaagtaaaataataacattcaaagcc

SEQ ID NO: 184778 - DNA, 432 bp, Homo sapiens
  Payload ID: 16387
  Gene Symbol: SLCO6A1
  Gene Name: solute carrier organic anion transporter family, member 6A1
  ENST ID: ENST00000511588
  CDS Start-End: 1-78
ctaaatgagaacactgacttcccagatgtaactgtgaagaatccaaaagttaagaaaaaagaagaaactgacttgtaactggatcatcattgtcaggattgcagatcatttgaggatcagagtgtgaaaacgagtttctcttttacagattctccaagatttgtttctgtgcccaactttcagaagaggaaaatcacacattatgtttacataagtagcaaaaatatatttatggtgatctgcattttcataataaagtgtcctattgtgaaacatttctgataatgtttttaatgtatgtagaatttttaggatttactgggagaattaaagtttaataattttagattatttacatttcttcttaatattctgctgtctagaaatattaaaaattatacaactaggaaataaagtaaaataataacattc

SEQ ID NO: 184779 - DNA, 1611 bp, Homo sapiens
  Payload ID: 16387
  Gene Symbol: SLCO6A1
  Gene Name: solute carrier organic anion transporter family, member 6A1
  ENST ID: ENST00000513675
  CDS Start-End: 70-1470
gttggcccaggcaggacgggcagccgagagcactcgggccgcgtcgccaggagccgcccagggtgagccatgttcgtaggcgtcgcccggcactctgggagccaggatgaagtctcaaggggagtagagccgctggaggccgcgcgggcccagcctgctaaggacaggagggccaagggaaccccgaagtcctcgaagcccgggaaaaaacaccggtatctgagactacttccagaggccttgataaggttcggcggtttccgaaaaaggaaaaaagccaagtcctcagtttccaagaagccgggagaagtggatgacagtttggagcagccctgtggtttgggctgcttagtcagcacctgctgtgagtgttgcaataacattcgctgcttcatgattttctactgcatcctgctcatatgtcaaggtgtggtgtttggtcttatagatgtcagcattggcgattttcagaaggaatatcaactgaaaaccattgagaagttggcattggaaaagagttacgatatttcatctggcctggtagcaatatttatagcattctatggagacagaaaaaaagtaatatggtttgtagcttcctcctttttaataggacttggatcacttttatgtgcttttccatccattaatgaagaaaataaacaaagtaaggtaggaattgaaggtattgcagaatgtacatcaatgattggatatgctctgggttatgtgctaggagcaccactagttaaagtccctgagaatactacttctgcaacaaaaacagggaagttgggaaacctcacggctccttgcaatgaaaaatgtagatgctcatcttcaatttattcttctatatgtggaagagatgatattgaatatttttctccctgctttgcagggtgtacatattctaaagcacaaaaccaaaaaaagatgtactacaattgttcttgcattaaagaaggattaataactgcagatgcagaaggtgattttattgatgccagacccgggaaatgtgatgcaaagtgctataagttacctttgttcattgcttttatcttttctacacttatattttctggtttttctggtgtaccaatcgtcttggccatgacgcgggttgtacctgacaaactgcgttctctggccttgggtgtaagctatgtgattttgagaatatttgggactattcctggaccatcaatctttaaaatgtcaggagaaacttcttgtattttacgggatgttaataaatgtggacacacaggacgttgttggatatataacaagacaaaaatggctttcttattggtaggaatatgttttctttgcaaactatgcactatcatcttcactactattgcatttttcatatacaaacgtcgtctaaatgagaacactgacttcccagatgtaactgtgaagaatccaaaagttaagaaaaaagaagaaactgacttgtaactggatcatcattgtattctccaagatttgtttctgtgcccaactttcagaagaggaaaatcacacattatgtttacataagtagcaaaaatatatttatggtgatctgcattttcataataaagtgtcctattgtgaaac

SEQ ID NO: 184780 - DNA, 3801 bp, Homo sapiens
  Payload ID: 16388
  Gene Symbol: SBSPON
  Gene Name: somatomedin B and thrombospondin, type 1 domain containing
  Uniprot ID: Q8IVN8
  ENST ID: ENST00000297354
  CDS Start-End: 206-1000
gggcagccccgccacccgcccgggcctcgacgggcgcgccgccagggctggggaggggcggcgcggagggcgggggccgggcgcagggcagggcccggctgtgcctcgccggccgctcgggcagctcccgggccgcggccagccgaggatcagagcgcttgccccgggggtctgtcgcgtcgcaggcgccgccggagccctggccatgaggaccctgtggatggcgctgtgcgcgctgtcgcggctgtggcccggggcccaggccggctgcgccgaggccgggcgctgctgtcccggccgggaccccgcctgcttcgcccgcggctggaggctggacagggtctacgggacgtgtttctgcgaccaagcctgtcgcttcaccggggactgctgcttcgactacgacagggcgtgcccagctcgcccgtgcttcgtgggggaatggagcccctggagtggttgtgcagaccagtgcaagcctacaacccgtgtgcggaggcgctcggtgcagcaggagcctcagaacggcggggcgccctgcccacccctggaagagagagctggctgcctggagtactccaccccgcagggccaggactgcgggcacacctatgttcctgcctttataactacctctgcattcaacaaggagagaacacgacaagctacgtctccacactggtctacacacacagaggatgctggatactgtatggagtttaagacagagtccttgactcctcactgtgctctggaaaactggcccttgactagatggatgcagtatctccgagagggatacacggtgtgtgtggattgtcagcctccagctatgaactctgtgagccttcgttgttctggagatggcctggactccgatggaaatcagactctccattggcaagcaattggtaatcctcggtgtcaaggaacttggaaaaaagttcggcgagtagaccagtgttcttgtccagctgttcacagttttatttttatatagatggtgatataaatatttccaaatgcatttgtaaacattctaaatattctcaagtcatgttcaatgtttcctaaaccttcaattttggccaaagtccccaaacacatcattgccacactctgaagtagagaaagaaaatttaggggccagttctcaaggaacacaggtcctttatttttattttaactaagttgaagacccactcaaaaagctcttgtggttttatgttcttgacctttcaactggagtcctctcattcagcaggtggcccgtgagacacagaatacatgtctgtttgctaaagtaaaattactgtaactcagtccgattattggtgacggaagtgtcatttaaggggatctatgttttgaaccttgcagtctattttataatcttttaaaagtttctcactttaaaacatgtatacaggtatgcacactctacacatatatttccatatatttaatattccataaattctgaaataatttcaagcaaattatcacaaataatttttccacagggcaaattatttaaaattttagtaagcattctgtaatgaaaaaccaagttatactaaaaacattttttgaagaagaaattttttttttgcttaagaagtgaaaggatcaaatgctcattgtaggtcaatgggagttcttttaaatgttataattttcatgaaaagaaatgttgacaccagtgaatgaaacaattgctttcattctgaaaattctaccaccatttgcatctaagattatttccaaggcttaaagcctgaagctgaataaaataatctttcagagtccagcttcaagtttagttgatgtaagctcactatttttttcctaccgcatgcattttctaatgtttggggtggatggtgtgtcggttatggaaggcatagacgtcattacaggtgctacgatctcacacacacacaaggaaatgttagtctccttattttatgattggaaaatcaatgacctagaggcaaaatggcatgtttaaggacctgggatgacaagtcattctgcagtcagccacagagccaaatttggactcctcaaccagaactccatgaaaagcctgactttgccaaacactgtgctggaaaagctaagcccctttcatttgtgaagtaaattttaaattcaagatatttagtttagagaattgagtcttgagatgtaaactacatgagatttctttggtttcaattgaataatattcactaacaaatgatttactaaaatacgtatttcttggtccttatcatgtaatgacagattcacaacagcaataaggatggagatttccccaataattaataacaccgagagtagcaatattttttactgtattttcatttaattgtcaaagttgtttttgtggaaaattaaattcttcagaaattaataataaaatatgtgagtctcatcaaggctagcaactttaagtcagtattaacattttcatactgtttctaacatttattaagctagatttttgaagctatgtctgggtaatttccaatgttacttaaaagtttttttttctttgagacagagtctcactctgttgcccaggctggagtgcagtggccccatctcggctcactgcaagctccgcctcccgggttcacgccattcttctgcctcagcctcccaagtagctgggactacaggcgccgtcatcacgcctggctaattttttgttttttttttttagtagagacagggtttcactgtgttagccagggtggtctcgatctcctgacctcgtgatccacccacctcggcctcccaaggtgctgggattatgggcgtgagccactgcgcctggcctgttacttaaaatttttatactagtaaataaactttttgttcacatttataaaagctctatatttgtttgactagaaaataacccaaattttctggaccagtcagagaatgataaaatttcaccaaaaataaaacaaaaaaatccttcagaactgataggtataggtacaacaactactaatagcaataaagcaatggtgcttttatagttccgatatgtgttataacatttaacataattgaggtgtataaaataaatttttcaccttatgcatttaatttttggtggatgaccagtaattgctttcttattgaagttaaatttttgttatttctattcttgagaaaattttatgggctagaggagttaactgttaaataacagttttgaaaagcttgttattaattttagcaaagcccaagggaaatagttcagaactgaaacatgtagtccaagtgatgaatgaaaaaccaaaagtttttattttcaaatttaaaaatcaaagtatataagacctcttggcactcttttttaataagtaccttagtcttagggccctatccccaggcactctaaaaagatttacgaactctaaaatcccttaatagactgattttcaaaagtgctcatggaaaataattcgaacaaaaataaatacagccaccaggaaagaagggaaaagaagcaagggataatggccatttttgaagagaaaagtgaaaaacaagtgaaggaaaaaaagaatagaaaaaggaataaggtaactataatcacagtattctttttggagttttgctttggtttttattcgagaatgttacaattaagcataaaccgcaacagcaataatttaaagtgtttggttatcatctggcataaaaatttcagttagctatcttttctagatgtgcacaaaattgatgttaataaaactggttcctgccctctaagaa

SEQ ID NO: 184781 - DNA, 618 bp, Homo sapiens
  Payload ID: 16389
  Gene Symbol: SST
  Gene Name: somatostatin
  Uniprot ID: P61278
  ENST ID: ENST00000287641
  CDS Start-End: 109-459
agcacacaagccgctttaggagcgaggttcggagccatcgctgctgcctgctgatccgcgcctagagtttgaccagccactctccagctcggctttcgcggcgccgagatgctgtcctgccgcctccagtgcgcgctggctgcgctgtccatcgtcctggccctgggctgtgtcaccggcgctccctcggaccccagactccgtcagtttctgcagaagtccctggctgctgccgcggggaagcaggaactggccaagtacttcttggcagagctgctgtctgaacccaaccagacggagaatgatgccctggaacctgaagatctgtcccaggctgctgagcaggatgaaatgaggcttgagctgcagagatctgctaactcaaacccggctatggcaccccgagaacgcaaagctggctgcaagaatttcttctggaagactttcacatcctgttagctttcttaactagtattgtccatatcagacctctgatccctcgcccccacaccccatctctcttccctaatcctccaagtcttcagcgagacccttgcattagaaactgaaaactgtaaatacaaaataaaattatggtgaaattatgaaaaatgtgaa

SEQ ID NO: 184782 - DNA, 4295 bp, Homo sapiens
  Payload ID: 16390
  Gene Symbol: SSTR1
  Gene Name: somatostatin receptor 1
  Uniprot ID: P30872
  ENST ID: ENST00000267377
  CDS Start-End: 618-1793
tggtcatcgcacggcggcagctcctcacctggatttagaagagctggcgtccccgcccgcccaagcctttaaactctcgtctgccagaacccgccaactctccaggcttagggccagtttccgcgattctaagagtaattgcgtgggcacctgtgctggggccaggcgcaaagaagggagttggtctgcgcgaagatcgtcaacctgctaacagaccgcacatgcactttgcaccgaccatctacgtctcagtctggaggttgcgcactttggctgctgacgcgctggtggtgcctattaatcatttaccagtccagagccgcgccagttaatggctgtgccgtgcggtgctcccacatcctggcctctcctctccacggtcgcctgtgcccgggcaccccggagctgcaaactgcagagcccaggcaaccgctgggctgtgcgccccgccggcgccggtaggagccgcgctccccgcagcggttgcgctctacccggaggcgctgggcggctgtgggctgcaggcaagcggtcgggtggggagggagggcgcaggcggcgggtgcgcgaggagaaagccccagccctggcagccccactggcccccctcagctgggatgttccccaatggcaccgcctcctctccttcctcctctcctagccccagcccgggcagctgcggcgaaggcggcggcagcaggggccccggggccggcgctgcggacggcatggaggagccagggcgaaatgcgtcccagaacgggaccttgagcgagggccagggcagcgccatcctgatctctttcatctactccgtggtgtgcctggtggggctgtgtgggaactctatggtcatctacgtgatcctgcgctatgccaagatgaagacggccaccaacatctacatcctaaatctggccattgctgatgagctgctcatgctcagcgtgcccttcctagtcacctccacgttgttgcgccactggcccttcggtgcgctgctctgccgcctcgtgctcagcgtggacgcggtcaacatgttcaccagcatctactgtctgactgtgctcagcgtggaccgctacgtggccgtggtgcatcccatcaaggcggcccgctaccgccggcccaccgtggccaaggtagtaaacctgggcgtgtgggtgctatcgctgctcgtcatcctgcccatcgtggtcttctctcgcaccgcggccaacagcgacggcacggtggcttgcaacatgctcatgccagagcccgctcaacgctggctggtgggcttcgtgttgtacacatttctcatgggcttcctgctgcccgtgggggctatctgcctgtgctacgtgctcatcattgctaagatgcgcatggtggccctcaaggccggctggcagcagcgcaagcgctcggagcgcaagatcaccttaatggtgatgatggtggtgatggtgtttgtcatctgctggatgcctttctacgtggtgcagctggtcaacgtgtttgctgagcaggacgacgccacggtgagtcagctgtcggtcatcctcggctatgccaacagctgcgccaaccccatcctctatggctttctctcagacaacttcaagcgctctttccaacgcatcctatgcctcagctggatggacaacgccgcggaggagccggttgactattacgccaccgcgctcaagagccgtgcctacagtgtggaagacttccaacctgagaacctggagtccggcggcgtcttccgtaatggcacctgcacgtcccggatcacgacgctctgagcccgggccacgcaggggctctgagcccgggccacgcaggggccctgagccaaaagagggggagaatgagaagggaaggccgggtgcgaaagggacggtatccagggcgccagggtgctgtcgggataacgtggggctaggacactgacagcctttgatggaggaacccaagaaaggcgcgcgacaatggtagaagtgagagctttgcttataaactgggaaggctttcaggctacctttttctgggtctcccactttctgttccttcctccactgcgcttactcctctgaccctccttctattttccctaccctgcaacttctatcctttcttccgcaccgtcccgccagtgcagatcacgaactcattaacaactcattctgatcctcagcccctccagtcgttatttctgtttgtttaagctgagccacggataccgccacgggtttccctcggcgttagtccctagccgcgcggggccgctgtccaggttctgtctggtgcccctactggagtcccgggaatgaccgctctccctttgcgcagccctaccttaaggaaagttggacttgagaaagatctaagcagctggtcttttctcctactcttgggtgaaggtgcatctttccctgccctcccctgtccccctctcgccgcccgcccgccaccaccactctcactccacccagagtagagccaggtgcttagtaaaataggtcccgcgcttcgaactccaggctttctggagttcccacccaagccctcctttggagcaaagaaggagctgagaacaagccgaatgaggagtttttataagattgcggggtcggagtgtgggcgcgtaataggaatcaccctcctactgcgcgttttcaaagaccaagcgctgggcgctcccgggccgcgcgtctgcgttaggcagggcagggtagtgcagggcacaccttccccggggttcggggttcggggttcggttgcagggctgcagcccgccttggctttctccctcacccaagtttccggaggagccgacctaaaagtaacaatagataaggtttcctgctccagtgtatctcaaaagaccgggcgccaggggcgggggacctagggcgacgtcttcagagtccgccagtgttggcggtgtcgccgcaacctgcaggctcccgagtggggcctgcctggtctctagagggttgctgcctttcaagcggtgcctaagaagttattttcttgtttaacatatatatttattaatttatttgtcgtgttggaaaatgtgtctctgctttccttttctctgcttgcctagccccaggtcttttctttgggaccctgggggcgggcatggaagtggaagtaggggcaagctcttgccccactccctggccatctcaacgcctctcctcaatgctgggccctcttatctcatcctttcctctagcttttctatttttgattgtgttgagtgaagtttggagatttttcatacttttcttactatagtctcttgtttgtcttattaggataatacataaatgataatgtgggttatcctcctctccatgcacagtggaaagtcctgaactcctggctttccaggagacatatataggggaacatcaccctatatataatttgagtgtatatatatttatatatatgatgtggacatatgtatacttatcttgctccattgtcatgagtccatgagtctaagtatagccactgatggtgacaggtgtgagtctggctggaacactttcagtttcaggagtgcaagcagcactcaaacctggagctgaggaatctaattcagacagagactttaatcactgctgaagatgcccctgctccctctgggttccagcagaggtgattcttacatatgatccagttaacatcatcactttttttgaggacattgaaagtgaaataatttgtgtctgtgtttaatattaccaactacattggaagcctgagcagggcgaggaccaataattttaattatttatatttcctgtattgctttagtatgctggcttgtacatagtaggcactaaatacatgtttgttggttgattgtttaagccagagtgtattacaacaatctggagatactaaatctggggttctcaggttcactcattgacatgatatacaatggttaaaatcactattgaaaaatacgttttgtgtatatttgcttcaacaactttgtgctttcctgaaagcagtaaccaagagttaagatatccctaatgttttgcttaaactaatgaacaaatatgctttgggtcataaatcagaaagtttagatctgtcccttaataaaaatatatattactactcctttggaaaatagatttttaatggttaagaactgtgaaatttacaaatcaaaatcttaatcattatccttctaagaggatacaaatttagtgctcttaacttgttaccattgtaatattaactaaataaacagatgtattatgctgttgcaa

SEQ ID NO: 184783 - DNA, 7683 bp, Homo sapiens
  Payload ID: 16391
  Gene Symbol: SSTR2
  Gene Name: somatostatin receptor 2
  Uniprot ID: P30874
  ENST ID: ENST00000357585
  CDS Start-End: 370-1479
tcccagcggcgcagccacccatgcgcgcgcgctcgcaagaccaccagcgcccagagccccagtctgaggcttggcgccgggggtctgcgggcgaggggagctctctacgtgcgaggggctagcgggagccggcacaagagggtcgaggagccaggaaccccaaacgtccggcgccaggcgctagccaagctgctgcgcgccccggcgcccagctggctcggggacagccgctgggtgtcggagaccggagctagcggattgcagcggaaaagcaaagatgtcacactggatccttggcctccagggtccattaaggtgagaataagatctctgggctggctggaactagcctaagactgaaaagcagccatggacatggcggatgagccactcaatggaagccacacatggctatccattccatttgacctcaatggctctgtggtgtcaaccaacacctcaaaccagacagagccgtactatgacctgacaagcaatgcagtcctcacattcatctattttgtggtctgcatcattgggttgtgtggcaacacacttgtcatttatgtcatcctccgctatgccaagatgaagaccatcaccaacatttacatcctcaacctggccatcgcagatgagctcttcatgctgggtctgcctttcttggctatgcaggtggctctggtccactggccctttggcaaggccatttgccgggtggtcatgactgtggatggcatcaatcagttcaccagcatcttctgcctgacagtcatgagcatcgaccgatacctggctgtggtccaccccatcaagtcggccaagtggaggagaccccggacggccaagatgatcaccatggctgtgtggggagtctctctgctggtcatcttgcccatcatgatatatgctgggctccggagcaaccagtgggggagaagcagctgcaccatcaactggccaggtgaatctggggcttggtacacagggttcatcatctacactttcattctggggttcctggtacccctcaccatcatctgtctttgctacctgttcattatcatcaaggtgaagtcctctggaatccgagtgggctcctctaagaggaagaagtctgagaagaaggtcacccgaatggtgtccatcgtggtggctgtcttcatcttctgctggcttcccttctacatattcaacgtttcttccgtctccatggccatcagccccaccccagcccttaaaggcatgtttgactttgtggtggtcctcacctatgctaacagctgtgccaaccctatcctatatgccttcttgtctgacaacttcaagaagagcttccagaatgtcctctgcttggtcaaggtgagcggcacagatgatggggagcggagtgacagtaagcaggacaaatcccggctgaatgagaccacggagacccagaggaccctcctcaatggagacctccaaaccagtatctgaactgcttggggggtgggaaagaaccaagccatgctctgtctactggcaatgggctccctacccacactggcttcctgcctcccacccctcacacctggcttctagaatagaggattgctcagcatgagtccaattcagagaacggtgtttgagtcagcttgtctgattgaatgataatgtgctaaattgattacctcccccttaaagcgaacactgaaatgcaggtagacaattcaaagtctggagaagagggatcatgcctggatatgatctttagaaacaacaaaaatagaaaaaaataagtatctgtgtgtttgtgtattgaaaactcaatatgtaatcttgtgtttttatatgtatacttgtatattcctatttattctctgtataggcattacctacgttcctgtgtttacatacacaagtagcaaattcgagtatgcatagtgtagatggacatttgccacaacacactgcccgcagaaatggacttaccgtgaagccaataaagttcaagcttcagggatctctcttgcacgggccttgccaaggcccaggagggacttgggcagtatgttcatgtggtcatatgtttttgtaaaaaattgtgaaagtaagatatgtttgtattgtttttcttaaagaggaacctcgtataagcttcaagcctcacaaaccttctagcctctgcccttggggatttgcttcattaatttcaggcaagtgaggtcaatgtaagaagggaaagggagaagatatttgaagaaccagaatgtaaattcatgtgtttccacttctcagatatagtcagagaattattcatttgcccaaaaggacttaagtggttgtggtcatccatcattgtatttatcaagacaaagccaactttgttataagattgcatttttttcttttcaaattgctttagtttttcttagggagctatgagggggaaaaatcactaacatgaaaggcaaaaaatggactatgattcctgtggggaaacaatttcattctctccatcgtgaaaataagtgaataagagtgaagcaaaattacacctttatgagaaaccataaaattgtttttatttttcaggccagacatagcttcctaatgaaagaaaatggaaatgtaattcgacgactcctcaaaggggactttagaggacttcatacaaagctgggcattaagaaaaccacaatgcatggccgggcgtggtggcttacacctgtaatcccagcactttgggaggccgaggtgggtggatcacccgaggtcaggagttcgagaccagcctggccaacatggtgaaaccccatcactactaaaaatatgtaaattagtcgggcgtggtgtcacgtgcctgtaatcctagctgctcgggaggctgaggcaggagaatcacttgaacttgggaggtggaggttgcagtaagctgagattgtgccactgcactctagcctgagcaacaagagcaaaactcagtctcaaaaaaaaaaaaaaaaaaaaaaaaaaaaaaaaaaaaggaaaaccacaatgcgtactaaagaccagaagacattgttcacaaaacaaaagcaccctcacctgccaatgaatatgcagcgtgcagggggtgtggtgtgagtgttggtggggccccacctctcggagatactgctgtgctgccttcctcactgactgtatacatagtaactgtcatatctttaatgccatggactcactgagccgctctgcaaggactattgtagacaggcacttcacaccataaagtggcatttttttcgttccccaaactgacatttacaagcgataagaaaagagacaatatccatttcattgactgatcattttctagagtatgaagaaatacacacctgggtgtctgcaaggatgtcatcatctttgggtttcatctgagagcatcactcagcatctcacacatagatgttaccatatttttaaatgagctttcctcatccggctccctaagcaagcgctgttggccggtgggagtgactaagtgctccacctgtgggtgtccttcttaatgtgctgcttttgttctgtataaattcacaccacctcactcccaaaagtacttcctgtggctcagaaaaatatgttcaataagattttggatagataaatccatacaaaaataaaaagaggtatagttataaaacaagactacagaaaaagttgtggcagaaattgcatgcaggaaaatcccacaccattagtaaaagtaaggtcaactgtaagttcagctcagggcttcctagcagccatgtttagcgaagtgtgatttttttttttaaacaaaaacaagcaaagatttggaagaaaatgctttagacctaactttacaattattataacataagatgttccagggtccttgaataaatgctgagttttagggaaatgattccaagggaccaagaattggtagaaataatttcaaggcagagaagactaattctacaggccgggcgtggtggcttatgcctgtaatcccacactttgggaggctgaggtgggtggattgcctgaggtcaagagttcaagaccagcctggccaacatggtgaaaccctgtctctactaaaaatacaaaaaattacccaggcatggtggcgggcgcctgtaatcccagctacttgggaggctgagacaggagaatggcttgaacccaggaggtggagattgcggtgagctgagatcgtgccattgcactccagcctgggcaacaagagcgaaacttcatctcaaaaaaaaaaaacaaagactaattctatagtacccatgaccctgcaaccagagaaactgcctgtagggaggccagagtccaaagcagccacctgtaacctgaaaatgaaacgcagacccaggcatctgtgggtcttcatcagcaggatgaccattctaaggctaaaagacaggcctttaaatctgatgctataattccatccaaatacacagttaggtttctaccatagggaaagctattctctactttttgaagtatctgtttcaaagataacttgctctctggttctcttttatctaaaagagagaatcaacatgctaatttaaaggttaacatcattttaattcaaaaattttagtctccattccatatttaatgatgaagacaaatctgctgggtgctgggagggaataaaaagtaatgcaccccattgatttcagagtatctgatcacttgggttatgcaagctgctacttacccgccattagcatgggtagttaagtgctgattaaacctaagtggactcagtgaaaaagatattgggaaaaataatatgatattgtggcctatgttgaatgatgttagcttgtgtttcagtaacagagttgggtaatactggacgtgtagatgaagctttagcagggctgggcacggtggctcatgcctgtaatcccagcactttgggaggctgaggcgggtggattacctgaggtcaggagttcaagaccagcctggccaacatggggaaaccctgtctctactaagaatacaaaaattagctgggtgtggtggcgtgtgcctgtaatcccagctactcaggaggctgagacaggagaatcgcttgaacccgggaggcgaaggttgcagtgagccaagatcgcgccactgcacttcagcctgggtgacagcacaagactccatctcaaaaaaaaaaaaaaaaggaagaagaaaaagaaacttaagtggggttcatacatagcatggcagagggacactggagaataaaatggcatgcagagaggaacacgcgggccagtggatgaggcttctagacctggcagtgaactggagtctatttgcttacacaaatttaaccttctctccatgatggaatacaagtgtttcttgccaaaactcgcagccccagctgccctagatgaggagcaccgtgctggaaaagtgcacaggctgatcacagagacaggtaggaagcaatggactgttaaaatgcatgttccgggctggggatggtggctcacacctgtgatctcagcactttgggaggccgaggctggggaatcgcttgagcccaggattttgagactagcctaggcaatatggtgagaccctgcccttaaaaaaaaaaaagaaaagaaaagaaaagaaaaaaagattcatattcctgatcagctctgaatgtgactattcaatgaagacagtaaagttacagtgtaaggcacacatgacctttggccttgctaaagaagagtggctgaaggtctagcaaattaatgcttgtcttaggttacctgttgatttaaaaacaacaacaacaaaaacccataaaaatagtaaaatataaaaacaaattagtgttttatagaccctggggaaaagaattttcagcaaagtacaaaaatttaaagcattcctttctttaattttgtaattctttactgtagaacagctcaaaatatcagttctgttttaagtaacagaattgataactgagcagggaaacgtaatttggattgtaaaattcttgctttaataaaaattctttaaacagtcaaaatagaaagaaagaaagaaaggtggcaagagaattatcaaaagtttccatagatggttgggaagatctgattagtgtttccaaaatgcttatcattctaagaatcccaatagctggcaagccaagcagtggaacttatagtaacaacaatcaatcacttgtctcatcccacatttttgccaaattcaaaaacaccaaatttcccatcaaatgttctgtcagagtaaacctttacctaagtgcttgttttgcttttaatatgtgaatttctgggaacattcccatgggcagcctctaattttttttttttttttttgagacagagtttcgctttttcacccaggctggagcgcagtggcacgatcttggctcactgcaacctccacctaccggattcaagtgattctcctgcctcagcctcccaagtagcagggactacaggcacgtgccaccacgcccagctaatttttgtatttttagtggagatgggtttttgccatgttggccaggcaggtcttgaactcttgacctcaggtgatccgcctgcctcagtgtcccaaagtgttgggattacaggcacgagccaccgcgctcagccaatttttcctcaactctctctttcctggacgggctgcgttggggggaggtgcagggaaagaacacctctttgcttagacattggtgtcgacagtggggatactaagttcatctcctgatcctgctaggcctggaagcaggaaagaaatgtcctggttagagataaaattgttctatccttttagaaaagcctgttaaggaatatgatgcaaagccaccttcgacgaaatctgaaatgataccccacagccttgtccaccccaattattcagtgacagggctccagttgcttaagccatagagaaggcccctttgcagtgggagtcactgaagacagaaagggaagcccaggatgaacccagtcctaagggctgctgggggccaccaaataagactgttttagccctggacacagagggagacacagtcatcccagatccttacaaagaatacattgccaaggaccccgaaggaaatctgcttgtcttaagagaggaagacccacgaccagctctctgggactacctgtcaactcagcaggtgcagccagggagcagccatgcttcttctgccctcccagtaggctgggctatcagttcctgggaggggtcctgtccccatgtaaggggatatgtacattgctgagtacgctgatatctttttcatgggtatgattttttaacaagaaagctaaatggttctcgtgtaacataactgatatagtttggctgtgtccccacccaaatcttatcttgaactgcagctcccataatccccaggtgttgtgggagggacccagtgggaggtaattgaatcatgggggtggttaccgccatgctgttctcgtgatagcgagtgagttctcacgagatctgatggttttataaggggctttccccctccttcgctctgcacttctccttgctgccatgcgaagaaggatgtgtttgcttccccttctgccatgattgtaagtttcctgaggcctccccagccatgttaaactttgagttaattaaacctctttcctttataaatta

SEQ ID NO: 184784 - DNA, 4100 bp, Homo sapiens
  Payload ID: 16392
  Gene Symbol: SSTR3
  Gene Name: somatostatin receptor 3
  Uniprot ID: P32745
  ENST ID: ENST00000610913
  CDS Start-End: 535-1791
tccctgtcacgcatctctcatcactccccctcattctgcctttcctcctactcacggtctcctctccctctccctctctctctctccccctccctctttctctctctctctctttctccacctcctcccgaccccctttcccctctatttctattggcttctgtgtcccttgctcccctcttctcttcctcaccctgggaagcttctcccccctatccttgcccctgcccccccaggatgtgtcctggagatggggggtgacgtaccaggctctggttgggaagtcagggccggagaccagatgggagaggctctgtggacagccgtggccgagggcctgggagggaacctgagcccgcaagcggtctagaagtgggtgccttgtggggaccctagttaggagtgccctgggggcacctggggactgggcagggagaggggacagcagaatgataaccagcctggcggcaaggagggaagccctcaccccatgggcaggcaaatagctgactgctgaccaccctcccctcagccatggacatgcttcatccatcatcggtgtccacgacctcagaacctgagaatgcctcctcggcctggcccccagatgccaccctgggcaacgtgtcggcgggcccaagcccggcagggctggccgtcagtggcgttctgatccccctggtctacctggtggtgtgcgtggtgggcctgctgggtaactcgctggtcatctatgtggtcctgcggcacacggccagcccttcagtcaccaacgtctacatcctcaacctggcgctggccgacgagctcttcatgctggggctgcccttcctggccgcccagaacgccctgtcctactggcccttcggctccctcatgtgccgcctggtcatggcggtggatggcatcaaccagttcaccagcatattctgcctgactgtcatgagcgtggaccgctacctggccgtggtacatcccacccgctcggcccgctggcgcacagctccggtggcccgcacggtcagcgcggctgtgtgggtggcctcagccgtggtggtgctgcccgtggtggtcttctcgggagtgccccgcggcatgagcacctgccacatgcagtggcccgagccggcggcggcctggcgagccggcttcatcatctacacggccgcactgggcttcttcgggccgctgctggtcatctgcctctgctacctgctcatcgtggtgaaggtgcgctcagctgggcgccgggtgtgggcaccctcgtgccagcggcggcggcgctccgaacgcagggtcacgcgcatggtggtggccgtggtggcgctcttcgtgctctgctggatgcccttctacgtgctcaacatcgtcaacgtggtgtgcccactgcccgaggagcctgccttctttgggctctacttcctggtggtggcgctgccctatgccaacagctgtgccaaccccatcctttatggcttcctctcctaccgcttcaagcagggcttccgcagggtcctgctgcggccctcccgccgtgtgcgcagccaggagcccactgtggggcccccggagaagactgaggaggaggatgaggaggaggaggatggggaggagagcagggaggggggcaaggggaaggagatgaacggccgggtcagccagatcacgcagcctggcaccagcgggcaggagcggccgcccagcagagtggccagcaaggagcagcagctcctaccccaagaggcttccactggggagaagtccagcacgatgcgcatcagctacctgtaggggcctggggaaagccaggatggcccgaggaagaggcagaagccgtgggtgtgcctagggcctacttcccaaggtgccacaggcccatgatgggatgttgaggggcctggactttgatgctattgctgccaggtcttgctgtgtgaccttgggtaggttgcttctactctctgggccttgttttctcctctgtgactcagggataggagtcatcagcctggatgagctatgtcagatgagaggtttggagggcactgttgctgggctgacctggctgagcaggcaaaaggtgggtgcagactggcctccccccagggatggagtgtcttggggcatcaactagaatcttggccctcagagggataaaccaaggccaggatttcttgggctcagagtcaggaacacaggagctgctgggggctgggctggaaacctaaacagaagaaagcctaacccggtgggaggagtggggcagaaatggtcaggccccagatcagctccctcccctcgactgtgaggccttggaccagctctgctcctctctaggcctcaggcttcacctgggtaaaacccaacaacctctacacccttttggcccaggcagtcaatgctggaggtcctgtgctcctggacgggaagagcaggtgaatttcctgctcatggaagcgaatgaagtccagcttcagggtctctcactgcctgggcttttgcaaggccctgcatctacttttgtacttgtcattttgtattcgttttcttaaagagggacctcgaactgcataagcttaggccacccaaagcctggctctgcccctgctgaggtcagccacccaatccccaaggaagctcatgttgggtcttatggctggagtaggggcccccgggggttcccaggtcttttgagggcttccaggcacctccttgtaggaagggccatccctgttcctctccttgtgacccatattctcccttcctggagaccgagacagggacccagcccatgaggactggcatggaaaggcagagtgtctgaagagcgctgtgaggagaaggaagaggaagggagaagaggaagaggaaggagaaggaagaggaagacaagggggaaaggggaggatgaggagggggaaggagaagtacagatctgtttcctggagccgtctttggcccccctgggctgagctcagtggtagcatctgtgaacctgagttgccgacaacagccccacccaaccagtactgagggaaggacacgatcagggtggaacagccagggtgcaatggcaaatgcacagagtacagacaggcacagggcctgcgtccctgaggggcctcagagtgctgccaagagggctcaggccttaataaagccctagggtggagctggctaccagggacattgggaggactggggagctccctccccatgctctatcatcctggagactacaggtcgggaggcccagggaagacaagaagaggctgaagtgggactgtggagggggaccatggggagcagccaccatccaaggctgggcctagactccctcccagagatggtccctcagagctgtggtgaggctggccctgggagggtgagacccccggtgaaatccttccgcttccccaccccttgcagagggcaggggtcctcagggaaagcacaggaaccagacttttggagacttggatcttcagcacacctcagggtcctgggctggcattggccttccgggcctcaatttccccatcaacaaatggagatgaatcccagcttggctgcctcctgggatctaacgagaaaatgagtcatgtgaggtaacttccaggctcactgcaatgggtacggtggggtgtatcagattataaagtgggggtgccctcctcacccccaggcttggcctatacccccctctccatcaagtggcctctctgtgtctgtcctttggggtgaggacactgtaggccatgagaaatgggcagttggggggtcagaggccaagggttagggaggcagggcttggggagagtgtgggaccatcagaagagaaggaagtttacaaaaccacattttgtgtggagatggaggctggaggcccggccctgggacttggtctggggtttcttgaggaagatctgagggtccaagggaggaaggatgccctggccttctggccttctctggctgatcctgccttcttgctgcctaggacaggagagtaatgtcctagaatggtccctgggaggccagttaggaaaccctttgctgcttctgtctctagctcttgtcaataaagacggtgacacctg

SEQ ID NO: 184785 - DNA, 1781 bp, Homo sapiens
  Payload ID: 16392
  Gene Symbol: SSTR3
  Gene Name: somatostatin receptor 3
  Uniprot ID: P32745
  ENST ID: ENST00000617123
  CDS Start-End: 458-1714
tgagtctgaggcttccatccggggacaatgtcccaccttggagctctccttgttgaacggcttggctgttcacatttatggctgttctgggtgatgtcctaggttctggggttaagaaataaatcattcagggcccctgccttcaagagccagtgttctagcgggtgggagatgggcaaatggagaatgattggggtgcctggcctccctgaactgttagggctgtgcggctcaggacagccactcaccctctctgtgctgtctcctcctgaacagtcctccaaggagtccgcccccagctttcaggcaagcttgtgccaaagataaaccagacagggaggaaaagtccctccttctcaaggatgaactagatcatgcacaggattccagctctaaagaaaagacggcacctcaattgcaggcaaatagctgactgctgaccaccctcccctcagccatggacatgcttcatccatcatcggtgtccacgacctcagaacctgagaatgcctcctcggcctggcccccagatgccaccctgggcaacgtgtcggcgggcccaagcccggcagggctggccgtcagtggcgttctgatccccctggtctacctggtggtgtgcgtggtgggcctgctgggtaactcgctggtcatctatgtggtcctgcggcacacggccagcccttcagtcaccaacgtctacatcctcaacctggcgctggccgacgagctcttcatgctggggctgcccttcctggccgcccagaacgccctgtcctactggcccttcggctccctcatgtgccgcctggtcatggcggtggatggcatcaaccagttcaccagcatattctgcctgactgtcatgagcgtggaccgctacctggccgtggtacatcccacccgctcggcccgctggcgcacagctccggtggcccgcacggtcagcgcggctgtgtgggtggcctcagccgtggtggtgctgcccgtggtggtcttctcgggagtgccccgcggcatgagcacctgccacatgcagtggcccgagccggcggcggcctggcgagccggcttcatcatctacacggccgcactgggcttcttcgggccgctgctggtcatctgcctctgctacctgctcatcgtggtgaaggtgcgctcagctgggcgccgggtgtgggcaccctcgtgccagcggcggcggcgctccgaacgcagggtcacgcgcatggtggtggccgtggtggcgctcttcgtgctctgctggatgcccttctacgtgctcaacatcgtcaacgtggtgtgcccactgcccgaggagcctgccttctttgggctctacttcctggtggtggcgctgccctatgccaacagctgtgccaaccccatcctttatggcttcctctcctaccgcttcaagcagggcttccgcagggtcctgctgcggccctcccgccgtgtgcgcagccaggagcccactgtggggcccccggagaagactgaggaggaggatgaggaggaggaggatggggaggagagcagggaggggggcaaggggaaggagatgaacggccgggtcagccagatcacgcagcctggcaccagcgggcaggagcggccgcccagcagagtggccagcaaggagcagcagctcctaccccaagaggcttccactggggagaagtccagcacgatgcgcatcagctacctgtaggggcctggggaaagccaggatggcccgaggaagaggcagaagccgtgggtgtgcctagggcctactt

SEQ ID NO: 184786 - DNA, 1427 bp, Homo sapiens
  Payload ID: 16393
  Gene Symbol: SSTR4
  Gene Name: somatostatin receptor 4
  Uniprot ID: P31391
  ENST ID: ENST00000255008
  CDS Start-End: 99-1265
gtctgcgcgccagcccccgccctgggcccgccgcccgagctctctggcgcagcgctagctccgccgcgctcagctgccctgcgccggcacccctggtcatgagcgccccctcgacgctgccccccgggggcgaggaagggctggggacggcctggccctctgcagccaatgccagtagcgctccggcggaggcggaggaggcggtggcggggcccggggacgcgcgggcggcgggcatggtcgctatccagtgcatctacgcgctggtgtgcctggtggggctggtgggcaacgccctggtcatcttcgtgatccttcgctacgccaagatgaagacggctaccaacatctacctgctcaacctggccgtagccgacgagctcttcatgctgagcgtgcccttcgtggcctcgtcggccgccctgcgccactggcccttcggctccgtgctgtgccgcgcggtgctcagcgtcgacggcctcaacatgttcaccagcgtcttctgtctcaccgtgctcagcgtggaccgctacgtggccgtggtgcaccctctgcgcgcggcgacctaccggcggcccagcgtggccaagctcatcaacctgggcgtgtggctggcatccctgttggtcactctccccatcgccatcttcgcagacaccagaccggctcgcggcggccaggccgtggcctgcaacctgcagtggccacacccggcctggtcggcagtcttcgtggtctacactttcctgctgggcttcctgctgcccgtgctggccattggcctgtgctacctgctcatcgtgggcaagatgcgcgccgtggccctgcgcgctggctggcagcagcgcaggcgctcggagaagaaaatcaccaggctggtgctgatggtcgtggtcgtctttgtgctctgctggatgcctttctacgtggtgcagctgctgaacctcttcgtgaccagccttgatgccaccgtcaaccacgtgtcccttatccttagctatgccaacagctgcgccaaccccattctctatggcttcctctccgacaacttccgccgattcttccagcgggttctctgcctgcgctgctgcctcctggaaggtgctggaggtgctgaggaggagcccctggactactatgccactgctctcaagagcaaaggtggggcagggtgcatgtgccccccactcccctgccagcaggaagccctgcaaccagaacccggccgcaagcgcatccccctcaccaggaccaccaccttctgaggagcccttcccctacccaccctgcgtggccacctcccaaggggtgggcaccattcctacagccccgaagactgcatctcctgaatgctcacctaagctccaccacctgttccttccagcagcccatgtacctgccggagagtgtcagaactcttctgctgc

SEQ ID NO: 184787 - DNA, 1362 bp, Homo sapiens
  Payload ID: 16394
  Gene Symbol: SSTR5
  Gene Name: somatostatin receptor 5
  Uniprot ID: P35346
  ENST ID: ENST00000293897
  CDS Start-End: 89-1183
atgcctgcatgtgctggttcagggactcaccaccctggcgtcctcccttcttctcttgcagagcctgacgcaccccagggctgccgccatggagcccctgttcccagcctccacgcccagctggaacgcctcctccccgggggctgcctctggaggcggtgacaacaggacgctggtggggccggcgccctcggcaggggcccgggcggtgctggtgcccgtgctgtacctgctggtgtgtgcggccgggctgggcgggaacacgctggtcatctacgtggtgctgcgcttcgccaagatgaagaccgtcaccaacatctacattctcaacctggcagtggccgacgtcctgtacatgctggggctgcctttcctggccacgcagaacgccgcgtccttctggcccttcggccccgtcctgtgccgcctggtcatgacgctggacggcgtcaaccagttcaccagtgtcttctgcctgacagtcatgagcgtggaccgctacctggcagtggtgcacccgctgagctcggcccgctggcgccgcccgcgtgtggccaagctggcgagcgccgcggcctgggtcctgtctctgtgcatgtcgctgccgctcctggtgttcgcggacgtgcaggagggcggtacctgcaacgccagctggccggagcccgtggggctgtggggcgccgtcttcatcatctacacggccgtgctgggcttcttcgcgccgctgctggtcatctgcctgtgctacctgctcatcgtggtgaaggtgagggcggcgggcgtgcgcgtgggctgcgtgcggcggcgctcggagcggaaggtgacgcgcatggtgttggtggtggtgctggtgtttgcgggatgttggctgcccttcttcaccgtcaacatcgtcaacctggccgtggcgctgccccaggagcccgcctccgccggcctctacttcttcgtggtcatcctctcctacgccaacagctgtgccaaccccgtcctctacggcttcctctctgacaacttccgccagagcttccagaaggttctgtgcctccgcaagggctctggtgccaaggacgctgacgccacggagccgcgtccagacaggatccggcagcagcaggaggccacgccacccgcgcaccgcgccgcagccaacgggcttatgcagaccagcaagctgtgagagtgcaggcggggggtgggcggccccgtgtcacccccaggagcggaggttgcactgcggtgacccccacccatgacctgccagtcaggatgctccccggcggtggtgtgaggacagagctggctgaagccaggctggggtagacacagggcagtaggttccccaccgtgaccgaccat

SEQ ID NO: 184788 - DNA, 7477 bp, Homo sapiens
  Payload ID: 16395
  Gene Symbol: SON
  Gene Name: SON DNA binding protein
  Uniprot ID: P18583
  ENST ID: ENST00000300278
  CDS Start-End: 30-6941
ggaggagttgagagaacggagcggacgccatggcgaccaacatcgagcagatttttaggtctttcgtggtcagtaaattccgggaaattcaacaggagctttccagtggaaggaatgaaggccagctgaatggtgaaacaaatacacccattgaaggaaaccaggcgggtgatgcagctgcctctgccaggagtctaccaaatgaagaaatagtgcagaagatagaggaagtactttctggggtcttagatacagaactacgatataagccagacttgaaagagggctccagaaaaagtagatgcgtatctgtacaaacagatcctactgatgaaattcccactaaaaagtcaaagaagcataaaaagcacaaaaacaaaaagaagaaaaagaagaaagaaaaggaaaaaaaatataaaagacagccagaagaatctgagtcaaagacgaaatctcatgatgatgggaacatagatttagaatctgattcctttttaaagtttgattctgaaccttcagctgtggcgctggagcttcctacaagagcatttggcccatctgagaccaatgaatcccctgcagttgtgctagaacctcctgtagtatcaatggaggtatcagagccacacatcttagaaactctgaagccagctacaaaaactgcagaactgtcagttgtatctacatcagtaatctcagagcagtcagagcagtctgtggcagtaatgccagaaccatccatgacaaagattctggattcctttgcagcagcaccagtgcctactacaacactggtgttgaagtcatctgagccagttgtaacaatgtcagtggagtatcagatgaagtctgtgctgaaatctgtggagagcacatctccagagccatcaaagatcatgttggtagagcccccagtagcaaaagtgttagagccttcagaaacccttgtggtatcatcagagacacctactgaggtgtaccctgagccaagcacatcaacaacaatggattttccagagtcatctgcaattgaagcgctaagattgccagagcagcctgtagacgtaccatcggagattgcagattcatccatgacaagaccgcaggagttgccggagctgcctaagaccacagcgttggagctgcaggagtcgtcggtggcctcagcgatggagttgccggggccacctgcgacctccatgccggagttgcaggggccccctgtgactccagtgctggagttacctgggccctctgctaccccggtgccagagttgccagggcccctttctaccccagtgcctgagttgccagggccccctgcgacagcagtgcctgagttgccagggccctctgtgacaccagtgccacagttgtcgcaggaattgccagggcttccagcaccatccatggggttggagccaccacaggaggtaccagagccacctgtgatggcacaggagttgccagggctgcctttggtgacagcagcagtagagttgccagagcagcctgcggtaacagtagcaatggagttgaccgaacaacctgtgacgacgacagagttggagcagcctgtggggatgacaacggtggaacatcctgggcatcctgaggtgacaacggcaacagggttgctggggcagcctgaggcaacgatggtgctggagttgccaggacagccagtggcaacgacagcgctggagttgccggggcagccttcggtgactggggtgccagagttgccagggctgccttcggcaactagggcactggagttgtcggggcagcctgtggcaactggggcactagagttgcctgggccgctcatggcagctggggcactggagttctcggggcagtctggggcagctggagcactggagcttttggggcagcctctggcaacaggggtgctggagttgccagggcagcctggggcgccagagttgcctgggcagcctgtggcaactgtggcgctggagatctctgttcagtctgtggtgacaacatcggagctgtcaacgatgaccgtgtcgcagtccctggaggtgccctcgacgacagcgctggaatcctataatacggtagcacaggagctgcctactacattagtgggggagacttctgtaacagtaggagtggatcccttgatggccccagaatcccatatattagcttctaacaccatggagacccatatattagcatccaacaccatggactcccaaatgctagcgtccaacaccatggactcccagatgctagcatccaacaccatggactcccagatgttagcgtctagcaccatggactcccagatgttagcaactagctccatggactcccagatgttagcaactagctccatggactcccagatgttagcaactagcactatggactcccagatgttagcaaccagttccatggactcccagatgttagcaaccagctccatggactcccagatgttagcaaccagctccatggactcccagatgttagcaaccagctccatggactcccagatgttagcaaccagcaccatggattctcagatgttagcaaccagcaccatggactcccagatgttagcaactagctcaatggattcccagatgttagcatctggcactatggactctcaaatgttagcttctggcaccatggatgctcagatgttagcgtctggtaccatggatgcccagatgttagcgtctagtacccaagattctgctatgttgggttcaaaatctcctgatccctataggttagctcaggatccttacaggttagctcaggatccctataggttgggccatgacccctatagattaggtcatgatgcttacaggttaggacaagacccttatagattaggccatgatccctacagactaactcctgatccctataggatgtcacctagaccctacaggatagcacccaggtcctatagaatagcacccaggccatataggttagcacctagacccctgatgttagcatctagacgttctatgatgatgtcctatgctgcagaacgttccatgatgtcatcttacgaacgctctatgatgtcttatgagcggtctatgatgtcccctatggctgaacgctctatgatgtcagcctacgagcgctctatgatgtcagcctacgagcgctctatgatgtcccctatggctgagcgctctatgatgtcagcttatgaacgctccatgatgtcagcttatgaacgctccatgatgtccccaatggctgatcgatctatgatgtccatgggtgctgaccggtctatgatgtcgtcatactctgctgctgaccggtctatgatgtcatcgtactctgcagctgaccgatctatgatgtcatcttatactgctgatcgttcaatgatgtctatggctgctgattcttacaccgattcttacactgacacatatacagaggcatatatggtgccacctttgcctcctgaagagcccccaacaatgccaccgttgccacctgaggagccaccaatgacaccaccattgcctcctgaggaaccaccagagggtccagcattgcccactgagcagtcagcattaacagctgaaaatacttggcctacagaggtgccatcatcaccatctgaagagtctgtatcgcagcctgagcctcctgtgagtcaaagtgagatttcggagccttcagcagtgcctactgattattcagtgtcagcatcagatccctcagttttagtatcagaggctgctgtgactgttccagaaccaccaccagagccagaatcttcaattacgttaacacctgtagagtctgcagtagtagcagaagaacatgaagttgttccagagagaccagtgacttgtatggtatctgaaactcccgccatgtcagctgaaccaactgtgttagcatcagagcctcctgttatgtcagagacagcagaaacatttgattccatgagagcctcaggacatgttgcctcagaagtatctacatccttgttggttccagcagtaactactccagtgctggcagagagcattctggagccgccagccatggctgccccagagtcttcagctatggctgtcctggagtcttcggctgtgaccgtcctggagtcttcgactgtgactgtcctggagtcttcgactgtaactgtcctggagccttcggttgtgactgtcccggagcctcctgttgtggctgagccagactatgttaccattcctgtgccagttgtttctgcgctggagccttctgtgcctgttctggaaccagcggtgtcagtccttcaaccttctatgattgtttcagaaccatctgtttctgtccaggaatcgactgtgacagtttcagagcctgctgtcacagtctcagagcagactcaagtaataccaactgaggtggctatagagtccacaccaatgatactggaatctagtatcatgtcatcacatgttatgaaaggaattaatctatcctctggtgatcaaaatcttgctccagagattggcatgcaggagattgcattgcattcaggtgaagaaccacatgctgaggaacacctgaaaggtgacttttacgaaagtgaacatggtataaatatagaccttaatataaataatcatttaattgctaaagagatggaacataatacagtgtgtgctgctggtactagtcctgttggggaaattggtgaagagaaaattttgcccaccagtgagactaaacagcgcacagtattggatacctaccctggtgttagtgaagctgatgcaggagaaactctatcttctactggtccttttgctctggaacctgatgcaacaggaactagtaagggtattgaatttaccacagcatctactctcagtttagttaataaatatgatgttgatttatctttaactactcaagatactgaacatgacatggtaatttccaccagtcctagtggtggtagtgaagctgacattgaagggcctttgcctgctaaagatattcatcttgatttaccatctaataataaccttgttagtaaggatacagaagaaccattacctgtaaaagagagtgaccagacattagcagctctgctcagccctaaagaaagtagtggaggagaaaaagaagtacctccccctcctaaagagacactgcctgattcaggattttctgccaatattgaggatattaatgaagcagatttagtgagaccgttacttcctaaggacatggaacgtcttacaagccttagagctggcattgaaggacctttacttgcaagtgatgttggacgtgacagatctgctgccagcccggttgtaagtagtatgccagaaagagcttcagagtcttcttcagaggaaaaagatgattatgaaatttttgtaaaagttaaggacactcacgaaaaaagcaagaaaaataagaaccgtgataagggggagaaagagaagaaaagagactcttcattaagatctcgaagtaagcgttccaaatcttctgaacacaaatcacgcaagcgtaccagtgaatctcgttctagggcaagaaagagatcatctaagtccaagtctcatcgctctcagacacgttcacggtcacgttcaagacgcaggaggagaagcagcagatcaagatcaaagtctagaggaagaagatctgtatcaaaagagaagcgcaaaagatctccaaagcacagatccaagtctagggaaagaaaaagaaaaagatcaagctccagggataaccgaaagacagttagagctcgaagtcgaaccccaagtcgtcggagtcggagtcatactccaagtcgtcgacgaaggtctagatctgtgggtagaagaaggagctttagcatttccccaagccgccgcagccgcacccccagccgccgcagccgcacccccagccgccgcagccgcacccccagccgccgcagccgcacccccagccgccggagccgcacccctagccgtcggagccgcaccccaagccgccggagaagatcaaggtctgtggtaagaagacgaagcttcagtatctcaccagtcagattaaggcgatcaagaacacccttaagaagaaggtttagcagatctcccatccgtcgtaaaagatccaggtcttctgaacgaggcagatcacccaaacgtctgacagatttggataaggctcaattacttgaaatagccaaagctaatgcagctgccatgtgtgctaaggctggtgtccctttaccaccaaacctaaagcctgcacctccacctactatagaagagaaagttgctaaaaagtcaggaggagctactatagaagaactaactgagaaatgtaaacagatcgcacagagtaaagaagatgatgatgtaatagtgaataaacctcatgtttcggatgaagaggaagaagaacctcctttttatcatcatccctttaaactcagtgaacccaaacctatttttttcaatctgaatattgctgcagcaaaaccaactccaccaaaaagccaggtaacattaacaaaagaattccctgtatcatctggatctcaacatcggaaaaaagaagcggatagtgtttatggagaatgggttcctgtggagaaaaatggtgaagaaaacaaagatgatgataatgttttcagcagcaatttgccctcagagggccgggttaaacggcagggccgggttagacgacagatgaaacaacccgcagcttctcatttgacagtaactcgatgcaattcactttgtggaaccaagccacaaagtgaaaagcatcgaattgcagagaacagtgttatcacatccctacccaacattgggccctccctgcacttgtgggaaggtagtccaaggtacaactatttagcttcccgatttgcttcaaggctctatagctctagattttggtggtagcaaatttatcgggtggagggattgatcggagagggcagatcctcaggttcaacacaagaactggattggaaaaggtcattgtaggttgatgtgagcatcttgggtacatagcccattgcccttaatgatggtttcttactgtttctctgggttgtttgtcagatagcctttaattttaattatttttccttccctttgctaccttggcccttttaaattcttgtgtttaacctaatgctcagccttggtactccattcccttctccttcccctctttgctactattaaaagtcggagaagtggaattcaaacgttgaaatttccacggggctatagttgtatcttaataatgccaagtgtcaaaacaaccccattaaaatgccgcctgattaaataatgtgctgctaaatatagtgcacatgaaaacagcaagactgtatatatatgtaaatatatatatatatctgtatctttgtatgtatctctgtatctgtacctttgctgtatcttttaataaacagtttacttttatttaa

SEQ ID NO: 184789 - DNA, 8813 bp, Homo sapiens
  Payload ID: 16395
  Gene Symbol: SON
  Gene Name: SON DNA binding protein
  Uniprot ID: P18583
  ENST ID: ENST00000356577
  CDS Start-End: 476-7756
ctcccggatgcatatccctgtcgaaactgaacttggcgccacctgagagcgcctgaaagccgtgtgttaaacaccgggttgcccttcttgctcttcttcctcttcgcctttaatctcaggcacttagcaagcctgttaaggctcccaaacactgctggggactgacaacttatgcggacacggtcgcctcaagagagacggctcctgtaatggcgcctgcgtcagacactaacatggcggacatagtcgtgcgcggcgcaaacgtcagcacctctaccccagccgctcagaaacagcagaggagagcagggccgtgctcactgattggtccctcggtggagcgggccggaccgggcattccctttggagccaatcaggaaggcgagagaccgaattggcccgtgcgcctcctcccgaggcatgctgggagcctggaggactagcgaggaggagttgagagaacggagcggacgccatggcgaccaacatcgagcagatttttaggtctttcgtggtcagtaaattccgggaaattcaacaggagctttccagtggaaggaatgaaggccagctgaatggtgaaacaaatacacccattgaaggaaaccaggcgggtgatgcagctgcctctgccaggagtctaccaaatgaagaaatagtgcagaagatagaggaagtactttctggggtcttagatacagaactacgatataagccagacttgaaagagggctccagaaaaagtagatgcgtatctgtacaaacagatcctactgatgaaattcccactaaaaagtcaaagaagcataaaaagcacaaaaacaaaaagaagaaaaagaagaaagaaaaggaaaaaaaatataaaagacagccagaagaatctgagtcaaagacgaaatctcatgatgatgggaacatagatttagaatctgattcctttttaaagtttgattctgaaccttcagctgtggcgctggagcttcctacaagagcatttggcccatctgagaccaatgaatcccctgcagttgtgctagaacctcctgtagtatcaatggaggtatcagagccacacatcttagaaactctgaagccagctacaaaaactgcagaactgtcagttgtatctacatcagtaatctcagagcagtcagagcagtctgtggcagtaatgccagaaccatccatgacaaagattctggattcctttgcagcagcaccagtgcctactacaacactggtgttgaagtcatctgagccagttgtaacaatgtcagtggagtatcagatgaagtctgtgctgaaatctgtggagagcacatctccagagccatcaaagatcatgttggtagagcccccagtagcaaaagtgttagagccttcagaaacccttgtggtatcatcagagacacctactgaggtgtaccctgagccaagcacatcaacaacaatggattttccagagtcatctgcaattgaagcgctaagattgccagagcagcctgtagacgtaccatcggagattgcagattcatccatgacaagaccgcaggagttgccggagctgcctaagaccacagcgttggagctgcaggagtcgtcggtggcctcagcgatggagttgccggggccacctgcgacctccatgccggagttgcaggggccccctgtgactccagtgctggagttacctgggccctctgctaccccggtgccagagttgccagggcccctttctaccccagtgcctgagttgccagggccccctgcgacagcagtgcctgagttgccagggccctctgtgacaccagtgccacagttgtcgcaggaattgccagggcttccagcaccatccatggggttggagccaccacaggaggtaccagagccacctgtgatggcacaggagttgccagggctgcctttggtgacagcagcagtagagttgccagagcagcctgcggtaacagtagcaatggagttgaccgaacaacctgtgacgacgacagagttggagcagcctgtggggatgacaacggtggaacatcctgggcatcctgaggtgacaacggcaacagggttgctggggcagcctgaggcaacgatggtgctggagttgccaggacagccagtggcaacgacagcgctggagttgccggggcagccttcggtgactggggtgccagagttgccagggctgccttcggcaactagggcactggagttgtcggggcagcctgtggcaactggggcactagagttgcctgggccgctcatggcagctggggcactggagttctcggggcagtctggggcagctggagcactggagcttttggggcagcctctggcaacaggggtgctggagttgccagggcagcctggggcgccagagttgcctgggcagcctgtggcaactgtggcgctggagatctctgttcagtctgtggtgacaacatcggagctgtcaacgatgaccgtgtcgcagtccctggaggtgccctcgacgacagcgctggaatcctataatacggtagcacaggagctgcctactacattagtgggggagacttctgtaacagtaggagtggatcccttgatggccccagaatcccatatattagcttctaacaccatggagacccatatattagcatccaacaccatggactcccaaatgctagcgtccaacaccatggactcccagatgctagcatccaacaccatggactcccagatgttagcgtctagcaccatggactcccagatgttagcaactagctccatggactcccagatgttagcaactagctccatggactcccagatgttagcaactagcactatggactcccagatgttagcaaccagttccatggactcccagatgttagcaaccagctccatggactcccagatgttagcaaccagctccatggactcccagatgttagcaaccagctccatggactcccagatgttagcaaccagcaccatggattctcagatgttagcaaccagcaccatggactcccagatgttagcaactagctcaatggattcccagatgttagcatctggcactatggactctcaaatgttagcttctggcaccatggatgctcagatgttagcgtctggtaccatggatgcccagatgttagcgtctagtacccaagattctgctatgttgggttcaaaatctcctgatccctataggttagctcaggatccttacaggttagctcaggatccctataggttgggccatgacccctatagattaggtcatgatgcttacaggttaggacaagacccttatagattaggccatgatccctacagactaactcctgatccctataggatgtcacctagaccctacaggatagcacccaggtcctatagaatagcacccaggccatataggttagcacctagacccctgatgttagcatctagacgttctatgatgatgtcctatgctgcagaacgttccatgatgtcatcttacgaacgctctatgatgtcttatgagcggtctatgatgtcccctatggctgaacgctctatgatgtcagcctacgagcgctctatgatgtcagcctacgagcgctctatgatgtcccctatggctgagcgctctatgatgtcagcttatgaacgctccatgatgtcagcttatgaacgctccatgatgtccccaatggctgatcgatctatgatgtccatgggtgctgaccggtctatgatgtcgtcatactctgctgctgaccggtctatgatgtcatcgtactctgcagctgaccgatctatgatgtcatcttatactgctgatcgttcaatgatgtctatggctgctgattcttacaccgattcttacactgacacatatacagaggcatatatggtgccacctttgcctcctgaagagcccccaacaatgccaccgttgccacctgaggagccaccaatgacaccaccattgcctcctgaggaaccaccagagggtccagcattgcccactgagcagtcagcattaacagctgaaaatacttggcctacagaggtgccatcatcaccatctgaagagtctgtatcgcagcctgagcctcctgtgagtcaaagtgagatttcggagccttcagcagtgcctactgattattcagtgtcagcatcagatccctcagttttagtatcagaggctgctgtgactgttccagaaccaccaccagagccagaatcttcaattacgttaacacctgtagagtctgcagtagtagcagaagaacatgaagttgttccagagagaccagtgacttgtatggtatctgaaactcccgccatgtcagctgaaccaactgtgttagcatcagagcctcctgttatgtcagagacagcagaaacatttgattccatgagagcctcaggacatgttgcctcagaagtatctacatccttgttggttccagcagtaactactccagtgctggcagagagcattctggagccgccagccatggctgccccagagtcttcagctatggctgtcctggagtcttcggctgtgaccgtcctggagtcttcgactgtgactgtcctggagtcttcgactgtaactgtcctggagccttcggttgtgactgtcccggagcctcctgttgtggctgagccagactatgttaccattcctgtgccagttgtttctgcgctggagccttctgtgcctgttctggaaccagcggtgtcagtccttcaaccttctatgattgtttcagaaccatctgtttctgtccaggaatcgactgtgacagtttcagagcctgctgtcacagtctcagagcagactcaagtaataccaactgaggtggctatagagtccacaccaatgatactggaatctagtatcatgtcatcacatgttatgaaaggaattaatctatcctctggtgatcaaaatcttgctccagagattggcatgcaggagattgcattgcattcaggtgaagaaccacatgctgaggaacacctgaaaggtgacttttacgaaagtgaacatggtataaatatagaccttaatataaataatcatttaattgctaaagagatggaacataatacagtgtgtgctgctggtactagtcctgttggggaaattggtgaagagaaaattttgcccaccagtgagactaaacagcgcacagtattggatacctaccctggtgttagtgaagctgatgcaggagaaactctatcttctactggtccttttgctctggaacctgatgcaacaggaactagtaagggtattgaatttaccacagcatctactctcagtttagttaataaatatgatgttgatttatctttaactactcaagatactgaacatgacatggtaatttccaccagtcctagtggtggtagtgaagctgacattgaagggcctttgcctgctaaagatattcatcttgatttaccatctaataataaccttgttagtaaggatacagaagaaccattacctgtaaaagagagtgaccagacattagcagctctgctcagccctaaagaaagtagtggaggagaaaaagaagtacctccccctcctaaagagacactgcctgattcaggattttctgccaatattgaggatattaatgaagcagatttagtgagaccgttacttcctaaggacatggaacgtcttacaagccttagagctggcattgaaggacctttacttgcaagtgatgttggacgtgacagatctgctgccagcccggttgtaagtagtatgccagaaagagcttcagagtcttcttcagaggaaaaagatgattatgaaatttttgtaaaagttaaggacactcacgaaaaaagcaagaaaaataagaaccgtgataagggggagaaagagaagaaaagagactcttcattaagatctcgaagtaagcgttccaaatcttctgaacacaaatcacgcaagcgtaccagtgaatctcgttctagggcaagaaagagatcatctaagtccaagtctcatcgctctcagacacgttcacggtcacgttcaagacgcaggaggagaagcagcagatcaagatcaaagtctagaggaagaagatctgtatcaaaagagaagcgcaaaagatctccaaagcacagatccaagtctagggaaagaaaaagaaaaagatcaagctccagggataaccgaaagacagttagagctcgaagtcgaaccccaagtcgtcggagtcggagtcatactccaagtcgtcgacgaaggtctagatctgtgggtagaagaaggagctttagcatttccccaagccgccgcagccgcacccccagccgccgcagccgcacccccagccgccgcagccgcacccccagccgccgcagccgcacccccagccgccggagccgcacccctagccgtcggagccgcaccccaagccgccggagaagatcaaggtctgtggtaagaagacgaagcttcagtatctcaccagtcagattaaggcgatcaagaacacccttaagaagaaggtttagcagatctcccatccgtcgtaaaagatccaggtcttctgaacgaggcagatcacccaaacgtctgacagatttggataaggctcaattacttgaaatagccaaagctaatgcagctgccatgtgtgctaaggctggtgtccctttaccaccaaacctaaagcctgcacctccacctactatagaagagaaagttgctaaaaagtcaggaggagctactatagaagaactaactgagaaatgtaaacagatcgcacagagtaaagaagatgatgatgtaatagtgaataaacctcatgtttcggatgaagaggaagaagaacctcctttttatcatcatccctttaaactcagtgaacccaaacctatttttttcaatctgaatattgctgcagcaaaaccaactccaccaaaaagccaggtaacattaacaaaagaattccctgtatcatctggatctcaacatcggaaaaaagaagcggatagtgtttatggagaatgggttcctgtggagaaaaatggtgaagaaaacaaagatgatgataatgttttcagcagcaatttgccctcagagcctgtggacatctctacagcaatgagtgaacgggcacttgctcagaaaagactcagtgagaatgcatttgatcttgaagccatgagcatgttaaatagagctcaggaaaggattgatgcctgggctcagctgaactctattcctggccagttcacaggaagtacaggagtacaggttttgacacaagaacagttggccaatactggtgcccaagcctggattaaaaaggatcagttcttaagagcagccccggtaactggaggaatgggagccgttttgatgagaaaaatgggctggagagaaggagaaggattaggaaaaaacaaagaaggcaataaggaacccatcctagttgattttaagacagaccgaaaaggtcttgttgcagtaggagaaagagcacaaaagaggtctgggaacttctctgctgcaatgaaagatctgtcaggcaaacatcctgtgtctgctttgatggagatctgtaataaaagaaggtggcaaccacctgaatttctattggtccatgatagtggccctgatcatcgcaaacattttctctttagggtattgagaaatggagcccttaccagacccaattgtatgtttttcttgaataggtattgataaatggaagcgcttaccagcccagctttgccagccctaataagaagcatgctaaagccacagcagctactgtggttcttcaagcaatgggccttgtaccaaaggacctcatggctaatgccacttgcttcaggagtgcctcacgtagatagattgaggttttataataatcatttcagaattttactctgcatcacaatgtatttcctctttaatgttgtaaatatttggcaatttaagacattgtgtaaaaagcaatctgtaaaaacatctccaggctttgatttttgtaccatggaaattgtatttaaccatacagggttttggtatgtttatattgtttaccttagtgatgtatttgtttaagtggctaacatccaaacgactgtttgaaggcatcagagtaatcttcagtgtggaatgttaaataacgcttttatactgtattttgtactatgatgtaactccccttccttatggctaggctactgtaacacttgcctgtaatcagtgaagggctgtgcaccttgtactatttcacaatgggttctgctggacagataatgggccagtgttattgaggtgatcaagatctgttccacagggctaatgccaccatctcccctcaaaattttgtagaggttctaaaaagaaagtggtatgttgtgtgatgatcagcactaagtcctgcattcctgttaaagccacttgggtcataagaagggagtaaaaaatgaagtctgactagaattctattgcagaggccagtacatttagtatggcattgagttgtgatatagttttactttgatgtgcattttgaatttcagctacacctagatagacgtaaaatgataattaaaatgctgtaaccaacttatctaataaaattggcaaccagccactattttgttgactatgagaaagttaaaagtttatgttaatttttagggtctgatagaatatttcatgtgtattacagtggtattcatatgctatgtctctaaactttattttcaaaagcttaaggcccaaatacaaacttctctggaataaa

SEQ ID NO: 184790 - DNA, 7860 bp, Homo sapiens
  Payload ID: 16395
  Gene Symbol: SON
  Gene Name: SON DNA binding protein
  Uniprot ID: P18583
  ENST ID: ENST00000381679
  CDS Start-End: 29-6355
gaggagttgagagaacggagcggacgccatggcgaccaacatcgagcagatttttaggtctttcgtggtcagtaaattccgggaaattcaacaggagctttccagtggaaggaatgaaggccagctgaatggtgaaacaaatacacccattgaaggaaaccaggcgggtgatgcagctgcctctgccaggagtctaccaaatgaagaaatagtgcagaagatagaggaagtactttctggggtcttagatacagaactacgatataagccagacttgaaagagggctccagaaaaagtagatgcgtatctgtacaaacagatcctactgatgaaattcccactaaaaagtcaaagaagcataaaaagcacaaaaacaaaaagaagaaaaagaagaaagaaaaggaaaaaaaatataaaagacagccagaagaatctgagtcaaagacgaaatctcatgatgatgggaacatagatttagaatctgattcctttttaaagtttgattctgaaccttcagctgtggcgctggagcttcctacaagagcatttggcccatctgagaccaatgaatcccctgcagttgtgctagaacctcctgtagtatcaatggaggtatcagagccacacatcttagaaactctgaagccagctacaaaaactgcagaactgtcagttgtatctacatcagtaatctcagagcagtcagagcagtctgtggcagtaatgccagaaccatccatgacaaagattctggattcctttgcagcagcaccagtgcctactacaacactggtgttgaagtcatctgagccagttgtaacaatgtcagtggagtatcagatgaagtctgtgctgaaatctgtggagagcacatctccagagccatcaaagatcatgttggtagagcccccagtagcaaaagtgttagagccttcagaaacccttgtggtatcatcagagacacctactgaggtgtaccctgagccaagcacatcaacaacaatggattttccagagtcatctgcaattgaagcgctaagattgccagagcagcctgtagacgtaccatcggagattgcagattcatccatgacaagaccgcaggagttgccggagctgcctaagaccacagcgttggagctgcaggagtcgtcggtggcctcagcgatggagttgccggggccacctgcgacctccatgccggagttgcaggggccccctgtgactccagtgctggagttacctgggccctctgctaccccggtgccagagttgccagggcccctttctaccccagtgcctgagttgccagggccccctgcgacagcagtgcctgagttgccagggccctctgtgacaccagtgccacagttgtcgcaggaattgccagggcttccagcaccatccatggggttggagccaccacaggaggtaccagagccacctgtgatggcacaggagttgccagggctgcctttggtgacagcagcagtagagttgccagagcagcctgcggtaacagtagcaatggagttgaccgaacaacctgtgacgacgacagagttggagcagcctgtggggatgacaacggtggaacatcctgggcatcctgaggtgacaacggcaacagggttgctggggcagcctgaggcaacgatggtgctggagttgccaggacagccagtggcaacgacagcgctggagttgccggggcagccttcggtgactggggtgccagagttgccagggctgccttcggcaactagggcactggagttgtcggggcagcctgtggcaactggggcactagagttgcctgggccgctcatggcagctggggcactggagttctcggggcagtctggggcagctggagcactggagcttttggggcagcctctggcaacaggggtgctggagttgccagggcagcctggggcgccagagttgcctgggcagcctgtggcaactgtggcgctggagatctctgttcagtctgtggtgacaacatcggagctgtcaacgatgaccgtgtcgcagtccctggaggtgccctcgacgacagcgctggaatcctataatacggtagcacaggagctgcctactacattagtgggggagacttctgtaacagtaggagtggatcccttgatggccccagaatcccatatattagcttctaacaccatggagacccatatattagcatccaacaccatggactcccaaatgctagcgtccaacaccatggactcccagatgctagcatccaacaccatggactcccagatgttagcgtctagcaccatggactcccagatgttagcaactagctccatggactcccagatgttagcaactagctccatggactcccagatgttagcaactagcactatggactcccagatgttagcaaccagttccatggactcccagatgttagcaaccagctccatggactcccagatgttagcaaccagctccatggactcccagatgttagcaaccagctccatggactcccagatgttagcaaccagcaccatggattctcagatgttagcaaccagcaccatggactcccagatgttagcaactagctcaatggattcccagatgttagcatctggcactatggactctcaaatgttagcttctggcaccatggatgctcagatgttagcgtctggtaccatggatgcccagatgttagcgtctagtacccaagattctgctatgttgggttcaaaatctcctgatccctataggttagctcaggatccttacaggttagctcaggatccctataggttgggccatgacccctatagattaggtcatgatgcttacaggttaggacaagacccttatagattaggccatgatccctacagactaactcctgatccctataggatgtcacctagaccctacaggatagcacccaggtcctatagaatagcacccaggccatataggttagcacctagacccctgatgttagcatctagacgttctatgatgatgtcctatgctgcagaacgttccatgatgtcatcttacgaacgctctatgatgtcttatgagcggtctatgatgtcccctatggctgaacgctctatgatgtcagcctacgagcgctctatgatgtcagcctacgagcgctctatgatgtcccctatggctgagcgctctatgatgtcagcttatgaacgctccatgatgtcagcttatgaacgctccatgatgtccccaatggctgatcgatctatgatgtccatgggtgctgaccggtctatgatgtcgtcatactctgctgctgaccggtctatgatgtcatcgtactctgcagctgaccgatctatgatgtcatcttatactgctgatcgttcaatgatgtctatggctgctgattcttacaccgattcttacactgacacatatacagaggcatatatggtgccacctttgcctcctgaagagcccccaacaatgccaccgttgccacctgaggagccaccaatgacaccaccattgcctcctgaggaaccaccagagggtccagcattgcccactgagcagtcagcattaacagctgaaaatacttggcctacagaggtgccatcatcaccatctgaagagtctgtatcgcagcctgagcctcctgtgagtcaaagtgagatttcggagccttcagcagtgcctactgattattcagtgtcagcatcagatccctcagttttagtatcagaggctgctgtgactgttccagaaccaccaccagagccagaatcttcaattacgttaacacctgtagagtctgcagtagtagcagaagaacatgaagttgttccagagagaccagtgacttgtatggtatctgaaactcccgccatgtcagctgaaccaactgtgttagcatcagagcctcctgttatgtcagagacagcagaaacatttgattccatgagagcctcaggacatgttgcctcagaagtatctacatccttgttggttccagcagtaactactccagtgctggcagagagcattctggagccgccagccatggctgccccagagtcttcagctatggctgtcctggagtcttcggctgtgaccgtcctggagtcttcgactgtgactgtcctggagtcttcgactgtaactgtcctggagccttcggttgtgactgtcccggagcctcctgttgtggctgagccagactatgttaccattcctgtgccagttgtttctgcgctggagccttctgtgcctgttctggaaccagcggtgtcagtccttcaaccttctatgattgtttcagaaccatctgtttctgtccaggaatcgactgtgacagtttcagagcctgctgtcacagtctcagagcagactcaagtaataccaactgaggtggctatagagtccacaccaatgatactggaatctagtatcatgtcatcacatgttatgaaaggaattaatctatcctctggtgatcaaaatcttgctccagagattggcatgcaggagattgcattgcattcaggtgaagaaccacatgctgaggaacacctgaaaggtgacttttacgaaagtgaacatggtataaatatagaccttaatataaataatcatttaattgctaaagagatggaacataatacagtgtgtgctgctggtactagtcctgttggggaaattggtgaagagaaaattttgcccaccagtgagactaaacagcgcacagtattggatacctaccctggtgttagtgaagctgatgcaggagaaactctatcttctactggtccttttgctctggaacctgatgcaacaggaactagtaagggtattgaatttaccacagcatctactctcagtttagttaataaatatgatgttgatttatctttaactactcaagatactgaacatgacatggtaatttccaccagtcctagtggtggtagtgaagctgacattgaagggcctttgcctgctaaagatattcatcttgatttaccatctaataataaccttgttagtaaggatacagaagaaccattacctgtaaaagagagtgaccagacattagcagctctgctcagccctaaagaaagtagtggaggagaaaaagaagtacctccccctcctaaagagacactgcctgattcaggattttctgccaatattgaggatattaatgaagcagatttagtgagaccgttacttcctaaggacatggaacgtcttacaagccttagagctggcattgaaggacctttacttgcaagtgatgttggacgtgacagatctgctgccagcccggttgtaagtagtatgccagaaagagcttcagagtcttcttcagaggaaaaagatgattatgaaatttttgtaaaagttaaggacactcacgaaaaaagcaagaaaaataagaaccgtgataagggggagaaagagaagaaaagagactcttcattaagatctcgaagtaagcgttccaaatcttctgaacacaaatcacgcaagcgtaccagtgaatctcgttctagggcaagaaagagatcatctaagtccaagtctcatcgctctcagacacgttcacggtcacgttcaagacgcaggaggagaagcagcagatcaagatcaaagtctagaggaagaagatctgtatcaaaagagaagcgcaaaagatctccaaagcacagatccaagtctagggaaagaaaaagaaaaagatcaagctccagggataaccgaaagacagttagagctcgaagtcgaaccccaagtcgtcggagtcggagtcatactccaagtcgtcgacgaaggtctagatctgtgggtagaagaaggagctttagcatttccccaagccgccgcagccgcacccccagccgccgcagccgcacccccagccgccgcagccgcacccccagccgccgcagccgcacccccagccgccggagccgcacccctagccgtcggagccgcaccccaagccgccggagaagatcaaggtctgtggtaagaagacgaagcttcagtatctcaccagtcagattaaggcgatcaagaacacccttaagaagaaggtttagcagatctcccatccgtcgtaaaagatccaggtcttctgaacgaggcagatcacccaaacgtctgacagatttggataaggctcaattacttgaaatagccaaagctaatgcagctgccatgtgtgctaaggctggtgtccctttaccaccaaacctaaagcctgcacctccacctactatagaagagaaagttgctaaaaagtcaggaggagctactatagaagaactaactgagttttagaagccaaactgactgaggagtgggacggttcgtttgaatggaggaggtgttgagtgagcaacacgcagaagctcgcctacagtttcgtttccattcacgacgcgttcactgatcgccacgagtatactgcatatacgcaaagacacagacaatcttcagaaatgatcttttgccaccggagcttggaaattaataagaatagctggccattgcctgaaaggaacttctttcgcatcaacatttcgggttttggctgtttggtaccagccattggcgataatggccggccattatcagttcttcctgcggttcgggttttggcagtaacatatatattttaaacacacttatttttgtttttaaaagtttgatcttttcaattgaggcttttttggggctttgttttattactatttttttggtgtgggtggatggggggagatgctaaaatattgctgctaggatccagaaataccacactgtttcatatattggaacttgttattggctagccttatgccagcctgccactgtcaatatattctgttccccttggttacaagcttaatatactcttgtgtttttggcgaaatgagctttttatcctattgtaatattttcaattgataatagatgtcattaaatctactgcttgtatagagacaggtgtacccaaatttactcttgacctttttataaagccaggtaatggagtctgttcctttgcatctcaggaaggaattgactttgctttatgtatcagacctcatcaattgcaccctctccatcatgccttattttcctaagttctccttaaagaaactcaacccacaaaacatttatggagagacatgttgctatctaatcctgttgcaaatatttcagatcttttgttttgccatacatctgggaaaatgtaaagcttctgaatctgtttcctcacttagatttattacaatatgaattacaactttttttaaaaaattaaggaccttgtaaacgcttctattgcttatttacctaatccaagctccttatccaaaatgctaaggacagttagtattttgctgttttcggccccatcttcagccttcttgtcccaagtttcttctcacctttttaccaccacctgactaggatgacttctcctttccctaccagtctttgttctttactatgaaaatctggcttagaactcttcaaggaatattccttgattctctaactctgcctgactattctctcttaagcctttgttcttttagcacttatgtactcagtttgtattatatcagtttgcacttgttattgtgttgctctgtaaaagtgttcaattatttcatgtatatgtattccttctcttgtactagattgtaagctccttgagagcagggaccatgtcttctactttttttttttttttttttttttgtattccccagacagtgcccagtacagtgctctctctgcacatagtaggtgctcaataaatgttgttgactgac

SEQ ID NO: 184791 - DNA, 2463 bp, Homo sapiens
  Payload ID: 16395
  Gene Symbol: SON
  Gene Name: SON DNA binding protein
  ENST ID: ENST00000381692
  CDS Start-End: 42-1406
gaggactagcgaggaggagttgagagaacggagcggacgccatggcgaccaacatcgagcagatttttaggtctttcgtggtcagtaaattccgggaaattcaacaggagctttccagtggaaggaatgaaggccagctgaatggtgaaacaaatacacccattgaaggaaaccaggcgggtgatgcagctgcctctgccaggagtctaccaaatgaagaaatagtgcagaagatagaggaagtactttctggggtcttagatacagaactacgatataagccagataaggctcaattacttgaaatagccaaagctaatgcagctgccatgtgtgctaaggctggtgtccctttaccaccaaacctaaagcctgcacctccacctactatagaagagaaagttgctaaaaagtcaggaggagctactatagaagaactaactgagaaatgtaaacagatcgcacagagtaaagaagatgatgatgtaatagtgaataaacctcatgtttcggatgaagaggaagaagaacctcctttttatcatcatccctttaaactcagtgaacccaaacctatttttttcaatctgaatattgctgcagcaaaaccaactccaccaaaaagccaggtaacattaacaaaagaattccctgtatcatctggatctcaacatcggaaaaaagaagcggatagtgtttatggagaatgggttcctgtggagaaaaatggtgaagaaaacaaagatgatgataatgttttcagcagcaatttgccctcagagcctgtggacatctctacagcaatgagtgaacgggcacttgctcagaaaagactcagtgagaatgcatttgatcttgaagccatgagcatgttaaatagagctcaggaaaggattgatgcctgggctcagctgaactctattcctggccagttcacaggaagtacaggagtacaggttttgacacaagaacagttggccaatactggtgcccaagcctggattaaaaaggatcagttcttaagagcagccccggtaactggaggaatgggagccgttttgatgagaaaaatgggctggagagaaggagaaggattaggaaaaaacaaagaaggcaataaggaacccatcctagttgattttaagacagaccgaaaaggtcttgttgcagtaggagaaagagcacaaaagaggtctgggaacttctctgctgcaatgaaagatctgtcaggcaaacatcctgtgtctgctttgatggagatctgtaataaaagaaggtggcaaccacctgaatttctattggtccatgatagtggccctgatcatcgcaaacattttctctttagggtattgagaaatggagcccttaccagacccaattgtatgtttttcttgaataggtattgataaatggaagcgcttaccagcccagctttgccagccctaataagaagcatgctaaagccacagcagctactgtggttcttcaagcaatgggccttgtaccaaaggacctcatggctaatgccacttgcttcaggagtgcctcacgtagatagattgaggttttataataatcatttcagaattttactctgcatcacaatgtatttcctctttaatgttgtaaatatttggcaatttaagacattgtgtaaaaagcaatctgtaaaaacatctccaggctttgatttttgtaccatggaaattgtatttaaccatacagggttttggtatgtttatattgtttaccttagtgatgtatttgtttaagtggctaacatccaaacgactgtttgaaggcatcagagtaatcttcagtgtggaatgttaaataacgcttttatactgtattttgtactatgatgtaactccccttccttatggctaggctactgtaacacttgcctgtaatcagtgaagggctgtgcaccttgtactatttcacaatgggttctgctggacagataatgggccagtgttattgaggtgatcaagatctgttccacagggctaatgccaccatctcccctcaaaattttgtagaggttctaaaaagaaagtggtatgttgtgtgatgatcagcactaagtcctgcattcctgttaaagccacttgggtcataagaagggagtaaaaaatgaagtctgactagaattctattgcagaggccagtacatttagtatggcattgagttgtgatatagttttactttgatgtgcattttgaatttcagctacacctagatagacgtaaaatgataattaaaatgctgtaaccaacttatctaataaaattggcaaccagccactattttgttgactatgagaaagttaaaagtttatgttaatttttagggtctgatagaatatttcatgtgtattacagtggtattcatatgctatgtctctaaactttattttcaaaagcttaaggcccaaatacaaacttctctggaataaa

SEQ ID NO: 184792 - DNA, 8394 bp, Homo sapiens
  Payload ID: 16395
  Gene Symbol: SON
  Gene Name: SON DNA binding protein
  Uniprot ID: P18583
  ENST ID: ENST00000455528
  CDS Start-End: 30-7007
ggaggagttgagagaacggagcggacgccatggcgaccaacatcgagcagatttttaggtctttcgtggtcagtaaattccgggaaattcaacaggagctttccagtggaaggaatgaaggccagctgaatggtgaaacaaatacacccattgaaggaaaccaggcgggtgatgcagctgcctctgccaggagtctaccaaatgaagaaatagtgcagaagatagaggaagtactttctggggtcttagatacagaactacgatataagccagacttgaaagagggctccagaaaaagtagatgcgtatctgtacaaacagatcctactgatgaaattcccactaaaaagtcaaagaagcataaaaagcacaaaaacaaaaagaagaaaaagaagaaagaaaaggaaaaaaaatataaaagacagccagaagaatctgagtcaaagacgaaatctcatgatgatgggaacatagatttagaatctgattcctttttaaagtttgattctgaaccttcagctgtggcgctggagcttcctacaagagcatttggcccatctgagaccaatgaatcccctgcagttgtgctagaacctcctgtagtatcaatggaggtatcagagccacacatcttagaaactctgaagccagctacaaaaactgcagaactgtcagttgtatctacatcagtaatctcagagcagtcagagcagtctgtggcagtaatgccagaaccatccatgacaaagattctggattcctttgcagcagcaccagtgcctactacaacactggtgttgaagtcatctgagccagttgtaacaatgtcagtggagtatcagatgaagtctgtgctgaaatctgtggagagcacatctccagagccatcaaagatcatgttggtagagcccccagtagcaaaagtgttagagccttcagaaacccttgtggtatcatcagagacacctactgaggtgtaccctgagccaagcacatcaacaacaatggattttccagagtcatctgcaattgaagcgctaagattgccagagcagcctgtagacgtaccatcggagattgcagattcatccatgacaagaccgcaggagttgccggagctgcctaagaccacagcgttggagctgcaggagtcgtcggtggcctcagcgatggagttgccggggccacctgcgacctccatgccggagttgcaggggccccctgtgactccagtgctggagttacctgggccctctgctaccccggtgccagagttgccagggcccctttctaccccagtgcctgagttgccagggccccctgcgacagcagtgcctgagttgccagggccctctgtgacaccagtgccacagttgtcgcaggaattgccagggcttccagcaccatccatggggttggagccaccacaggaggtaccagagccacctgtgatggcacaggagttgccagggctgcctttggtgacagcagcagtagagttgccagagcagcctgcggtaacagtagcaatggagttgaccgaacaacctgtgacgacgacagagttggagcagcctgtggggatgacaacggtggaacatcctgggcatcctgaggtgacaacggcaacagggttgctggggcagcctgaggcaacgatggtgctggagttgccaggacagccagtggcaacgacagcgctggagttgccggggcagccttcggtgactggggtgccagagttgccagggctgccttcggcaactagggcactggagttgtcggggcagcctgtggcaactggggcactagagttgcctgggccgctcatggcagctggggcactggagttctcggggcagtctggggcagctggagcactggagcttttggggcagcctctggcaacaggggtgctggagttgccagggcagcctggggcgccagagttgcctgggcagcctgtggcaactgtggcgctggagatctctgttcagtctgtggtgacaacatcggagctgtcaacgatgaccgtgtcgcagtccctggaggtgccctcgacgacagcgctggaatcctataatacggtagcacaggagctgcctactacattagtgggggagacttctgtaacagtaggagtggatcccttgatggccccagaatcccatatattagcttctaacaccatggagacccatatattagcatccaacaccatggactcccaaatgctagcgtccaacaccatggactcccagatgctagcatccaacaccatggactcccagatgttagcgtctagcaccatggactcccagatgttagcaactagctccatggactcccagatgttagcaactagctccatggactcccagatgttagcaactagcactatggactcccagatgttagcaaccagttccatggactcccagatgttagcaaccagctccatggactcccagatgttagcaaccagctccatggactcccagatgttagcaaccagctccatggactcccagatgttagcaaccagcaccatggattctcagatgttagcaaccagcaccatggactcccagatgttagcaactagctcaatggattcccagatgttagcatctggcactatggactctcaaatgttagcttctggcaccatggatgctcagatgttagcgtctggtaccatggatgcccagatgttagcgtctagtacccaagattctgctatgttgggttcaaaatctcctgatccctataggttagctcaggatccttacaggttagctcaggatccctataggttgggccatgacccctatagattaggtcatgatgcttacaggttaggacaagacccttatagattaggccatgatccctacagactaactcctgatccctataggatgtcacctagaccctacaggatagcacccaggtcctatagaatagcacccaggccatataggttagcacctagacccctgatgttagcatctagacgttctatgatgatgtcctatgctgcagaacgttccatgatgtcatcttacgaacgctctatgatgtcttatgagcggtctatgatgtcccctatggctgaacgctctatgatgtcagcctacgagcgctctatgatgtcagcctacgagcgctctatgatgtcccctatggctgagcgctctatgatgtcagcttatgaacgctccatgatgtcagcttatgaacgctccatgatgtccccaatggctgatcgatctatgatgtccatgggtgctgaccggtctatgatgtcgtcatactctgctgctgaccggtctatgatgtcatcgtactctgcagctgaccgatctatgatgtcatcttatactgctgatcgttcaatgatgtctatggctgctgattcttacaccgattcttacactgacacatatacagaggcatatatggtgccacctttgcctcctgaagagcccccaacaatgccaccgttgccacctgaggagccaccaatgacaccaccattgcctcctgaggaaccaccagagggtccagcattgcccactgagcagtcagcattaacagctgaaaatacttggcctacagaggtgccatcatcaccatctgaagagtctgtatcgcagcctgagcctcctgtgagtcaaagtgagatttcggagccttcagcagtgcctactgattattcagtgtcagcatcagatccctcagttttagtatcagaggctgctgtgactgttccagaaccaccaccagagccagaatcttcaattacgttaacacctgtagagtctgcagtagtagcagaagaacatgaagttgttccagagagaccagtgacttgtatggtatctgaaactcccgccatgtcagctgaaccaactgtgttagcatcagagcctcctgttatgtcagagacagcagaaacatttgattccatgagagcctcaggacatgttgcctcagaagtatctacatccttgttggttccagcagtaactactccagtgctggcagagagcattctggagccgccagccatggctgccccagagtcttcagctatggctgtcctggagtcttcggctgtgaccgtcctggagtcttcgactgtgactgtcctggagtcttcgactgtaactgtcctggagccttcggttgtgactgtcccggagcctcctgttgtggctgagccagactatgttaccattcctgtgccagttgtttctgcgctggagccttctgtgcctgttctggaaccagcggtgtcagtccttcaaccttctatgattgtttcagaaccatctgtttctgtccaggaatcgactgtgacagtttcagagcctgctgtcacagtctcagagcagactcaagtaataccaactgaggtggctatagagtccacaccaatgatactggaatctagtatcatgtcatcacatgttatgaaaggaattaatctatcctctggtgatcaaaatcttgctccagagattggcatgcaggagattgcattgcattcaggtgaagaaccacatgctgaggaacacctgaaaggtgacttttacgaaagtgaacatggtataaatatagaccttaatataaataatcatttaattgctaaagagatggaacataatacagtgtgtgctgctggtactagtcctgttggggaaattggtgaagagaaaattttgcccaccagtgagactaaacagcgcacagtattggatacctaccctggtgttagtgaagctgatgcaggagaaactctatcttctactggtccttttgctctggaacctgatgcaacaggaactagtaagggtattgaatttaccacagcatctactctcagtttagttaataaatatgatgttgatttatctttaactactcaagatactgaacatgacatggtaatttccaccagtcctagtggtggtagtgaagctgacattgaagggcctttgcctgctaaagatattcatcttgatttaccatctaataataaccttgttagtaaggatacagaagaaccattacctgtaaaagagagtgaccagacattagcagctctgctcagccctaaagaaagtagtggaggagaaaaagaagtacctccccctcctaaagagacactgcctgattcaggattttctgccaatattgaggatattaatgaagcagatttagtgagaccgttacttcctaaggacatggaacgtcttacaagccttagagctggcattgaaggacctttacttgcaagtgatgttggacgtgacagatctgctgccagcccggttgtaagtagtatgccagaaagagcttcagagtcttcttcagaggaaaaagatgattatgaaatttttgtaaaagttaaggacactcacgaaaaaagcaagaaaaataagaaccgtgataagggggagaaagagaagaaaagagactcttcattaagatctcgaagtaagcgttccaaatcttctgaacacaaatcacgcaagcgtaccagtgaatctcgttctagggcaagaaagagatcatctaagtccaagtctcatcgctctcagacacgttcacggtcacgttcaagacgcaggaggagaagcagcagatcaagatcaaagtctagaggaagaagatctgtatcaaaagagaagcgcaaaagatctccaaagcacagatccaagtctagggaaagaaaaagaaaaagatcaagctccagggataaccgaaagacagttagagctcgaagtcgaaccccaagtcgtcggagtcggagtcatactccaagtcgtcgacgaaggtctagatctgtgggtagaagaaggagctttagcatttccccaagccgccgcagccgcacccccagccgccgcagccgcacccccagccgccgcagccgcacccccagccgccgcagccgcacccccagccgccggagccgcacccctagccgtcggagccgcaccccaagccgccggagaagatcaaggtctgtggtaagaagacgaagcttcagtatctcaccagtcagattaaggcgatcaagaacacccttaagaagaaggtttagcagatctcccatccgtcgtaaaagatccaggtcttctgaacgaggcagatcacccaaacgtctgacagatttggataaggctcaattacttgaaatagccaaagctaatgcagctgccatgtgtgctaaggctggtgtccctttaccaccaaacctaaagcctgcacctccacctactatagaagagaaagttgctaaaaagtcaggaggagctactatagaagaactaactgagaaatgtaaacagatcgcacagagtaaagaagatgatgatgtaatagtgaataaacctcatgtttcggatgaagaggaagaagaacctcctttttatcatcatccctttaaactcagtgaacccaaacctatttttttcaatctgaatattgctgcagcaaaaccaactccaccaaaaagccaggtaacattaacaaaagaattccctgtatcatctggatctcaacatcggaaaaaagaagcggatagtgtttatggagaatgggttcctgtggagaaaaatggtgaagaaaacaaagatgatgataatgttttcagcagcaatttgccctcagagcctgtggacatctctacagcaatgagtgaacgggcacttgctcagaaaagactcagtgagaatgcatttgatcttgaagccatgagcatgttaaatagagctcaggaaaggattgatgcctgggctcagctgaactctattcctggccagttcacaggaagtacaggagtacaggttttgacacaagaacagttggccaatactggtgcccaagcctggattaaaaagggccaaatccttgtagctgtcttcttgccccggtcagtgccagccgtactattcacaacactgctgctaccgaggcctaggatcagttcttaagagcagccccggtaactggaggaatgggagccgttttgatgagaaaaatgggctggagagaaggagaaggattaggaaaaaacaaagaaggcaataaggaacccatcctagttgattttaagacagaccgaaaaggtcttgttgcagtaggagaaagagcacaaaagaggtctgggaacttctctgctgcaatgaaagatctgtcaggcaaacatcctgtgtctgctttgatggagatctgtaataaaagaaggtggcaaccacctgaatttctattggtccatgatagtggccctgatcatcgcaaacattttctctttagggtattgataaatggaagcgcttaccagcccagctttgccagccctaataagaagcatgctaaagccacagcagctactgtggttcttcaagcaatgggccttgtaccaaaggacctcatggctaatgccacttgcttcaggagtgcctcacgtagatagattgaggttttataataatcatttcagaattttactctgcatcacaatgtatttcctctttaatgttgtaaatatttggcaatttaagacattgtgtaaaaagcaatctgtaaaaacatctccaggctttgatttttgtaccatggaaattgtatttaaccatacagggttttggtatgtttatattgtttaccttagtgatgtatttgtttaagtggctaacatccaaacgactgtttgaaggcatcagagtaatcttcagtgtggaatgttaaataacgcttttatactgtattttgtactatgatgtaactccccttccttatggctaggctactgtaacacttgcctgtaatcagtgaagggctgtgcaccttgtactatttcacaatgggttctgctggacagataatgggccagtgttattgaggtgatcaagatctgttccacagggctaatgccaccatctcccctcaaaattttgtagaggttctaaaaagaaagtggtatgttgtgtgatgatcagcactaagtcctgcattcctgttaaagccacttgggtcataagaagggagtaaaaaatgaagtctgactagaattctattgcagaggccagtacatttagtatggcattgagttgtgatatagttttactttgatgtgcattttgaatttcagctacacctagatagacgtaaaatgataattaaaatgctgtaaccaacttatctaataaaattggcaaccagccactattttgttgactatgagaaagttaaaagtttatgttaatttttagggtctgatagaatatttcatgtgtattacagtggtattcatatgctatgtctctaaactttattttcaaaagcttaaggcccaaatacaaacttctctggaataaa

SEQ ID NO: 184793 - DNA, 5269 bp, Homo sapiens
  Payload ID: 16395
  Gene Symbol: SON
  Gene Name: SON DNA binding protein
  ENST ID: ENST00000436227
  CDS Start-End: 1-4364
aacgttccatgatgtcatcttacgaacgctctatgatgtcttatgagcggtctatgatgtcccctatggctgaacgctctatgatgtcagcctacgagcgctctatgatgtcagcctacgagcgctctatgatgtcccctatggctgagcgctctatgatgtcagcttatgaacgctccatgatgtcagcttatgaacgctccatgatgtccccaatggctgatcgatctatgatgtccatgggtgctgaccggtctatgatgtcgtcatactctgctgctgaccggtctatgatgtcatcgtactctgcagctgaccgatctatgatgtcatcttatactgctgatcgttcaatgatgtctatggctgctgattcttacaccgattcttacactgacacatatacagaggcatatatggtgccacctttgcctcctgaagagcccccaacaatgccaccgttgccacctgaggagccaccaatgacaccaccattgcctcctgaggaaccaccagagggtccagcattgcccactgagcagtcagcattaacagctgaaaatacttggcctacagaggtgccatcatcaccatctgaagagtctgtatcgcagcctgagcctcctgtgagtcaaagtgagatttcggagccttcagcagtgcctactgattattcagtgtcagcatcagatccctcagttttagtatcagaggctgctgtgactgttccagaaccaccaccagagccagaatcttcaattacgttaacacctgtagagtctgcagtagtagcagaagaacatgaagttgttccagagagaccagtgacttgtatggtatctgaaactcccgccatgtcagctgaaccaactgtgttagcatcagagcctcctgttatgtcagagacagcagaaacatttgattccatgagagcctcaggacatgttgcctcagaagtatctacatccttgttggttccagcagtaactactccagtgctggcagagagcattctggagccgccagccatggctgccccagagtcttcagctatggctgtcctggagtcttcggctgtgaccgtcctggagtcttcgactgtgactgtcctggagtcttcgactgtaactgtcctggagccttcggttgtgactgtcccggagcctcctgttgtggctgagccagactatgttaccattcctgtgccagttgtttctgcgctggagccttctgtgcctgttctggaaccagcggtgtcagtccttcaaccttctatgattgtttcagaaccatctgtttctgtccaggaatcgactgtgacagtttcagagcctgctgtcacagtctcagagcagactcaagtaataccaactgaggtggctatagagtccacaccaatgatactggaatctagtatcatgtcatcacatgttatgaaaggaattaatctatcctctggtgatcaaaatcttgctccagagattggcatgcaggagattgcattgcattcaggtgaagaaccacatgctgaggaacacctgaaaggtgacttttacgaaagtgaacatggtataaatatagaccttaatataaataatcatttaattgctaaagagatggaacataatacagtgtgtgctgctggtactagtcctgttggggaaattggtgaagagaaaattttgcccaccagtgagactaaacagcgcacagtattggatacctaccctggtgttagtgaagctgatgcaggagaaactctatcttctactggtccttttgctctggaacctgatgcaacaggaactagtaagggtattgaatttaccacagcatctactctcagtttagttaataaatatgatgttgatttatctttaactactcaagatactgaacatgacatggtaatttccaccagtcctagtggtggtagtgaagctgacattgaagggcctttgcctgctaaagatattcatcttgatttaccatctaataataaccttgttagtaaggatacagaagaaccattacctgtaaaagagagtgaccagacattagcagctctgctcagccctaaagaaagtagtggaggagaaaaagaagtacctccccctcctaaagagacactgcctgattcaggattttctgccaatattgaggatattaatgaagcagatttagtgagaccgttacttcctaaggacatggaacgtcttacaagccttagagctggcattgaaggacctttacttgcaagtgatgttggacgtgacagatctgctgccagcccggttgtaagtagtatgccagaaagagcttcagagtcttcttcagaggaaaaagatgattatgaaatttttgtaaaagttaaggacactcacgaaaaaagcaagaaaaataagaaccgtgataagggggagaaagagaagaaaagagactcttcattaagatctcgaagtaagcgttccaaatcttctgaacacaaatcacgcaagcgtaccagtgaatctcgttctagggcaagaaagagatcatctaagtccaagtctcatcgctctcagacacgttcacggtcacgttcaagacgcaggaggagaagcagcagatcaagatcaaagtctagaggaagaagatctgtatcaaaagagaagcgcaaaagatctccaaagcacagatccaagtctagggaaagaaaaagaaaaagatcaagctccagggataaccgaaagacagttagagctcgaagtcgaaccccaagtcgtcggagtcggagtcatactccaagtcgtcgacgaaggtctagatctgtgggtagaagaaggagctttagcatttccccaagccgccgcagccgcacccccagccgccgcagccgcacccccagccgccgcagccgcacccccagccgccgcagccgcacccccagccgccggagccgcacccctagccgtcggagccgcaccccaagccgccggagaagatcaaggtctgtggtaagaagacgaagcttcagtatctcaccagtcagattaaggcgatcaagaacacccttaagaagaaggtttagcagatctcccatccgtcgtaaaagatccaggtcttctgaacgaggcagatcacccaaacgtctgacagatttggataaggctcaattacttgaaatagccaaagctaatgcagctgccatgtgtgctaaggctggtgtccctttaccaccaaacctaaagcctgcacctccacctactatagaagagaaagttgctaaaaagtcaggaggagctactatagaagaactaactgagaaatgtaaacagatcgcacagagtaaagaagatgatgatgtaatagtgaataaacctcatgtttcggatgaagaggaagaagaacctcctttttatcatcatccctttaaactcagtgaacccaaacctatttttttcaatctgaatattgctgcagcaaaaccaactccaccaaaaagccaggtaacattaacaaaagaattccctgtatcatctggatctcaacatcggaaaaaagaagcggatagtgtttatggagaatgggttcctgtggagaaaaatggtgaagaaaacaaagatgatgataatgttttcagcagcaatttgccctcagagcctgtggacatctctacagcaatgagtgaacgggcacttgctcagaaaagactcagtgagaatgcatttgatcttgaagccatgagcatgttaaatagagctcaggaaaggattgatgcctgggctcagctgaactctattcctggccagttcacaggaagtacaggagtacaggttttgacacaagaacagttggccaatactggtgcccaagcctggattaaaaaggatcagttcttaagagcagccccggtaactggaggaatgggagccgttttgatgagaaaaatgggctggagagaaggagaaggattaggaaaaaacaaagaaggcaataaggaacccatcctagttgattttaagacagaccgaaaaggtcttgttgcagtaggagaaagagcacaaaagaggtctgggaacttctctgctgcaatgaaagatctgtcaggcaaacatcctgtgtctgctttgatggagatctgtaataaaagaaggtggcaaccacctgaatttctattggtccatgatagtggccctgatcatcgcaaacattttctctttagggtattgataaatggaagcgcttaccagcccagctttgccagccctaataagaagcatgctaaagccacagcagctactgtggttcttcaagcaatgggccttgtaccaaaggacctcatggctaatgccacttgcttcaggagtgcctcacgtagatagattgaggttttataataatcatttcagaattttactctgcatcacaatgtatttcctctttaatgttgtaaatatttggcaatttaagacattgtgtaaaaagcaatctgtaaaaacatctccaggctttgatttttgtaccatggaaattgtatttaaccatacagggttttggtatgtttatattgtttaccttagtgatgtatttgtttaagtggctaacatccaaacgactgtttgaaggcatcagagtaatcttcagtgtggaatgttaaataacgcttttatactgtattttgtactatgatgtaactccccttccttatggctaggctactgtaacacttgcctgtaatcagtgaagggctgtgcaccttgtactatttcacaatgggttctgctggacagataatgggccagtgttattgaggtgatcaagatctgttccacagggctaatgccaccatctcccctcaaaattttgtagaggttctaaaaagaaagtggtatgttgtgtgatgatcagcactaagtcctgcattcctgttaaagccacttgggtcataagaagggagtaaaaaatgaagtctgactagaattctattgcagaggccagtacatttagtatggcattgagttgtgatatagttttactttgatgtgcattttgaatttcagctacacctagatagacgtaaaatgataattaaaatgctgtaaccaacttatctaataaaattggcaaccagccactattttgttgactatgagaaagttaaaagtttatgttaatttttagggtctgatagaatatttcatgtgtattacagtggtattcatatgctatgtctctaaactttattttcaaaagcttaaggcccaaatacaaacttctctggaataaa

SEQ ID NO: 184794 - DNA, 684 bp, Homo sapiens
  Payload ID: 16395
  Gene Symbol: SON
  Gene Name: SON DNA binding protein
  ENST ID: ENST00000429093
  CDS Start-End: 1-279
gtggacatctctacagcaatgagtgaacgggcacttgctcagaaaagactcagtgagaatgcatttgatcttgaagccatgagcatgttaaatagagctcaggaaaggattgatgcctgggctcagctgaactctattcctggccagttcacaggaagtacaggagtacaggttttgacacaagaacagttggccaatactggtgcccaagcctggattaaaaagtgcctgtgccttcttgtaagatctcttggcccccgttcctcactcctcttgtgacctgtagccccaggaccttttggttgtcagctgctggttacagcaagtggttgggaggccctagtattagctctgcatgtggtgatcttgccatgggactggaagcctgagggaggatggctggagtggggtgggctgtggtgaaggggatgggatggagattaatctgtggaccaccatttaggccctagtggcctctggtgatccacaggctcaatttgagaaccactaatttcatgacaaaacagatatgtaagacctaaaatcaagggagagaatggacgcctcgtgctacgaagatgagtactggcagcatagcagtgctgaaactgggaggccgcgtggtctaatggattgggaaggtttctttatcctgttgtactcctgactccttgtgtaatcatg

SEQ ID NO: 184795 - DNA, 765 bp, Homo sapiens
  Payload ID: 16395
  Gene Symbol: SON
  Gene Name: SON DNA binding protein
  ENST ID: ENST00000457208
  CDS Start-End: 1-293
aacgggcacttgctcagaaaagactcagtgagaatgcatttgatcttgaagccatgagcatgttaaatagagctcaggaaaggattgatgcctgggctcagctgaactctattcctggccagttcacaggaagtacaggagtacaggttttgacacaagaacagttggccaatactggtgcccaagcctggattaaaaagggccaaatccttgtagctgtcttcttgccccggtcagtgccagccgtactattcacaacactgctgctaccgaggcctaggatcagttcttaagagcagccccggtaactggaggaatgggagccgttttgatgagaaaaatgggctggagagaaggagaaggattaggaaaaaacaaagaaggcaataaggaacccatcctagttgattttaagacagaccgaaaaggtcttgttgcagtaggagaaagagcacaaaagaggtctgggaacttctctgctgcaatgaaagatctgtcaggcaaacatcctgtgtctgctttgatggagatctgtaataaaagaaggtggcaaccacctgaatttctattggtccatgatagtggccctgatcatcgcaaacattttctctttagggtattgagaaatggagcccttaccagacccaattgtatgtttttcttgaataggtattgataaatggaagcgcttaccagcccagctttgccagccctaataagaagcatgctaaagccacagcagctactgtggttcttcaagcaatg

SEQ ID NO: 184796 - DNA, 1151 bp, Homo sapiens
  Payload ID: 16395
  Gene Symbol: SON
  Gene Name: SON DNA binding protein
  ENST ID: ENST00000421541
  CDS Start-End: 1-1032
tctagatctgtgggtagaagaaggagctttagcatttccccaagccgccgcagccgcacccccagccgccgcagccgcacccccagccgccgcagccgcacccccagccgccgcagccgcacccccagccgccggagccgcacccctagccgtcggagccgcaccccaagccgccggagaagatcaaggtctgtggtaagaagacgaagcttcagtatctcaccagtcagattaaggcgatcaagaacacccttaagaagaaggtttagcagatctcccatccgtcgtaaaagatccaggtcttctgaacgaggcagatcacccaaacgtctgacagatttggataaggctcaattacttgaaatagccaaagctaatgcagctgccatgtgtgctaaggctggtgtccctttaccaccaaacctaaagcctgcacctccacctactatagaagagaaagttgctaaaaagtcaggaggagctactatagaagaactaactgagaaatgtaaacagatcgcacagagtaaagaagatgatgatgtaatagtgaataaacctcatgtttcggatgaagaggaagaagaacctcctttttatcatcatccctttaaactcagtgaacccaaacctatttttttcaatctgaatattgctgcagcaaaaccaactccaccaaaaagccaggtaacattaacaaaagaattccctgtatcatctggatctcaacatcggaaaaaagaagcggatagtgtttatggagaatgggttcctgtggagaaaaatggtgaagaaaacaaagatgatgataatgttttcagcagcaatttgccctcagagcctgtggacatctctacagcaatgagtgaacgggcacttgctcagaaaagactcagtgagaatgcatttgatcttgaagccatgagcatgttaaatagagctcaggaaagggtatgtagcagttttttaaaaaaaattattatttaccatcagccaactcacaccaatgtaccagttttaatgtctaaataagaattttgctaactagatggttgagttgtaacatcctttaccttattttcaatgtcttattttaaatgaaagtgattcgaggcctgatcatttattcaataaatgtttattgtttacta

SEQ ID NO: 184797 - DNA, 4123 bp, Homo sapiens
  Payload ID: 16396
  Gene Symbol: SOS1
  Gene Name: son of sevenless homolog 1 (Drosophila)
  ENST ID: ENST00000395038
  CDS Start-End: 29-3985
ccccgcccagaggcgccccgggggcaccatgcaggcgcagcagctgccctacgagtttttcagcgaagagaacgcgcccaagtggcggggactactggtgcctgcgctgaaaaaggtccaggggcaagttcatcctactctcgagtctaatgatgatgctcttcagtatgttgaagaattaattttgcaattattaaatatgctatgccaagctcagccccgaagtgcttcagatgtagaggaacgtgttcaaaaaagtttccctcatccaattgataaatgggcaatagctgatgcccaatcagctattgaaaagaggaagcgaagaaaccctttatctctcccagtagaaaaaattcatcctttattaaaggaggtcctaggttataaaattgaccaccaggtttctgtttacatagtagcagtcttagaatacatttctgcagacattttaaagctggttgggaattatgtaagaaatatacggcattatgaaattacaaaacaagatattaaagtggcaatgtgtgctgacaaggtattgatggatatgtttcatcaagatgtagaagatattaatatattatctttaactgacgaagagccttccacctcaggagaacaaacttactatgatttggtaaaagcatttatggcagaaattcgacaatatataagggaactaaatctaattataaaagtttttagagagccctttgtctccaattcaaaattgttttcagctaatgatgtagaaaatatatttagtcgcatagtagatatacatgaacttagtgtaaagttactgggccatatagaagatacagtagaaatgacagatgaaggcagtccccatccactagtaggaagctgctttgaagacttagcagaggaactggcatttgatccatatgaatcgtatgctcgagatattttgcgacctggttttcatgatcgtttccttagtcagttatcaaagcctggggcagcactttatttgcagtcaataggcgaaggtttcaaagaagctgttcaatatgttttacccaggctgcttctggcccctgtttaccactgtctccattactttgaacttttgaagcagttagaagaaaaaagtgaagatcaagaagacaaggaatgtttaaaacaagcaataacagctttgcttaatgttcagagtggtatggaaaaaatatgttctaaaagtcttgcaaaacgaagactgagtgaatctgcatgtcggttttatagtcagcaaatgaaggggaaacaactagcaatcaagaagatgaacgagattcagaagaatattgatggttgggagggaaaagacattggacagtgttgtaatgaatttataatggaaggaactcttacacgtgtaggagccaaacatgagagacacatatttctctttgatggcttaatgatttgctgtaaatcaaatcatgggcagccaagacttcctggtgctagcaatgcagaatatcgtcttaaagaaaagttttttatgcgaaaggtacaaattaatgataaagatgacaccaatgaatacaagcatgcttttgaaataattttaaaagatgaaaatagtgttatattttctgccaagtcagctgaagagaaaaacaattggatggcagcattgatatctttacagtaccggagtacactggaaaggatgcttgatgtaacaatgctacaggaagagaaagaggagcagatgaggctgcctagtgctgatgtttatagatttgcagagcctgactctgaagagaatattatatttgaagagaacatgcagcccaaggctggaattccaattatcaaagcaggaactgttattaaacttatagagaggcttacgtaccatatgtacgcagatcccaattttgttcggacatttcttacaacatacagatccttttgcaaacctcaagaactactgagtcttataatagaaaggtttgaaattccagagcctgagccaacagaagctgatcgcatagctatagagaatggagatcaacccttgagtgcagaactgaaaagatttagaaaagaatatatacagcctgtgcaactgcgagtattaaatgtatgtcggcactgggtagagcaccacttctatgattttgaaagagatgcatatcttttgcaacgaatggaagaatttattggaacagtaagaggtaaagcaatgaaaaaatgggttgaatccatcactaaaataatccaaaggaaaaaaattgcaagagacaatggaccaggtcataatattacatttcagagttcacctcccacagttgagtggcatataagcagacctgggcacatagagacttttgacctgctcaccttacacccaatagaaattgctcgacaactcactttacttgaatcagatctataccgagctgtacagccatcagaattagttggaagtgtgtggacaaaagaagacaaagaaattaactctcctaatcttctgaaaatgattcgacataccaccaacctcactctgtggtttgagaaatgtattgtagaaactgaaaatttagaagaaagagtagctgtggtgagtcgaattattgagattctacaagtctttcaagagttgaacaactttaatggtgtccttgaggttgtcagtgctatgaattcatcacctgtttacagactagaccacacatttgagcaaataccaagtcgccagaagaaaattttagaagaagctcatgaattgagtgaagatcactataagaaatatttggcaaaactcaggtctattaatccaccatgtgtgcctttctttggaatttatctcactaatatcttgaaaacagaagaaggcaaccctgaggtcctaaaaagacatggaaaagagcttataaactttagcaaaaggaggaaagtagcagaaataacaggagagatccagcagtaccaaaatcagccttactgtttacgagtagaatcagatatcaaaaggttctttgaaaacttgaatccgatgggaaatagcatggagaaggaatttacagattatcttttcaacaaatccctagaaatagaaccacgaaaccctaagcctctcccaagatttccaaaaaaatatagctatcccctaaaatctcctggtgttcgtccatcaaacccaagaccaggtaccatgaggcatcccacacctctgcagcaggagccaaggaaaattagttatagtaggatccctgaaagtgaaacagaaagtacagcatctgcaccaaattctccaagaacaccgttaacacctccgcctgcttctggtgcttccagtaccacagatgtttgcagtgtatttgattccgatcattcgagcccttttcactcaagatctgcttctgtatcatctataagtttaaccaaaggcactgatgaagtgcctgtccctcctcctgttcctccacgaagacgaccagaatctgccccagcagaatcttcaccatctaagattatgtctaagcatttggacagtcccccagccattcctcctaggcaacccacatcaaaagcctattcaccacgatattcaatatcagaccggacctctatctcagaccctcctgaaagccctcccttattaccaccacgagaacctgtgaggacacctgatgttttctcaagctcaccactacatctccaacctccccctttgggcaaaaaaagtgaccatggcaatgccttcttcccaaacagcccttccccctttacaccacctcctcctcaaacaccttctcctcacggcacaagaaggcatctgccatcaccaccattgacacaagaagtggaccttcattccattgctgggccgcctgttcctccacgacaaagcacttctcaacatatccctaaactccctccaaaaacttacaaaagggagcacacacacccatccatgcacagagatggaccaccactgttggagaatgcccattcttcctgagttcctctgtactgggatgtatattttcctagccccaaatccattgctggcaatggatgcactgaatgtgccagcactgaggagttaaaatgagaactccaaacactaacgactcttcttcaagatgcagtataagac

SEQ ID NO: 184798 - DNA, 8314 bp, Homo sapiens
  Payload ID: 16396
  Gene Symbol: SOS1
  Gene Name: son of sevenless homolog 1 (Drosophila)
  Uniprot ID: Q07889
  ENST ID: ENST00000402219
  CDS Start-End: 42-4043
ccgccgcccctctccccgcccagaggcgccccgggggcaccatgcaggcgcagcagctgccctacgagtttttcagcgaagagaacgcgcccaagtggcggggactactggtgcctgcgctgaaaaaggtccaggggcaagttcatcctactctcgagtctaatgatgatgctcttcagtatgttgaagaattaattttgcaattattaaatatgctatgccaagctcagccccgaagtgcttcagatgtagaggaacgtgttcaaaaaagtttccctcatccaattgataaatgggcaatagctgatgcccaatcagctattgaaaagaggaagcgaagaaaccctttatctctcccagtagaaaaaattcatcctttattaaaggaggtcctaggttataaaattgaccaccaggtttctgtttacatagtagcagtcttagaatacatttctgcagacattttaaagctggttgggaattatgtaagaaatatacggcattatgaaattacaaaacaagatattaaagtggcaatgtgtgctgacaaggtattgatggatatgtttcatcaagatgtagaagatattaatatattatctttaactgacgaagagccttccacctcaggagaacaaacttactatgatttggtaaaagcatttatggcagaaattcgacaatatataagggaactaaatctaattataaaagtttttagagagccctttgtctccaattcaaaattgttttcagctaatgatgtagaaaatatatttagtcgcatagtagatatacatgaacttagtgtaaagttactgggccatatagaagatacagtagaaatgacagatgaaggcagtccccatccactagtaggaagctgctttgaagacttagcagaggaactggcatttgatccatatgaatcgtatgctcgagatattttgcgacctggttttcatgatcgtttccttagtcagttatcaaagcctggggcagcactttatttgcagtcaataggcgaaggtttcaaagaagctgttcaatatgttttacccaggctgcttctggcccctgtttaccactgtctccattactttgaacttttgaagcagttagaagaaaaaagtgaagatcaagaagacaaggaatgtttaaaacaagcaataacagctttgcttaatgttcagagtggtatggaaaaaatatgttctaaaagtcttgcaaaacgaagactgagtgaatctgcatgtcggttttatagtcagcaaatgaaggggaaacaactagcaatcaagaagatgaacgagattcagaagaatattgatggttgggagggaaaagacattggacagtgttgtaatgaatttataatggaaggaactcttacacgtgtaggagccaaacatgagagacacatatttctctttgatggcttaatgatttgctgtaaatcaaatcatgggcagccaagacttcctggtgctagcaatgcagaatatcgtcttaaagaaaagttttttatgcgaaaggtacaaattaatgataaagatgacaccaatgaatacaagcatgcttttgaaataattttaaaagatgaaaatagtgttatattttctgccaagtcagctgaagagaaaaacaattggatggcagcattgatatctttacagtaccggagtacactggaaaggatgcttgatgtaacaatgctacaggaagagaaagaggagcagatgaggctgcctagtgctgatgtttatagatttgcagagcctgactctgaagagaatattatatttgaagagaacatgcagcccaaggctggaattccaattatcaaagcaggaactgttattaaacttatagagaggcttacgtaccatatgtacgcagatcccaattttgttcggacatttcttacaacatacagatccttttgcaaacctcaagaactactgagtcttataatagaaaggtttgaaattccagagcctgagccaacagaagctgatcgcatagctatagagaatggagatcaacccttgagtgcagaactgaaaagatttagaaaagaatatatacagcctgtgcaactgcgagtattaaatgtatgtcggcactgggtagagcaccacttctatgattttgaaagagatgcatatcttttgcaacgaatggaagaatttattggaacagtaagaggtaaagcaatgaaaaaatgggttgaatccatcactaaaataatccaaaggaaaaaaattgcaagagacaatggaccaggtcataatattacatttcagagttcacctcccacagttgagtggcatataagcagacctgggcacatagagacttttgacctgctcaccttacacccaatagaaattgctcgacaactcactttacttgaatcagatctataccgagctgtacagccatcagaattagttggaagtgtgtggacaaaagaagacaaagaaattaactctcctaatcttctgaaaatgattcgacataccaccaacctcactctgtggtttgagaaatgtattgtagaaactgaaaatttagaagaaagagtagctgtggtgagtcgaattattgagattctacaagtctttcaagagttgaacaactttaatggtgtccttgaggttgtcagtgctatgaattcatcacctgtttacagactagaccacacatttgagcaaataccaagtcgccagaagaaaattttagaagaagctcatgaattgagtgaagatcactataagaaatatttggcaaaactcaggtctattaatccaccatgtgtgcctttctttggaatttatctcactaatatcttgaaaacagaagaaggcaaccctgaggtcctaaaaagacatggaaaagagcttataaactttagcaaaaggaggaaagtagcagaaataacaggagagatccagcagtaccaaaatcagccttactgtttacgagtagaatcagatatcaaaaggttctttgaaaacttgaatccgatgggaaatagcatggagaaggaatttacagattatcttttcaacaaatccctagaaatagaaccacgaaaccctaagcctctcccaagatttccaaaaaaatatagctatcccctaaaatctcctggtgttcgtccatcaaacccaagaccaggtaccatgaggcatcccacacctctgcagcaggagccaaggaaaattagttatagtaggatccctgaaagtgaaacagaaagtacagcatctgcaccaaattctccaagaacaccgttaacacctccgcctgcttctggtgcttccagtaccacagatgtttgcagtgtatttgattccgatcattcgagcccttttcactcaagcaatgataccgtctttatccaagttactctgccccatggcccaagatctgcttctgtatcatctataagtttaaccaaaggcactgatgaagtgcctgtccctcctcctgttcctccacgaagacgaccagaatctgccccagcagaatcttcaccatctaagattatgtctaagcatttggacagtcccccagccattcctcctaggcaacccacatcaaaagcctattcaccacgatattcaatatcagaccggacctctatctcagaccctcctgaaagccctcccttattaccaccacgagaacctgtgaggacacctgatgttttctcaagctcaccactacatctccaacctccccctttgggcaaaaaaagtgaccatggcaatgccttcttcccaaacagcccttccccctttacaccacctcctcctcaaacaccttctcctcacggcacaagaaggcatctgccatcaccaccattgacacaagaagtggaccttcattccattgctgggccgcctgttcctccacgacaaagcacttctcaacatatccctaaactccctccaaaaacttacaaaagggagcacacacacccatccatgcacagagatggaccaccactgttggagaatgcccattcttcctgagttcctctgtactgggatgtatattttcctagccccaaatccattgctggcaatggatgcactgaatgtgccagcactgaggagttaaaatgagaactccaaacactaacgactcttcttcaagatgcagtataagacaatgaattttaacctagatgtaattatacaatggaaatggtattccagtttagaatatggaaagaccgacctagaggaattggacaactgattgcacctgaaaatcataaagggactttttctggccaataggcaggagtcctctttttgtgaagtgatcttttgtgaagtgatcattaaagggatggaaaacacagtctagtgtccagcaggcccacatgacagtttttgtaattcaaattatgcacttttaaaaaaaaaaacttaaacagggatcttaatatcttcctttgttttcctttgctttactcttctactttagaatattttcttaaaaatcactcaaaggactgtgaggaaaggctgtggtacctgaccttgttgaaatcaaggcccggcactgtactacaggcctgtttacagattattacggtgaactgaatgggtaccgaggcttcaccaaagaggtacttttttgttgttgttgttgttttaggaataattgtaccaattttaagagcattccccccacctgtccccacacacccaaacaaaatgtggtggtgttgccttcaaaaaagagaagttttgtgtcattaacatgacagaagaactttttaaaaaaaaataactgtcaactattctatttgcatttaggagactgttcatctatgctagattgtcattttccctccttctcccacagaagtttactggtagtccatgtcatggctcgtagctatccctctaaccataccatggaaatgcaggcacccaatgtgaaaaggagcacttgctgggcatcactgacaccgctcatgttttacacatagttgagtaatcagcatatctagaattatcttgcattgcctaaatcatatgtatatagtgaatgttatataatatacctggcaggtctgttttaatttaattgaataaagatacaaatactttgtttggctggcatatattaaattattatatgaagaaaatggttgattcttatttcttttagttgaaaaacacacaaaaacactaaacataaaagcacgttttgtggtacgccttggtttctagttctggatatatgtattaatcttaaagaatgatctaaagtcacagcttggcatataggaagatacttggttagaataggatgggtatcttttaagcagaactttgtaagtaagttttaagttcctaagcaacaagtatacagtttgttaaggtttatattgaacattctaccttgcttgaggttttctgctttatcaaaactattcataatagaacatctacctgcatcattactatcataatatggattattcataaagcgtatgtactgttcttctgagtctaacaaatactgtgactgaaatgcatgcaccttgttgaagagaaaacattttattaatctccactataatgtctgtgaaatgtgcagtattccatccttagagagtttatctggttcatcagcatctgcatgtatcctctgaataatgaagcaacatttcagcaattctgttaaccacaccattagagacatttttagaagtgctgcaacatggtgggaacctagtactttaataatttcctatgatatttattagagcataaaatgtacatcacgatagtacagtatgtagtcctttaagaccagaaggtatgttaactgcaccatcattaagcagtctatcctattttcttatttatttgttagaattgaatcctttctcaatatctgtaccattcctatgatggtagccattcttctctttataaaatatttcctctttgaaaagcgtcctaaaacattaatttcaaatcccctcttggatgcaaagtgtccctaagaccatccattcaacagtatttatgtgagccaacttactagagccgctacaactaatcatgatagacagtccagaatctccctggactttatactgggccagcctcattgtccctaagatttctctttttatgtctcatggattacttctctttttaattgccccaggcacattccaaatgagaacctggtaaaagtcacattggacccccttcagtatgtcttcggctaatgtgttagccttcaataaggtgataaccccttttcaacctatctagtctataaagaggaaaaattcagatttggagttctaatcctatttctcccaaagggaactattcttctaccccatggttctaggagaccacttcactgtgcaacagttttacatgcattgtggatggaggatatttttattctgaactgttacatttaggtaaaaatattttctgcagtggtaactgattagaaaaatgccaattggatgcccttaggtggaggtgagaaaatggcatccttgccttcttctcaatatgaaacattaactagttgacaaatttatccttgtagtaatgaaaatctatttaatcagggaccagaaatggctgaggagataaatgcatcattacaaaattctgcttttgaatcctggacattacaagggggtaaatgcagcatgactttttgttaaccacattccaaaatgtggaacatttcttttagaaatgaaaatatttcaaggctgatgtattttaagactacacattatcaggaaacatacattgagagttcgcttaattaaaggttgttgggcatcaaattatgtttagtaggttactattctctaacaactcaaggatgctttaatggatctgaatttgacaaagagcatgccacactaatactacagtcaacaacagcccagagaacaattactatgtcagctggaggctatattatgattctaaattcttaaaggtttttttccctccataaatcaaaaattaccttatgtaaaccaaaaattagttggtatttatggtcatgatcttaattctcaagtttagcttaatcttgtatttcattgtttgtcttctaatatgacagcttaaattcagatttttaagtgactcagcaaaataggaggagtgtcccaatttattagtgttgtacatattgaagaaaacctttttgttccttcagatttagaaagaaacagtttaaccatttatttcttggtattctgctgctgtgaataggtttacttattcttttaacatatattgtgtgactacgcaagtataggtcctgttgtattgcattaatctttaccagtaactaaacatcacaaggttaatattggtttggctgaaagaattatgcagtaaagttatttataagggaacatgatgactttattcaatatttttcttctttgaaacatctcattactaacttttaagattatttcataatcccttatacatgagccaatgaaatattttgagctctacttaagaagcatgaagtctatattataaatctaaacaacaaaagcacttgtaacttgtttagtaaattccatgccttattttccatttttgacaccgtaaagtgcattttctgtcgactgtgagcaaatttcccttttgcctttaatgaaaatagtgcattaagtagccaattgctgcagaattataaagcaaattagctaacagtgggtcacattggactaccactcaaagaaacaagatgcataacagatgatggaaggtacatgtggtgtggcttagggagagcgcacctgtgccagatgcatgccactttcagtagctgccaaatgtgcctttaattaagaacatctctaatttttttcttcagatcaagtcagcatttggggtcgggatttgggcagggaactttggggtgcaaatatctggtgaaaccaccagagaatttgtttgtcaaagtgacatgtataattttagttgagacgtgtttgtgtatatatgtgtatttgcctttgtttagtagcacggttatttgctaaaataattgtcaaaaaattgctctgtcggtcggtctttgatgtaagaacaaagtgtggtctatacatctaatatggcctttgtacctaaccatgttcataggtaatctttgtactctgtgtgcagcagtatttggtttgcatttaaagtgaaaataacggctgttatttttctggcattactaagataaactgaaaaataataaagaaaaatgccttacatagccc

SEQ ID NO: 184799 - DNA, 8517 bp, Homo sapiens
  Payload ID: 16396
  Gene Symbol: SOS1
  Gene Name: son of sevenless homolog 1 (Drosophila)
  Uniprot ID: Q07889
  ENST ID: ENST00000426016
  CDS Start-End: 88-4089
agtagcgagcaggttcagttcgctagtaggaagctccagcgctacaccgccgcccctctccccgcccagaggcgccccgggggcaccatgcaggcgcagcagctgccctacgagtttttcagcgaagagaacgcgcccaagtggcggggactactggtgcctgcgctgaaaaaggtccaggggcaagttcatcctactctcgagtctaatgatgatgctcttcagtatgttgaagaattaattttgcaattattaaatatgctatgccaagctcagccccgaagtgcttcagatgtagaggaacgtgttcaaaaaagtttccctcatccaattgataaatgggcaatagctgatgcccaatcagctattgaaaagaggaagcgaagaaaccctttatctctcccagtagaaaaaattcatcctttattaaaggaggtcctaggttataaaattgaccaccaggtttctgtttacatagtagcagtcttagaatacatttctgcagacattttaaagctggttgggaattatgtaagaaatatacggcattatgaaattacaaaacaagatattaaagtggcaatgtgtgctgacaaggtattgatggatatgtttcatcaagatgtagaagatattaatatattatctttaactgacgaagagccttccacctcaggagaacaaacttactatgatttggtaaaagcatttatggcagaaattcgacaatatataagggaactaaatctaattataaaagtttttagagagccctttgtctccaattcaaaattgttttcagctaatgatgtagaaaatatatttagtcgcatagtagatatacatgaacttagtgtaaagttactgggccatatagaagatacagtagaaatgacagatgaaggcagtccccatccactagtaggaagctgctttgaagacttagcagaggaactggcatttgatccatatgaatcgtatgctcgagatattttgcgacctggttttcatgatcgtttccttagtcagttatcaaagcctggggcagcactttatttgcagtcaataggcgaaggtttcaaagaagctgttcaatatgttttacccaggctgcttctggcccctgtttaccactgtctccattactttgaacttttgaagcagttagaagaaaaaagtgaagatcaagaagacaaggaatgtttaaaacaagcaataacagctttgcttaatgttcagagtggtatggaaaaaatatgttctaaaagtcttgcaaaacgaagactgagtgaatctgcatgtcggttttatagtcagcaaatgaaggggaaacaactagcaatcaagaagatgaacgagattcagaagaatattgatggttgggagggaaaagacattggacagtgttgtaatgaatttataatggaaggaactcttacacgtgtaggagccaaacatgagagacacatatttctctttgatggcttaatgatttgctgtaaatcaaatcatgggcagccaagacttcctggtgctagcaatgcagaatatcgtcttaaagaaaagttttttatgcgaaaggtacaaattaatgataaagatgacaccaatgaatacaagcatgcttttgaaataattttaaaagatgaaaatagtgttatattttctgccaagtcagctgaagagaaaaacaattggatggcagcattgatatctttacagtaccggagtacactggaaaggatgcttgatgtaacaatgctacaggaagagaaagaggagcagatgaggctgcctagtgctgatgtttatagatttgcagagcctgactctgaagagaatattatatttgaagagaacatgcagcccaaggctggaattccaattatcaaagcaggaactgttattaaacttatagagaggcttacgtaccatatgtacgcagatcccaattttgttcggacatttcttacaacatacagatccttttgcaaacctcaagaactactgagtcttataatagaaaggtttgaaattccagagcctgagccaacagaagctgatcgcatagctatagagaatggagatcaacccttgagtgcagaactgaaaagatttagaaaagaatatatacagcctgtgcaactgcgagtattaaatgtatgtcggcactgggtagagcaccacttctatgattttgaaagagatgcatatcttttgcaacgaatggaagaatttattggaacagtaagaggtaaagcaatgaaaaaatgggttgaatccatcactaaaataatccaaaggaaaaaaattgcaagagacaatggaccaggtcataatattacatttcagagttcacctcccacagttgagtggcatataagcagacctgggcacatagagacttttgacctgctcaccttacacccaatagaaattgctcgacaactcactttacttgaatcagatctataccgagctgtacagccatcagaattagttggaagtgtgtggacaaaagaagacaaagaaattaactctcctaatcttctgaaaatgattcgacataccaccaacctcactctgtggtttgagaaatgtattgtagaaactgaaaatttagaagaaagagtagctgtggtgagtcgaattattgagattctacaagtctttcaagagttgaacaactttaatggtgtccttgaggttgtcagtgctatgaattcatcacctgtttacagactagaccacacatttgagcaaataccaagtcgccagaagaaaattttagaagaagctcatgaattgagtgaagatcactataagaaatatttggcaaaactcaggtctattaatccaccatgtgtgcctttctttggaatttatctcactaatatcttgaaaacagaagaaggcaaccctgaggtcctaaaaagacatggaaaagagcttataaactttagcaaaaggaggaaagtagcagaaataacaggagagatccagcagtaccaaaatcagccttactgtttacgagtagaatcagatatcaaaaggttctttgaaaacttgaatccgatgggaaatagcatggagaaggaatttacagattatcttttcaacaaatccctagaaatagaaccacgaaaccctaagcctctcccaagatttccaaaaaaatatagctatcccctaaaatctcctggtgttcgtccatcaaacccaagaccaggtaccatgaggcatcccacacctctgcagcaggagccaaggaaaattagttatagtaggatccctgaaagtgaaacagaaagtacagcatctgcaccaaattctccaagaacaccgttaacacctccgcctgcttctggtgcttccagtaccacagatgtttgcagtgtatttgattccgatcattcgagcccttttcactcaagcaatgataccgtctttatccaagttactctgccccatggcccaagatctgcttctgtatcatctataagtttaaccaaaggcactgatgaagtgcctgtccctcctcctgttcctccacgaagacgaccagaatctgccccagcagaatcttcaccatctaagattatgtctaagcatttggacagtcccccagccattcctcctaggcaacccacatcaaaagcctattcaccacgatattcaatatcagaccggacctctatctcagaccctcctgaaagccctcccttattaccaccacgagaacctgtgaggacacctgatgttttctcaagctcaccactacatctccaacctccccctttgggcaaaaaaagtgaccatggcaatgccttcttcccaaacagcccttccccctttacaccacctcctcctcaaacaccttctcctcacggcacaagaaggcatctgccatcaccaccattgacacaagaagtggaccttcattccattgctgggccgcctgttcctccacgacaaagcacttctcaacatatccctaaactccctccaaaaacttacaaaagggagcacacacacccatccatgcacagagatggaccaccactgttggagaatgcccattcttcctgagttcctctgtactgggatgtatattttcctagccccaaatccattgctggcaatggatgcactgaatgtgccagcactgaggagttaaaatgagaactccaaacactaacgactcttcttcaagatgcagtataagacaatgaattttaacctagatgtaattatacaatggaaatggtattccagtttagaatatggaaagaccgacctagaggaattggacaactgattgcacctgaaaatcataaagggactttttctggccaataggcaggagtcctctttttgtgaagtgatcttttgtgaagtgatcattaaagggatggaaaacacagtctagtgtccagcaggcccacatgacagtttttgtaattcaaattatgcacttttaaaaaaaaaaacttaaacagggatcttaatatcttcctttgttttcctttgctttactcttctactttagaatattttcttaaaaatcactcaaaggactgtgaggaaaggctgtggtacctgaccttgttgaaatcaaggcccggcactgtactacaggcctgtttacagattattacggtgaactgaatgggtaccgaggcttcaccaaagaggtacttttttgttgttgttgttgttttaggaataattgtaccaattttaagagcattccccccacctgtccccacacacccaaacaaaatgtggtggtgttgccttcaaaaaagagaagttttgtgtcattaacatgacagaagaactttttaaaaaaaaataactgtcaactattctatttgcatttaggagactgttcatctatgctagattgtcattttccctccttctcccacagaagtttactggtagtccatgtcatggctcgtagctatccctctaaccataccatggaaatgcaggcacccaatgtgaaaaggagcacttgctgggcatcactgacaccgctcatgttttacacatagttgagtaatcagcatatctagaattatcttgcattgcctaaatcatatgtatatagtgaatgttatataatatacctggcaggtctgttttaatttaattgaataaagatacaaatactttgtttggctggcatatattaaattattatatgaagaaaatggttgattcttatttcttttagttgaaaaacacacaaaaacactaaacataaaagcacgttttgtggtacgccttggtttctagttctggatatatgtattaatcttaaagaatgatctaaagtcacagcttggcatataggaagatacttggttagaataggatgggtatcttttaagcagaactttgtaagtaagttttaagttcctaagcaacaagtatacagtttgttaaggtttatattgaacattctaccttgcttgaggttttctgctttatcaaaactattcataatagaacatctacctgcatcattactatcataatatggattattcataaagcgtatgtactgttcttctgagtctaacaaatactgtgactgaaatgcatgcaccttgttgaagagaaaacattttattaatctccactataatgtctgtgaaatgtgcagtattccatccttagagagtttatctggttcatcagcatctgcatgtatcctctgaataatgaagcaacatttcagcaattctgttaaccacaccattagagacatttttagaagtgctgcaacatggtgggaacctagtactttaataatttcctatgatatttattagagcataaaatgtacatcacgatagtacagtatgtagtcctttaagaccagaaggtatgttaactgcaccatcattaagcagtctatcctattttcttatttatttgttagaattgaatcctttctcaatatctgtaccattcctatgatggtagccattcttctctttataaaatatttcctctttgaaaagcgtcctaaaacattaatttcaaatcccctcttggatgcaaagtgtccctaagaccatccattcaacagtatttatgtgagccaacttactagagccgctacaactaatcatgatagacagtccagaatctccctggactttatactgggccagcctcattgtccctaagatttctctttttatgtctcatggattacttctctttttaattgccccaggcacattccaaatgagaacctggtaaaagtcacattggacccccttcagtatgtcttcggctaatgtgttagccttcaataaggtgataaccccttttcaacctatctagtctataaagaggaaaaattcagatttggagttctaatcctatttctcccaaagggaactattcttctaccccatggttctaggagaccacttcactgtgcaacagttttacatgcattgtggatggaggatatttttattctgaactgttacatttaggtaaaaatattttctgcagtggtaactgattagaaaaatgccaattggatgcccttaggtggaggtgagaaaatggcatccttgccttcttctcaatatgaaacattaactagttgacaaatttatccttgtagtaatgaaaatctatttaatcagggaccagaaatggctgaggagataaatgcatcattacaaaattctgcttttgaatcctggacattacaagggggtaaatgcagcatgactttttgttaaccacattccaaaatgtggaacatttcttttagaaatgaaaatatttcaaggctgatgtattttaagactacacattatcaggaaacatacattgagagttcgcttaattaaaggttgttgggcatcaaattatgtttagtaggttactattctctaacaactcaaggatgctttaatggatctgaatttgacaaagagcatgccacactaatactacagtcaacaacagcccagagaacaattactatgtcagctggaggctatattatgattctaaattcttaaaggtttttttccctccataaatcaaaaattaccttatgtaaaccaaaaattagttggtatttatggtcatgatcttaattctcaagtttagcttaatcttgtatttcattgtttgtcttctaatatgacagcttaaattcagatttttaagtgactcagcaaaataggaggagtgtcccaatttattagtgttgtacatattgaagaaaacctttttgttccttcagatttagaaagaaacagtttaaccatttatttcttggtattctgctgctgtgaataggtttacttattcttttaacatatattgtgtgactacgcaagtataggtcctgttgtattgcattaatctttaccagtaactaaacatcacaaggttaatattggtttggctgaaagaattatgcagtaaagttatttataagggaacatgatgactttattcaatatttttcttctttgaaacatctcattactaacttttaagattatttcataatcccttatacatgagccaatgaaatattttgagctctacttaagaagcatgaagtctatattataaatctaaacaacaaaagcacttgtaacttgtttagtaaattccatgccttattttccatttttgacaccgtaaagtgcattttctgtcgactgtgagcaaatttcccttttgcctttaatgaaaatagtgcattaagtagccaattgctgcagaattataaagcaaattagctaacagtgggtcacattggactaccactcaaagaaacaagatgcataacagatgatggaaggtacatgtggtgtggcttagggagagcgcacctgtgccagatgcatgccactttcagtagctgccaaatgtgcctttaattaagaacatctctaatttttttcttcagatcaagtcagcatttggggtcgggatttgggcagggaactttggggtgcaaatatctggtgaaaccaccagagaatttgtttgtcaaagtgacatgtataattttagttgagacgtgtttgtgtatatatgtgtatttgcctttgtttagtagcacggttatttgctaaaataattgtcaaaaaattgctctgtcggtcggtctttgatgtaagaacaaagtgtggtctatacatctaatatggcctttgtacctaaccatgttcataggtaatctttgtactctgtgtgcagcagtatttggtttgcatttaaagtgaaaataacggctgttatttttctggcattactaagataaactgaaaaataataaagaaaaatgccttacatagcccacaagtgtattatttttgcatgtatttattttagagggcagtatttttgaaatcattagtgattctcatttagctcatatatgccatatagaaatattttgcatttttattgtggtctttctttggaggcacttttttcctgtatcaagttataaaa

SEQ ID NO: 184800 - DNA, 579 bp, Homo sapiens
  Payload ID: 16396
  Gene Symbol: SOS1
  Gene Name: son of sevenless homolog 1 (Drosophila)
  ENST ID: ENST00000451331
  CDS Start-End: 272-579
aagaagcctctgcgcctgcgccagggcgcacccgtcggcggtaaaagctgaggggctggcgcgggggattggtgggcgacacttttacgtctacacgtgcctacccgtctgcacgtttctgagtccgcacggttgtcttctcttgctgaatggacataggtgttttgttttgtcccaagagatacaggtccaggggcaagttcatcctactctcgagtctaatgatgatgctcttcagtatgttgaagaattaattttgcaattattaaatatgctatgccaagctcagccccgaagtgcttcagatgtagaggaacgtgttcaaaaaagtttccctcatccaattgataaatgggcaatagctgatgcccaatcagctattgaaaagaggaagcgaagaaaccctttatctctcccagtagaaaaaattcatcctttattaaaggaggtcctaggttataaaattgaccaccaggtttctgtttacatagtagcagtcttagaatacatttctgcagacattttaaagctggttgggaattatgtaagaaatatacggcattatgaaattacaaaaca

SEQ ID NO: 184801 - DNA, 5498 bp, Homo sapiens
  Payload ID: 16397
  Gene Symbol: SOS2
  Gene Name: son of sevenless homolog 2 (Drosophila)
  Uniprot ID: Q07890
  ENST ID: ENST00000216373
  CDS Start-End: 276-4274
gggaaaggaggtcgccgcccggggtcgcccgggcttgcgggtcgccgcgcttcctctgcgggcgctgcgggaggcgagggccgcctcggcggaggaagccgaccccggggtctccgccagcccgccggcgccgcctccgagccgcctcggccgtagcctcggcccgggcgggaggcggcggccgccggcgaggcgaggcggcccgcgccctgcctgtcaggccaccggcccggcccgcgggctgcccccgatgcggaggcgctgtcgccggggccatgcagcaggcgccgcagccttacgagttcttcagcgaggagaacagtccgaaatggcggggactgttggtctcggccctgcggaaggttcaggaacaagtgcatcccactctctcagctaatgaagagtctctctattatattgaagagctgatttttcagctgcttaataaattatgcatggcccagccaaggactgttcaagatgtagaggagcgagttcagaagacctttcctcacccaattgataaatgggccattgctgatgcacaatctgctatagaaaaacgaaaacgaagaaatcctcttttactgcctgtggacaaaatccatccttcgttgaaggaagtattagggtacaaagtggactaccatgtatccctatatattgtggctgtactagagtatatctcagctgatattttaaaattggctggtaattatgtttttaatatccggcattatgaaatatctcagcaggacattaaagtgtcaatgtgtgcggataaggttttgatggacatgtttgatcaggatgacataggtttggtttctctctgtgaagatgaacctagttcttctggtgaattaaactactatgatcttgtcagaactgaaatcgcagaagaaagacagtatctacgggaattaaatatgatcataaaagtgtttcgagaagcctttctttctgatagaaagctgtttaaaccttctgatatcgaaaagatttttagtaacatttcagatatacatgaattgactgtgaaacttttaggtttgattgaagacacagttgaaatgactgatgaaagcagtcctcatcccttagctggcagctgttttgaagatttggcagaagagcaagcatttgatccttatgaaacattatcacaggacattctttcaccagagtttcatgaacatttcaataaattgatggccagacctgcagttgctctacactttcagtccattgctgatggttttaaagaggcagttcgttatgtccttccacgtcttatgctggtgccagtgtatcactgttggcactactttgagttactaaagcaattgaaagcatgtagtgaagaacaagaagacagagaatgtttgaaccaagctattactgctctcatgaatctccaaggtagcatggaccgaatttacaagcagtattcacctagacgtcgacctggagatcctgtttgccctttttatagtcaccaattaagaagcaaacacctggctatcaaaaaaatgaatgaaattcagaaaaatatcgatggatgggaaggcaaagatattggacagtgttgtaatgaattcattatggagggaccattgacaagaatcggtgccaaacatgaacggcatatttttctgtttgatggcttaatgatcagttgtaaacctaatcatggccagactcggcttccaggttacagtagtgcagaatacaggttaaaagaaaaatttgtcatgaggaaaatacaaatttgtgataaagaagatacttgtgagcacaagcatgcatttgaattagtatccaaagatgagaacagcataatatttgctgctaagtctgctgaagaaaaaaacaactggatggcagcccttatttctcttcattatcgtagtactctagatcgaatgttagattcagtattattgaaagaagaaaatgagcaaccactgagattaccaagtcctgaagtatatcgttttgtagtaaaagactctgaggaaaacattgtttttgaagacaacttgcaaagtagaagtggcatccccattattaaaggaggaactgtagtgaaattaattgaaaggttaacatatcatatgtatgcagatcccaattttgttcgtacttttcttaccacatatcgttcattttgtaaaccacaggaattgctgagcttactgattgaacggtttgaaattccagagccagaacctactgacgcagacaaattggcaatagagaaaggcgagcagccaatcagtgcagaccttaaaagatttcgcaaggaatatgtccaaccagtacaacttaggatcttaaatgtatttcggcattgggttgaacatcatttttatgactttgaaagagacttggaattgcttgaaagactagaatccttcatttcaagtgtaagagggaaagctatgaaaaaatgggtagagtcaattgctaagatcatcaggaggaagaagcaagctcaggcaaacggagtaagccataatattacctttgaaagtccacctccaccaattgaatggcatatcagcaaaccaggacagtttgaaacatttgatctcatgacacttcatccaatagaaattgcacgtcagctgacacttttggagtctgatctttacaggaaagttcaaccgtctgaacttgtagggagtgtgtggaccaaagaagataaagaaataaattctccaaatttattaaaaatgattcgccataccacaaatctcaccctctggtttgaaaaatgcattgtggaagcagaaaattttgaagaacgggtggcagtactaagtagaattatagaaattctgcaagtttttcaagatttgaataatttcaatggcgtattggagatagtcagtgcagtaaattcagtgtcagtatacagactagaccatacctttgaggcactgcaggaaaggaaaaggaaaattttggacgaagctgtggaattaagtcaagatcactttaaaaaatacctagtaaaacttaagtcaatcaatccaccttgtgtgcctttttttggaatatatttaacaaatattctgaagaccgaagaagggaataatgattttttaaaaaagaaagggaaagatttaatcaatttcagtaagaggaggaaagtagctgaaattactggagaaattcagcagtatcagaatcagccttactgtttacggatagaaccagatatgaggagattctttgaaaaccttaaccccatgggaagtgcatctgaaaaagagtttacagattatttgttcaacaagtcactagaaattgaacctcgaaactgcaaacagccacctcgatttcctaggaaatcaactttttccttaaaatctcctggaataaggcctaacacaggccgacatggctctacctcaggtactttacgaggtcacccaacaccattagaaagagaaccatgtaaaataagctttagtcggattgctgaaactgagctggaatcaacagtgtcagcaccaacctctccaaatacaccatctactccaccagtatctgcttcttcagaccttagtgtatttttagatgtggatctcaacagctcctgtggcagcaatagcatctttgctccagtgcttttgccacattcaaagtctttctttagttcatgtggtagtttacataaactaagtgaagagcccctgattcctcctcctcttcctcctcgaaaaaagtttgatcatgatgcttcaaattccaagggaaatatgaaatctgatgatgatcctcctgctattccaccgagacagcctcctcctccaaaggtaaaacccagagttcctgttcctactggtgcatttgatgggcctctgcatagtccacctccgccaccaccaagagatcctcttcctgatacccctccaccagttccccttcggcctccagaacactttataaactgtccatttaatcttcagccacctccactggggcatcttcacagagattcagactggctcagagacattagtacgtgtccaaattcgccaagcactcctcctagcacaccctctccaagggtaccgcgtcgatgctatgtgctcagttctagtcagaataatcttgctcatcctccagctccccctgttccaccaaggcagaattcaagccctcatctgccaaaactgccaccaaagacttacaaacgggagctttcgcaccccccattgtacagactgcctttgctagaaaatgcagaaactccccaatgaccttagccatatgtagtcattgacactggaatggtatttgtaaagttttttttttaatttattcaaaaaaagacatagtattttagtactttttacaaataatgctcttacaaaaatgctactgatcaaataagcttttaagaattggaaaaataaaaatacaaaagtccttcaccattatcctcaggtgatcagtagcattgccttgtcttggatcctcagtgctgccaaaaggccagtataaagaatttatatttgcactgtaaactctgcaaaaatatggtttaaagtgacatgattgcactgaaaagggatagtgcttttgtgaaatttttcaaatttgagtaatagatgcctttttaaggcagtgaatttacacaaatatgggaggggtatatggtgttactgatttttaaacctctttgaccatcttctagtttttacttctagtttttacatctaggagaattgtgaataacaccaactgttcttaaactctttaatgccatgtcttaaatgccggtatttgctgctgaagacaaaaatgaaaagtaggatgaaaataatagaatggcactgtaagtgtttattattttgtcaaaatgtaaacaaagactacataacccaatgatggagggaaaaagggcatgtatctcattcagatgtgccttttgtttttgcagactatgacgtctttagctaatgaattgcctattgttatggaaaacagttaatatgccatgtatgtacagttttgtttatattgtatatttaaagatactgctaataacctatataaatttaagtgacttgaggcctataatacaatctgctactttactaattcataaattcaaaaaaaattctatggcataggaaccaactgccttgccttcaagacctagtaactttctctataaatctcgtgttaactgaaattttttttaaatatattttttagattggtaatatttaaaccagcaaatacttaaagctttattaaacattttaatcagataagtgagtaaagcttttatttgccatttggatgccttcgttcaaagtgatagagtgttttgctgatagtgctgtagcagcagttgtaaagtagccaaaagccacgttgtttatttactggtttgtggccttttactgtgctttgtatcagagttcttaacaagattaataaatcaccccagtcttaatttttaaaagacttttaaa

SEQ ID NO: 184802 - DNA, 3960 bp, Homo sapiens
  Payload ID: 16397
  Gene Symbol: SOS2
  Gene Name: son of sevenless homolog 2 (Drosophila)
  Uniprot ID: Q07890
  ENST ID: ENST00000543680
  CDS Start-End: 27-3926
gatgcggaggcgctgtcgccggggccatgcagcaggcgccgcagccttacgagttcttcagcgaggagaacagtccgaaatggcggggactgttggtctcggccctgcggaaggttcaggaacaagtgcatcccactctctcagctaatgaagagtctctctattatattgaagagctgatttttcagctgcttaataaattatgcatggcccagccaaggactgttcaagatgtagaggagcgagttcagaagacctttcctcacccaattgataaatgggccattgctgatgcacaatctgctatagaaaaacgaaaacgaagaaatcctcttttactgcctgtggacaaaatccatccttcgttgaaggaagtattagggtacaaagtggactaccatgtatccctatatattgtggctgtactagagtatatctcagctgatattttaaaattggctggtaattatgtttttaatatccggcattatgaaatatctcagcaggacattaaagtgtcaatgtgtgcggataaggttttgatggacatgtttgatcaggatgacataggtttggtttctctctgtgaagatgaacctagttcttctggtgaattaaactactatgatcttgtcagaactgaaatcgcagaagaaagacagtatctacgggaattaaatatgatcataaaagtgtttcgagaagcctttctttctgatagaaagctgtttaaaccttctgatatcgaaaagatttttagtaacatttcagatatacatgaattgactgtgaaacttttaggtttgattgaagacacagttgaaatgactgatgaaagcagtcctcatcccttagctggcagctgttttgaagatttggcagaagagcaagcatttgatccttatgaaacattatcacaggacattctttcaccagagtttcatgaacatttcaataaattgatggccagacctgcagttgctctacactttcagcaattgaaagcatgtagtgaagaacaagaagacagagaatgtttgaaccaagctattactgctctcatgaatctccaaggtagcatggaccgaatttacaagcagtattcacctagacgtcgacctggagatcctgtttgccctttttatagtcaccaattaagaagcaaacacctggctatcaaaaaaatgaatgaaattcagaaaaatatcgatggatgggaaggcaaagatattggacagtgttgtaatgaattcattatggagggaccattgacaagaatcggtgccaaacatgaacggcatatttttctgtttgatggcttaatgatcagttgtaaacctaatcatggccagactcggcttccaggttacagtagtgcagaatacaggttaaaagaaaaatttgtcatgaggaaaatacaaatttgtgataaagaagatacttgtgagcacaagcatgcatttgaattagtatccaaagatgagaacagcataatatttgctgctaagtctgctgaagaaaaaaacaactggatggcagcccttatttctcttcattatcgtagtactctagatcgaatgttagattcagtattattgaaagaagaaaatgagcaaccactgagattaccaagtcctgaagtatatcgttttgtagtaaaagactctgaggaaaacattgtttttgaagacaacttgcaaagtagaagtggcatccccattattaaaggaggaactgtagtgaaattaattgaaaggttaacatatcatatgtatgcagatcccaattttgttcgtacttttcttaccacatatcgttcattttgtaaaccacaggaattgctgagcttactgattgaacggtttgaaattccagagccagaacctactgacgcagacaaattggcaatagagaaaggcgagcagccaatcagtgcagaccttaaaagatttcgcaaggaatatgtccaaccagtacaacttaggatcttaaatgtatttcggcattgggttgaacatcatttttatgactttgaaagagacttggaattgcttgaaagactagaatccttcatttcaagtgtaagagggaaagctatgaaaaaatgggtagagtcaattgctaagatcatcaggaggaagaagcaagctcaggcaaacggagtaagccataatattacctttgaaagtccacctccaccaattgaatggcatatcagcaaaccaggacagtttgaaacatttgatctcatgacacttcatccaatagaaattgcacgtcagctgacacttttggagtctgatctttacaggaaagttcaaccgtctgaacttgtagggagtgtgtggaccaaagaagataaagaaataaattctccaaatttattaaaaatgattcgccataccacaaatctcaccctctggtttgaaaaatgcattgtggaagcagaaaattttgaagaacgggtggcagtactaagtagaattatagaaattctgcaagtttttcaagatttgaataatttcaatggcgtattggagatagtcagtgcagtaaattcagtgtcagtatacagactagaccatacctttgaggcactgcaggaaaggaaaaggaaaattttggacgaagctgtggaattaagtcaagatcactttaaaaaatacctagtaaaacttaagtcaatcaatccaccttgtgtgcctttttttggaatatatttaacaaatattctgaagaccgaagaagggaataatgattttttaaaaaagaaagggaaagatttaatcaatttcagtaagaggaggaaagtagctgaaattactggagaaattcagcagtatcagaatcagccttactgtttacggatagaaccagatatgaggagattctttgaaaaccttaaccccatgggaagtgcatctgaaaaagagtttacagattatttgttcaacaagtcactagaaattgaacctcgaaactgcaaacagccacctcgatttcctaggaaatcaactttttccttaaaatctcctggaataaggcctaacacaggccgacatggctctacctcaggtactttacgaggtcacccaacaccattagaaagagaaccatgtaaaataagctttagtcggattgctgaaactgagctggaatcaacagtgtcagcaccaacctctccaaatacaccatctactccaccagtatctgcttcttcagaccttagtgtatttttagatgtggatctcaacagctcctgtggcagcaatagcatctttgctccagtgcttttgccacattcaaagtctttctttagttcatgtggtagtttacataaactaagtgaagagcccctgattcctcctcctcttcctcctcgaaaaaagtttgatcatgatgcttcaaattccaagggaaatatgaaatctgatgatgatcctcctgctattccaccgagacagcctcctcctccaaaggtaaaacccagagttcctgttcctactggtgcatttgatgggcctctgcatagtccacctccgccaccaccaagagatcctcttcctgatacccctccaccagttccccttcggcctccagaacactttataaactgtccatttaatcttcagccacctccactggggcatcttcacagagattcagactggctcagagacattagtacgtgtccaaattcgccaagcactcctcctagcacaccctctccaagggtaccgcgtcgatgctatgtgctcagttctagtcagaataatcttgctcatcctccagctccccctgttccaccaaggcagaattcaagccctcatctgccaaaactgccaccaaagacttacaaacgggagctttcgcaccccccattgtacagactgcctttgctagaaaatgcagaaactccccaatgaccttagccatatgtagtcattgacactggaatgg

SEQ ID NO: 184803 - DNA, 398 bp, Homo sapiens
  Payload ID: 16397
  Gene Symbol: SOS2
  Gene Name: son of sevenless homolog 2 (Drosophila)
  ENST ID: ENST00000556452
  CDS Start-End: 80-292
ggcggcccgcgccctgcctgtcaggccaccggcccggcccgcgggctgcccccgatgcggaggcgctgtcgccggggccatgcagcaggcgccgcagccttacgagttcttcagcgaggagaacagtccgaaatggcggggactgttggtctcggccctgcggaagaagtgtaaagcatggttctcttccattgtcctcttgatgtcctgttacagcatttatgggttcaggaacaagtgcatcccactctctcagctaatgaagagtctctctattatattgaagagctgatttttcagctgcttaataaattatgcatggcccagccaaggactgttcaagatgtagaggagcgagttcagaagacctttcctcacccaattgataaatgggccat

SEQ ID NO: 184804 - DNA, 2278 bp, Homo sapiens
  Payload ID: 16397
  Gene Symbol: SOS2
  Gene Name: son of sevenless homolog 2 (Drosophila)
  ENST ID: ENST00000555794
  CDS Start-End: 1-1259
tatcacaggacattctttcaccagagtttcatgaacatttcaataaattgatggccagacctgcagttgctctacactttcagtccattgctgatggttttaaagaggcagttcgttatgtccttccacgtcttatgctggtgccagtgtatcactgttggcactactttgagttactaaagcaattgaaagcatgtagtgaagaacaagaagacagagaatgtttgaaccaagctattactgctctcatgaatctccaaggtagcatggaccgaatttacaagcagtattcacctagacgtcgacctggagatcctgtttgccctttttatagtcaccaattaagaagcaaacacctggctatcaaaaaaatgaatgaaattcagaaaaatatcgatggatgggaaggcaaagatattggacagtgttgtaatgaattcattatggagggaccattgacaagaatcggtgccaaacatgaacggcatatttttctgtttgatggcttaatgatcagttgtaaacctaatcatggccagactcggcttccaggttacagtagtgcagaatacaggttaaaagaaaaatttgtcatgaggaaaatacaaatttgtgataaagaagatacttgtgagcacaagcatgcatttgaattagtatccaaagatgagaacagcataatatttgctgctaagtctgctgaagaaaaaaacaactggatggcagcccttatttctcttcattatcgtagtactctagatcgaatgttagattcagtattattgaaagaagaaaatgagcaaccactgagattaccaagtcctgaagtatatcgttttgtagtaaaagactctgaggaaaacattgtttttgaagacaacttgcaaagtagaagtggcatccccattattaaaggaggaactgtagtgaaattaattgaaaggttaacatatcatatgtatgcagatcccaattttgttcgtacttttcttaccacatatcgttcattttgtaaaccacaggaattgctgagcttactgattgaacggtttgaaattccagagccagaacctactgacgcagacaaattggcaatagagaaaggcgagcagccaatcagtgcagaccttaaaagatttcgcaaggaatatgtccaaccagtacaacttaggtttggcttgaatattttttatatatatatatatacacatatatatacacacacacacacattttatgtgtcagttttcaatatatagttaacacaaaagctctcagcttttaattcaaatatagggaatatttttaacttcacagcagttaagttaaactaaaagagttctttctcagtgaagctattcttaaataccctgaagaaattcaaatatttaaatatcctatgtttgcatcacatatctctggcatgtgatatgttatgcttacgtatcaggatacctattttttattgtaagtaaaaattataaaatttcatgtgagctttcctgctgtcaaccttttttcacacttttttccttcatttccctttgcgatcatacagtaatcctggctttttttacaatttataatatttgtggaagttctagcccttttcccacttatctctcacaaaatatatagacatttgttagtttaattgcaataatttctaaaaatgtgtttgattgtagaagcttccagttaataaatactactgtgtgccggggattaccctaaatgctttatcttttttatctcattcttacaacatgattactattcctactttatatataaggaaattgaaacctagcaaggtgaagtaatttgagctaagttatgtaaagggagtggcaggacaagattcagactcatgtctgactttctttgcgtgtgtgtgtgtgtgtgtgtgtgtacgtaccactaagcattgaaaattggaagcgccttctcttagccctctttactgtccaagtaaccaaagtattatcttcctccttccattggaaaccaagttatcttattaattatatgtaatttaaattttttttctctctaaatttcaagtttccttgattactgttgaccaataaattgtaattttggaactgagtatattagttatttatttcccaggataattgccacaaacaaatgcagttttagaagaatgatagtgctcccagctatatgtctttcactaaaacttttaacgtcattctttgtataagaagatgagattatttatgtatcagcaataaataagtaattcttttctact

SEQ ID NO: 184805 - DNA, 4454 bp, Homo sapiens
  Payload ID: 16398
  Gene Symbol: SHH
  Gene Name: sonic hedgehog
  Uniprot ID: Q15465
  ENST ID: ENST00000297261
  CDS Start-End: 152-1540
gcgaggcagccagcgagggagagagcgagcgggcgagccggagcgaggaagggaaagcgcaagagagagcgcacacgcacacacccgccgcgcgcactcgcgcacggacccgcacggggacagctcggaagtcatcagttccatgggcgagatgctgctgctggcgagatgtctgctgctagtcctcgtctcctcgctgctggtatgctcgggactggcgtgcggaccgggcagggggttcgggaagaggaggcaccccaaaaagctgacccctttagcctacaagcagtttatccccaatgtggccgagaagaccctaggcgccagcggaaggtatgaagggaagatctccagaaactccgagcgatttaaggaactcacccccaattacaaccccgacatcatatttaaggatgaagaaaacaccggagcggacaggctgatgactcagaggtgtaaggacaagttgaacgctttggccatctcggtgatgaaccagtggccaggagtgaaactgcgggtgaccgagggctgggacgaagatggccaccactcagaggagtctctgcactacgagggccgcgcagtggacatcaccacgtctgaccgcgaccgcagcaagtacggcatgctggcccgcctggcggtggaggccggcttcgactgggtgtactacgagtccaaggcacatatccactgctcggtgaaagcagagaactcggtggcggccaaatcgggaggctgcttcccgggctcggccacggtgcacctggagcagggcggcaccaagctggtgaaggacctgagccccggggaccgcgtgctggcggcggacgaccagggccggctgctctacagcgacttcctcactttcctggaccgcgacgacggcgccaagaaggtcttctacgtgatcgagacgcgggagccgcgcgagcgcctgctgctcaccgccgcgcacctgctctttgtggcgccgcacaacgactcggccaccggggagcccgaggcgtcctcgggctcggggccgccttccgggggcgcactggggcctcgggcgctgttcgccagccgcgtgcgcccgggccagcgcgtgtacgtggtggccgagcgtgacggggaccgccggctcctgcccgccgctgtgcacagcgtgaccctaagcgaggaggccgcgggcgcctacgcgccgctcacggcccagggcaccattctcatcaaccgggtgctggcctcgtgctacgcggtcatcgaggagcacagctgggcgcaccgggccttcgcgcccttccgcctggcgcacgcgctcctggctgcactggcgcccgcgcgcacggaccgcggcggggacagcggcggcggggaccgcgggggcggcggcggcagagtagccctaaccgctccaggtgctgccgacgctccgggtgcgggggccaccgcgggcatccactggtactcgcagctgctctaccaaataggcacctggctcctggacagcgaggccctgcacccgctgggcatggcggtcaagtccagctgaagccggggggccgggggaggggcgcgggagggggcggggcggggcagcaacagcaacgcaaagcaaaaagacactcggaaaaggcgcacgaaccagactgagttataataagaataagaataataaagtaggacagtccaaagtagactctaaggaaacaaggaccccgggaagttttgttgttgtgcttagttgatatatattttttgaatttttttggttattgttttattttggttattttttcctcctctcctggctatttatttgtttggtatgaatagatgttttaaataatatgaaccggaccttcaagagccttaaatagtttgtttcttggataatttattatgatcatgtgaactgtactcacgggggaaagattattttgtgaggccaagcaacctgctcagagtctatttttctacatgtccctcgtcccggctgtcagaaagcaaacctctgtccccgccatccctcccttccatctcctgcttctcagcaagtgcaaactcaaacgtgcttcatgggggtccacaaattatatttttatacacagaattgtaaattagattttttgagagatcaatacttaactgaattacatttcatttttgaaatagtgtaaaatatgaaaatatattattttaatttaactagtttccgatgtaacagccatctcctctgttgtctttatggtttcatattccctttgtattcaccattttgccacattcttggaagccaagactgttacacacacaacatacacacacacttttctttttcttttcttttcttttttttttttttttttttttttggacaaactggaagaactgttatttttaacttcaaagaatttattagaaaataatattttttaaaagcgcacatagtgacgagcccacgaggatggagcctgcagtttgtacagagaaaacaaaggatgtttttgcattaataaattgagaaataacgctgtaaatttactaaaatgtatttttgaatattttgtaatagttttatagaaataaaatgtgccatgcacagaacgcttagtatctaataactaagaattcctgttgcagccctttttcttttagtttttggcttctttgtttgggaaacctagcgctgacaggagctcccaatattctatttagatgtgttgcttatactgtgaactcagactgactgacttaggtaaccaaagtaggcacacaaaccaacttgtttcttctcatggctggagaaacctcagctctgtttgtatttattgtgtgaagctctttctacactcccaaaggttgggagtgccattcgtggggactgtgctgtccccctcaccccaccccttaactagcaaagcctgatgtgtaagcccagaggaggtggcctggggatggccaccaacaaccttctcttaggactcctgtgtgtggttgctgggcagacccctggcctgaccctgtttgtgcttctctgatctgtagggaggaggctcattgctgctttctgaggtcctgttgtgtcccttccagaaagcatccttagaagagaggacccggtttgatcttctctgaagctcctatcctcttttcttgagggtccccttaaatctgagtggcaagcccacagtggcgagggccagtcgctggaatgtcggggctgctgttgaggtcctcaggctacactggttgtctgtgtcacatggcggtcgggcgtggactttgatccctgttgagagagcatgctgctgtgggcgctgggctggggaaggtccttccatgcttcatgctgccttggaggtttggccaagagggtctctgcccttggcggttgtcagggtcccaggtggaggactactcccagttctttggcttacggaaggtgtctgccatgctttgtgctttgggccgaatcgtctgagcaggctgggccttggaagagttgcgctgcatgagcttggggcctcccagcagctgcagcctgtgtagaaggtggtccaggcttagggaacaggagtgaacagacttcagccccacctggcaggggctggctcccgaggttgggcccagtccctgagggtctgctctgctacgggtctgcccttgagtggccttccgtggagggtgtgtgaccaggtggatggcgcagggcctctggagccctctcctcaggagcagtcctcagcctttttctgtaaaagacttttctttggtgttctaggtggtcagcaggttccaggctggtgtttacaatctcggaggaagtgcgatggtttctgttcttttgacagttcagtctgatttcaagtcagtcgaaagcgaaccagaagcaccgggcacagcagctcctctggctgtgtagacagacctggcaatgtggccgtgcagcccagacgatcagagagaagccaggcgttgaccaagccccaaggtgcctgaggccatggtgcaactctgctggtgactggggcaccttggagcagagcttcacccggatgggaaatcctcactcctgggtggcactccctcctggacaggcccggtggcagagtgtccgtgctgctgggtgctgtccccagccctcctggtccatcttcttaagatgcgtccactgctttatatttaaaattctctttttcacaggcaaggaaaggaaaccactgcttagagacactaggtacagggcatcaagagggtgcagcccagccccgccaggacgaggcgccgacttctcattcagggttgacggagccaagagtttgtgcaaaatgtatgcatggtggttgctgccagcctccctcatgactaaatgcatatctattcctgtcaaaacgtgtatcacaatgtacttgaaactgttatctttgtgctctattgtttgaataattaaagaaattacagag

SEQ ID NO: 184806 - DNA, 677 bp, Homo sapiens
  Payload ID: 16398
  Gene Symbol: SHH
  Gene Name: sonic hedgehog
  ENST ID: ENST00000430104
  CDS Start-End: 171-677
tgaagcctggagtggggtcccgagccgctacactaaatagatttaatgtgcgctctggggccgccaggaaagacgctcaggcctcgctaggagcatcggctgtttcaggacctggagaaaggcccccagctctaccctgagaggacgtgctcctccacgctcctccgcaaatgctgtccctcttccccagcccagggcccggctcttcgaggtgtaaggacaagttgaacgctttggccatctcggtgatgaaccagtggccaggagtgaaactgcgggtgaccgagggctgggacgaagatggccaccactcagaggagtctctgcactacgagggccgcgcagtggacatcaccacgtctgaccgcgaccgcagcaagtacggcatgctggcccgcctggcggtggaggccggcttcgactgggtgtactacgagtccaaggcacatatccactgctcggtgaaagcaggcaaggaaaggaaaccactgcttagagacactaggtacagggcatcaagagggtgcagcccagccccgccaggacgaggcgccgacttctcattcagggttgacggagccaagagtttgtgcaaaatgtatgcatggtggttgctgccagcctccctcatgactaaatgcatatctattcctgtcaaaacgtgtatcacaatgtac

SEQ ID NO: 184807 - DNA, 888 bp, Homo sapiens
  Payload ID: 16398
  Gene Symbol: SHH
  Gene Name: sonic hedgehog
  ENST ID: ENST00000441114
  CDS Start-End: 171-551
tgaagcctggagtggggtcccgagccgctacactaaatagatttaatgtgcgctctggggccgccaggaaagacgctcaggcctcgctaggagcatcggctgtttcaggacctggagaaaggcccccagctctaccctgagaggacgtgctcctccacgctcctccgcaaatgctgtccctcttccccagcccagggcccggctcttcgaggtgtaaggacaagttgaacgctttggccatctcggtgatgaaccagtggccaggagtgaaactgcgggtgaccgagggctgggacgaagatggccaccactcagaggagtctctgcactacgagggccgcgcagtggacatcaccacgtctgaccgcgaccgcagcaagtacggcatgctggcccgcctggcggtggaggccggcttcgactgggtgtactacgagtccaaggcacatatccactgctcggtgaaagcaggtggtcagcaggttccaggctggtgtttacaatctcggaggaagtgcgatggtttctgttcttttgacagttcagtctgatttcaagtcagtcgaaagcgaaccagaagcaccgggcacagcagctcctctggctgtgtagacagacctggcaatgtggccgtgcagcccagacgatcagagagaagccaggcgttgaccaagccccaaggcaaggaaaggaaaccactgcttagagacactaggtacagggcatcaagagggtgcagcccagccccgccaggacgaggcgccgacttctcattcagggttgacggagccaagagtttgtgcaaaatgtatgcatggtggttgctgccagcctccctcatgactaaatgcatatctattcctgtcaaaacgtgtatcacaatgtact

SEQ ID NO: 184808 - DNA, 807 bp, Homo sapiens
  Payload ID: 16398
  Gene Symbol: SHH
  Gene Name: sonic hedgehog
  ENST ID: ENST00000435425
  CDS Start-End: 171-542
tgaagcctggagtggggtcccgagccgctacactaaatagatttaatgtgcgctctggggccgccaggaaagacgctcaggcctcgctaggagcatcggctgtttcaggacctggagaaaggcccccagctctaccctgagaggacgtgctcctccacgctcctccgcaaatgctgtccctcttccccagcccagggcccggctcttcgaggtgtaaggacaagttgaacgctttggccatctcggtgatgaaccagtggccaggagtgaaactgcgggtgaccgagggctgggacgaagatggccaccactcagaggagtctctgcactacgagggccgcgcagtggacatcaccacgtctgaccgcgaccgcagcaagtacggcatgctggcccgcctggcggtggaggccggcttcgactgggtgtactacgagtccaaggcacatatccactgctcggtgaaagcagttcagtctgatttcaagtcagtcgaaagcgaaccagaagcaccgggcacagcagctcctctggctgtgtagacagacctggcaatgtggccgtgcagcccagacgatcagagagaagccaggcgttgaccaagccccaaggcaaggaaaggaaaccactgcttagagacactaggtacagggcatcaagagggtgcagcccagccccgccaggacgaggcgccgacttctcattcagggttgacggagccaagagtttgtgcaaaatgtatgcatggtggttgctgccagcctccctcatgactaaatgcatatctattcctgtcaaaacgtgtat

SEQ ID NO: 184809 - DNA, 3517 bp, Homo sapiens
  Payload ID: 16399
  Gene Symbol: SORBS1
  Gene Name: sorbin and SH3 domain containing 1
  Uniprot ID: Q9BX66
  ENST ID: ENST00000277982
  CDS Start-End: 28-3483
ttgcagacgacttgtcctgccaccaccatgagttctgaatgtgatggtggttccaaagctgtgatgaatggcttggcacctggcagcaatgggcaagacaaagcaactgccgaccctttacgcgcacgctctatttctgctgttaaaatcattcctgtgaagacagtgaaaaacgcctcaggcctagttctccctacagacatggatcttacaaaaatctgcactgggaagggagcggtgactctccgggcctcgtcttcctacagggaaaccccaagcagtagccctgcgagccctcaggaaacccggcaacacgaaagcaaaccaggtctggagccagagccttcttcagcagatgagtggaggctttcttccagtgctgatgccaatggaaatgcccagccctcttcactcgctgccaagggctacagaagtgtgcatcccaaccttccttctgacaagtcccaggatgccacttcctccagtgcagcccagccggaggtaatagttgtccctctctacctggttaatactgacagagggcaagaaggcactgccagacctccaacacctctggggcctcttggctgcgtccccacaatcccagcgactgcctctgccgcctcacctctgaccttcccgactctagatgatttcattccccctcatctgcagaggtggccccaccacagccagccagcccgcgcctctggctcctttgcccccattagccagacgccaccatccttctcaccaccacctccgctggtccctcctgccccggaggacctccgcagagtctcggagcctgacctcacgggagctgtttcgagtaccgattccagtcctctactaaatgaagtttcttcttcccttattggaactgattcccaagcctttccatcagttagcaagccttcatccgcctatccctccacaacgattgtcaatcctactattgtgctcttgcaacacaatcgagaacagcaaaaacgactcagtagcctttcagatcctgtctcagaaagaagagtgggagagcaggactcagcaccaacccaggaaaaacccacctcacctggcaaggctattgaaaaaagagcaaaggatgacagtaggcgggtggtgaagagcactcaggacttaagcgatgtttccatggatgaagtgggcatcccactccggaacactgagagatcaaaagactggtacaagactatgtttaaacagatccacaaactgaacagagacactcctgaagaaaacccttatttccctacgtacaaattccctgaacttcctgaaatccagcaaacttccgaagagacaaagtcttgctctgtcatgtcacccaggctggagtgcagtggtacagtcatagctcactgcagcctcaaactcctagactcaagcaatcctcccacctcagcctcccaagtagctgggactgcagatgatgattcagatctgtactctcccagatactcattttctgaagacacaaaatctcccctttctgtgcctcgctcaaaaagtgagatgagctacattgatggtgagaaggtagtcaagaggtcggccacactacccctcccagcccgctcttcctcactgaagtcaagctcagaaagaaatgactgggaacccccagataagaaagtagacacaagaaaatatcgtgcagagcccaagagcatttacgaatatcagcctggcaagtcttccgttctgaccaacgaaaagatgagtcgggatataagcccagaagagatagatttaaagaatgaaccttggtataaattcttttcggaattggagtttgggaaaccgcctcccaaaaagatatgggattatactcctggagactgctctatccttcctagagaggatagaaagactaatctagacaaagatctcagcctctgccagacagagttagaggcagatttagaaaaaatggagacgcttaataaagcacccagtgcaaacgtgccacagagctcagccatcagccctactccggaaatttcttcagagactcctggatatatatattcttccaacttccatgcagtgaagagggaatcagacggggctcctggggatctcactagcttggagaatgagagacaaatttataaaagtgtcttggaaggtggtgacatccctcttcagggcctgagtgggctcaagcgaccatccagctctgcttccactaaagattcagaatcgccaagacattttataccagctgattacttggaatccacggaagaatttattcgaagacgtcatgatgataaagagaaacttttagcggaccagagacgacttaaacgcgagcaagaagaggctgatattgcagctcgacgccacacaggcgtcattccgacgcaccatcagtttatcactaatgagcgctttggggacctcctcaatatagacgatactgcaaaaaggaaatctgggtcagagatgagacctgccagagccaaatttgactttaaagctcagacactaaaggagcttcctctgcagaagggagatattgtttacatttataagcaaattgatcagaactggtatgaaggagaacaccacggccgggtgggaatcttcccacgcacctacatcgagcttcttcctcctgctgagaaggcacagcccaaaaagttgacaccagtgcaggttttggaatatggagaagctattgctaagtttaactttaatggtgatacacaagtagaaatgtccttcagaaagggtgagaggatcacactgctccggcaggtagatgagaactggtacgaagggaggatcccggggacatcccgacaaggcatcttccccatcacctacgtggatgtgatcaagcgaccactggtgaaaaaccctgtggattacatggacctgcctttctcctcctccccaagtcgcagtgccactgcaagcccacagccatggcgcgaagagagtggacaatatgagaggaaagcagagaggggggcaggcgaaagaggccctggtggacccaagatctctaagaagagctgcttgaagccttcagacgtggtcaggtgcctgagtactgaacagagactctcagatctcaacacccctgaggagagccggcccggcaagcccctgggtagcgcttttccaggaagtgaggctgagcagacagagcggcatagaggtggcgagcaggcggggaggaaagctgctcggagaggtgggagccagcaacctcaagcccagcagcgaagagtcacccccgacaggagtcaaacctcacaagatttatttagctatcaagcattatatagctatataccacagaatgatgatgagttggaactccgcgatggagatatcgttgatgtcatggaaaaatgtgacgatggatggtttgttggtacttcaagaaggacaaagcagtttggtacttttccaggcaactatgtaaaacctttgtatctataagaagactgaaaaccatggagattatttttattgg

SEQ ID NO: 184810 - DNA, 3015 bp, Homo sapiens
  Payload ID: 16399
  Gene Symbol: SORBS1
  Gene Name: sorbin and SH3 domain containing 1
  Uniprot ID: Q9BX66
  ENST ID: ENST00000354106
  CDS Start-End: 1-3015
atgagttctgaatgtgatggtggttccaaagctgtgatgaatggcttggcacctggcagcaatgggcaagacaaagcaactgccgaccctttacgcgcacgctctatttctgctgttaaaatcattcctgtgaagacagtgaaaaacgcctcaggcctagttctccctacagacatggatcttacaaaaatctgcactgggaagggagcggtgactctccgggcctcgtcttcctacagggaaaccccaagcagtagccctgcgagccctcaggaaacccggcaacacgaaagcaaaccagatgagtggaggctttcttccagtgctgatgccaatggaaatgcccagccctcttcactcgctgccaagggctacagaagtgtgcatcccaaccttccttctgacaagtcccaggatgccacttcctccagtgcagcccagccggaggtaatagttgtccctctctacctggttaatactgacagagggcaagaaggcactgccagacctccaacacctctggggcctcttggctgcgtccccacaatcccagcgactgcctctgccgcctcacctctgaccttcccgactctagatgatttcattccccctcatctgcagaggtggccccaccacagccagccagcccgcgcctctggctcctttgcccccattagccagacgccaccatccttctcaccaccacctccgctggtccctcctgccccggaggacctccgcagagtctcggagcctgacctcacgggagctgtttcgagtaccgattccagtcctctactaaatgaagtttcttcttcccttattggaactgattcccaagcctttccatcagttagcaagccttcatccgcctatccctccacaacgattgtcaatcctactattgtgctcttgcaacacaatcgagaacagcaaaaacgactcagtagcctttcagatcctgtctcagaaagaagagtgggagagcaggactcagcaccaacccaggaaaaacccacctcacctggcaaggctattgaaaaaagagcaaaggatgacagtaggcgggtggtgaagagcactcaggacttaagcgatgtttccatggatgaagtgggcatcccactccggaacactgagagatcaaaagactggtacaagactatgtttaaacagatccacaaactgaacagagacactcctgaagaaaacccttatttccctacgtacaaattccctgaacttcctgaaatccagcaaacttccgaagatgatgattcagatctgtactctcccagatactcattttctgaagacacaaaatctcccctttctgtgcctcgctcaaaaagtgagatgagctacattgatggtgagaaggtagtcaagaggtcggccacactacccctcccagcccgctcttcctcactgaagtcaagctcagaaagaaatgactgggaacccccagataagaaagtagacacaagaaaatatcgtgcagagcccaagagcatttacgaatatcagcctggcaagtcttccgttctgaccaacgaaaagatgagtcgggatataagcccagaagagatagatttaaagaatgaaccttggtataaattcttttcggaattggagtttgggaaaccgcctcccaaaaagatatgggattatactcctggagactgctctatccttcctagagaggatagaaagactaatctagacaaagatctcagcctctgccagacagagttagaggcagatttagaaaaaatggagacgcttaataaagcacccagtgcaaacgtgccacagagctcagccatcagccctactccggaaatttcttcagagactcctggatatatatattcttccaacttccatgcagtgaagagggaatcagacggggctcctggggatctcactagcttggagaatgagagacaaatttataaaagtgtcttggaaggtggtgacatccctcttcagggcctgagtgggctcaagcgaccatccagctctgcttccactaaagattcagaatcgccaagacattttataccagctgattacttggaatccacggaagaatttattcgaagacgtcatgatgataaagagaaacttttagcggaccagagacgacttaaacgcgagcaagaagaggctgatattgcagctcgacgccacacaggcgtcattccgacgcaccatcagtttatcactaatgagcgctttggggacctcctcaatatagacgatactgcaaaaaggaaatctgggtcagagatgagacctgccagagccaaatttgactttaaagctcagacactaaaggagcttcctctgcagaagggagatattgtttacatttataagcaaattgatcagaactggtatgaaggagaacaccacggccgggtgggaatcttcccacgcacctacatcgagcttcttcctcctgctgagaaggcacagcccaaaaagttgacaccagtgcaggttttggaatatggagaagctattgctaagtttaactttaatggtgatacacaagtagaaatgtccttcagaaagggtgagaggatcacactgctccggcaggtagatgagaactggtacgaagggaggatcccggggacatcccgacaaggcatcttccccatcacctacgtggatgtgatcaagcgaccactggtgaaaaaccctgtggattacatggacctgcctttctcctcctccccaagtcgcagtgccactgcaagcccacagcaacctcaagcccagcagcgaagagtcacccccgacaggagtcaaacctcacaagatttatttagctatcaagcattatatagctatataccacagaatgatgatgagttggaactccgcgatggagatatcgttgatgtcatggaaaaatgtgacgatggatggtttgttggtacttcaagaaggacaaagcagtttggtacttttccaggcaactatgtaaaacctttgtatctataa

SEQ ID NO: 184811 - DNA, 5858 bp, Homo sapiens
  Payload ID: 16399
  Gene Symbol: SORBS1
  Gene Name: sorbin and SH3 domain containing 1
  Uniprot ID: Q9BX66
  ENST ID: ENST00000306402
  CDS Start-End: 227-2572
agcgctgagtcccagaaaaacagagcggggccagctgcagcgtgtagtgcgagtggggcggacgcgcgcagcccgcccgcccggcgaccagcaaggagttggcatcctttggaagagttcgtgaaagctttctgcccagagctcctggaccaatgcatcttcccaccaccttaaaccactgagcagttcagagccccagttgcagacgacttgtcctgccaccaccatgagttctgaatgtgatggtggttccaaagctgtgatgaatggcttggcacctggcagcaatgggcaagacaaagcaactgccgaccctttacgcgcacgctctatttctgctgttaaaatcattcctgtgaagacagtgaaaaacgcctcaggcctagttctccctacagacatggatcttacaaaaatctgcactgggaagggagcggtgactctccgggcctcgtcttcctacagggaaaccccaagcagtagccctgcgagccctcaggaaacccggcaacacgaaagcaaaccaggtctggagccagagccttcttcagcagatgagtggaggctttcttccagtgctgatgccaatggaaatgcccagccctcttcactcgctgccaagggctacagaagtgtgcatcccaaccttccttctgacaagtcccaggattccagtcctctactaaatgaagtttcttcttcccttattggaactgattcccaagcctttccatcagttagcaagccttcatccgcctatccctccacaacgattgtcaatcctactattgtgctcttgcaacacaatcgagaacagcaaaaacgactcagtagcctttcagatcctgtctcagaaagaagagtgggagagcaggactcagcaccaacccaggaaaaacccacctcacctggcaaggctattgaaaaaagagcaaaggatgacagtaggcgggtggtgaagagcactcaggacttaagcgatgtttccatggatgaagtgggcatcccactccggaacactgagagatcaaaagactggtacaagactatgtttaaacagatccacaaactgaacagagatgatgattcagatctgtactctcccagatactcattttctgaagacacaaaatctcccctttctgtgcctcgctcaaaaagtgagatgagctacattgatggtgagaaggtagtcaagaggtcggccacactacccctcccagcccgctcttcctcactgaagtcaagctcagaaagaaatgactgggaacccccagataagaaagtagacacaagaaaatatcgtgcagagcccaagagcatttacgaatatcagcctggcaagtcttccgttctgaccaacgaaaagatgagctcagccatcagccctactccggaaatttcttcagagactcctggatatatatattcttccaacttccatgcagtgaagagggaatcagacggggctcctggggatctcactagcttggagaatgagagacaaatttataaaagtgtcttggaaggtggtgacatccctcttcagggcctgagtgggctcaagcgaccatccagctctgcttccactaaagattcagaatcgccaagacattttataccagctgattacttggaatccacggaagaatttattcgaagacgtcatgatgataaagagaaacttttagcggaccagagacgacttaaacgcgagcaagaagaggctgatattgcagctcgacgccacacaggcgtcattccgacgcaccatcagtttatcactaatgagcgctttggggacctcctcaatatagacgatactgcaaaaaggaaatctgggtcagagatgagacctgccagagccaaatttgactttaaagctcagacactaaaggagcttcctctgcagaagggagatattgtttacatttataagcaaattgatcagaactggtatgaaggagaacaccacggccgggtgggaatcttcccacgcacctacatcgagcttcttcctcctgctgagaaggcacagcccaaaaagttgacaccagtgcaggttttggaatatggagaagctattgctaagtttaactttaatggtgatacacaagtagaaatgtccttcagaaagggtgagaggatcacactgctccggcaggtagatgagaactggtacgaagggaggatcccggggacatcccgacaaggcatcttccccatcacctacgtggatgtgatcaagcgaccactggtgaaaaaccctgtggattacatggacctgcctttctcctcctccccaagtcgcagtgccactgcaagcccacagcaacctcaagcccagcagcgaagagtcacccccgacaggagtcaaacctcacaagatttatttagctatcaagcattatatagctatataccacagaatgatgatgagttggaactccgcgatggagatatcgttgatgtcatggaaaaatgtgacgatggatggtttgttggtacttcaagaaggacaaagcagtttggtacttttccaggcaactatgtaaaacctttgtatctataagaagactgaaaaccatggagattatttttattggaggaggaagcatcattcatgaaccgatctttttagttgagtcagtaggaaaattaatacagtggataaagtaagaagcaaaagacagggacagagaagtgttgtgtttaaaacccaagcctgtctaaggttactgtgtattagacagggccgaactagtgtgctgagcaaaaagaattgaagcaaattgtatttacttagccgcttctgggagccacttcagcctttcccctcccctccacttcttgggtaatctgacctgaagcatagtccaggagcagagttagccagaaatgcctcctgctgccccagccttagagagctcccatctcaatcattgagcctgaaggcttcaagcccaagaatgcaacaagacccccagcctacatttctcagctcccctggagccagctgatcctgtaacgctgctggaggtcagtctgagctaccaagactgtccctagacaaaggtggagtcccccacactgcccaagaccaaatccctcactcaacctgctgaggtgtggatggggaaacagaggcaaaactgaggcacctgatgcattcagcctgctgtgcagcagtgccattgactgccctgatgttcagagagaaacgcacacaaggtttgcccatgagaattggggagcagatggccaagcagataggttatgtctgttttctgagtgatgaagtcaggaagccctgtggctctggaggccacttgtggttcattcttttcccatatccttggcttttagaaatggttaccttcaggacagtgcagctgcatttatcagagcactattgctaagttttcttttctggcttgtgtttttctgggacagtttagaattgggaggcctattctcatagaacaccaaaaatgatgttcagtgattcatttaacatacaccaatgtactctggctgctggggggacaaccataagcaagacatgcccagggtttgccgtggctccagatctactccctgtaggagttcaaggatcacacaaacggtagtaaccagggttgtgaatctgagtacaccctggcaaggcttctcttcagactgaagcagcaattctgccactaccagcagcaaccaggacgtctgttctttgtgggggccagatcagaagagagaggcccctgtgacgcccgggctgcttggtcacaactctgtccaattcaaggatgtttatcggcctctcttagatcctgagtgagacaaatacagaaatgacccattccctgcccaccagaaactcagaggtgattggggagactgacacaggaaaatgaacttaatcaagagagactgtgatatgtgctaagaagggtgtgagggagggagagatgaattttccctggagggatcctagaaagcattgtcatattgccatctccattagctcacttttaaacaactagggtgctggaagaacctttgtctgagggtagttcatagctggaaatacttggaatattttccagagtctctaaactctcatcttcccccacagatacacatccaagctcacaaataggagtagcaattctaggtggtagggttgtgtacggaacccctggctgtctgcatatatctcagaattaccccaggaccattgtcccaaagtctagagtctttacaggtaggcaaaatttgttttcaatgcctgtgcctcagctgctgtcacaaatacccatcttaggatcccatcagcttcccatcccccaccagacagccacagtaccctcactttctccctattgttctttcaaatcctgttctcaggaaagaaactgccactaattcattcacactaaggtgtaaatgattgataataggaatgagttacctcttcccacagacatttgtttttaagtatgacagagcagggccttaatcccaagggaaaaggttatggaactggagggggtgagctttctgggtagaaggagacttcctgaatttccttaaaacccagtaagagtaagacctgttgttttggaaggtctgctccaccatctaagagcactgtttttttttttttgttgttgttgttgttttacggtctctgagggaatatagtaaaaatgcatatgcacgtgcaatttgcacggcagcatttcaccgattgtggactgtattggctaatgtgtttcctggtctttagatgcaaaccattaataacactatcttatctcatagttttttcaggggtgcttcttgattagtagggaattttgaacacctctttaaatacagctagaaaataaaaccaatttgtaaagccacatttgcatatgatgccagcctcacgcatttgtatatctccagaaattcaggtatgcctcaccaatttgcccgtctttaataaaatcttgtgttaaaatttgcatcacgtcgccttcctatgtatgacgaaacaagaaacagagatttccaattgctcttttgtcttcagacatttagtaatataaagtacctatttttatgctgaaatgtttatacaggtttattaatagcaagtgcaactaactggcggcatgccttgcaacacattttgatatattagccatgcttccgggtaaaggcaagccccaaactccttatcttttgcagtctctctgggatcagtaaaagaaaaaaaaaataatgtgcttaagaagtgggactgtaaatatgtatatttaactttgtatagcccatgtacctaccttgtatagaaaaataattttaaaaatttgaatggaagggggtaaaggaagtcatgaagtttttttgcatttttatttaaatgaaggaattccaaataactcacctacagatttttagcacaaaaatagccattgtaaagtgttaaaatttacgataagtattctattggggaggaaaggtaactctgatctcagttacagtttttttttcctttttaatttcattattttgggtttttggtttttgcagtcctatttatctgcagtcgtattaagtcctattgctagaataggttactacaaaaaaggttatattctgaaagaaaaataactgacattatatataaccaattaatttaaagtattgccatttaaattacacactgagagcatgtcctatgcagacatagatttttctgttcatttatttttcttcattgcagtggattgatttgataaatagatgtgttgaattactacatttgctgtacatattatttaataaactttattcagaattgcgtggca

SEQ ID NO: 184812 - DNA, 3940 bp, Homo sapiens
  Payload ID: 16399
  Gene Symbol: SORBS1
  Gene Name: sorbin and SH3 domain containing 1
  Uniprot ID: Q9BX66
  ENST ID: ENST00000361941
  CDS Start-End: 28-3906
ttgcagacgacttgtcctgccaccaccatgagttctgaatgtgatggtggttccaaagctgtgatgaatggcttggcacctggcagcaatgggcaagacaaagcaactgccgaccctttacgcgcacgctctatttctgctgttaaaatcattcctgtgaagacagtgaaaaacgcctcaggcctagttctccctacagacatggatcttacaaaaatctgcactgggaagggagcggtgactctccgggcctcgtcttcctacagggaaaccccaagcagtagccctgcgagccctcaggaaacccggcaacacgaaagcaaaccaggtctggagccagagccttcttcagcagatgagtggaggctttcttccagtgctgatgccaatggaaatgcccagccctcttcactcgctgccaagggctacagaagtgtgcatcccaaccttccttctgacaagtcccaggatgccacttcctccagtgcagcccagccggaggtaatagttgtccctctctacctggttaatactgacagagggcaagaaggcactgccagacctccaacacctctggggcctcttggctgcgtccccacaatcccagcgactgcctctgccgcctcacctctgaccttcccgactctagatgatttcattccccctcatctgcagaggtggccccaccacagccagccagcccgcgcctctggctcctttgcccccattagccagacgccaccatccttctcaccaccacctccgctggtccctcctgccccggaggacctccgcagagtctcggagcctgacctcacgggagctgtttcgagtaccgattccagtcctctactaaatgaagtttcttcttcccttattggaactgattcccaagcctttccatcagttagcaagccttcatccgcctatccctccacaacgattgtcaatcctactattgtgctcttgcaacacaatcgagaacagcaaaaacgactcagtagcctttcagatcctgtctcagaaagaagagtgggagagcaggactcagcaccaacccaggaaaaacccacctcacctggcaaggctattgaaaaaagagcaaaggatgacagtaggcgggtggtgaagagcactcaggacttaagcgatgtttccatggatgaagtgggcatcccactccggaacactgagagatcaaaagactggtacaagactatgtttaaacagatccacaaactgaacagagacactcctgaagaaaacccttatttccctacgtacaaattccctgaacttcctgaaatccagcaaacttccgaagaggacaatccttacactcccacctaccagtttcctgcatctactcctagtcctaaatctgaagatgatgattcagatctgtactctcccagatactcattttctgaagacacaaaatctcccctttctgtgcctcgctcaaaaagtgagatgagctacattgatggtgagaaggtagtcaagaggtcggccacactacccctcccagcccgctcttcctcactgaagtcaagctcagaaagaaatgactgggaacccccagataagaaagtagacacaagaaaatatcgtgcagagcccaagagcatttacgaatatcagcctggcaagtcttccgttctgaccaacgaaaagatgagtcgggatataagcccagaagagatagatttaaagaatgaaccttggtataaattcttttcggaattggagtttgggaaaccgcctcccaaaaagatatgggattatactcctggagactgctctatccttcctagagaggatagaaagactaatctagacaaagatctcagcctctgccagacagagttagaggcagatttagaaaaaatggagacgcttaataaagcacccagtgcaaacgtgccacagagctcagccatcagccctactccggaaatttcttcagagactcctggatatatatattcttccaacttccatgcagtgaagagggaatcagacggggctcctggggatctcactagcttggagaatgagagacaaatttataaaagtgtcttggaaggtggtgacatccctcttcagggcctgagtgggctcaagcgaccatccagctctgcttccactaaagattcagaatcgccaagacattttataccagctgattacttggaatccacggaagaatttattcgaagacgtcatgatgataaagagaaacttttagcggaccagagacgacttaaacgcgagcaagaagaggctgatattgcagctcgacgccacacaggcgtcattccgacgcaccatcagtttatcactaatgagcgctttggggacctcctcaatatagacgatactgcaaaaaggaaatctgggtcagagatgagacctgccagagccaaatttgactttaaagctcagacactaaaggagcttcctctgcagaagggagatattgtttacatttataagcaaattgatcagaactggtatgaaggagaacaccacggccgggtgggaatcttcccacgcacctacatcgagcttcttcctcctgctgagaaggcacagcccaaaaagttgacaccagtgcaggttttggaatatggagaagctattgctaagtttaactttaatggtgatacacaagtagaaatgtccttcagaaagggtgagaggatcacactgctccggcaggtagatgagaactggtacgaagggaggatcccggggacatcccgacaaggcatcttccccatcacctacgtggatgtgatcaagcgaccactggtgaaaaaccctgtggattacatggacctgcctttctcctcctccccaagtcgcagtgccactgcaagcccacagttttccagtcacagcaagctcatcacgccagccccctcatctctgccccactcccgccgagccctgtcccccgagatgcacgctgtcacctctgagtggatctcactgactgtgggggtcccaggcaggcgttctctggccctgaccccacccttgcctcctctgccagaggcttctatctataacactgaccacctcgccttgtcaccaagggccagtccctccctgtctctcagcctcccccatttgagttggtcagatcgtcccaccccacgatcagtagcttctccactggccctaccttccccacacaaaacctactccctagcacctacttcccaggcctcccttcacatgaatggagacggtggtgtccacacgccatcttcaggcatccaccaagatagcttcttgcagctgccgctggggagctctgatagtgtcatctcccagcttagtgatgcctttagcagccagagcaagaggcagccatggcgcgaagagagtggacaatatgagaggaaagcagagaggggggcaggcgaaagaggccctggtggacccaagatctctaagaagagctgcttgaagccttcagacgtggtcaggtgcctgagtactgaacagagactctcagatctcaacacccctgaggagagccggcccggcaagcccctgggtagcgcttttccaggaagtgaggctgagcagacagagcggcatagaggtggcgagcaggcggggaggaaagctgctcggagaggtgggagccagcaacctcaagcccagcagcgaagagtcacccccgacaggagtcaaacctcacaagatttatttagctatcaagcattatatagctatataccacagaatgatgatgagttggaactccgcgatggagatatcgttgatgtcatggaaaaatgtgacgatggatggtttgttggtacttcaagaaggacaaagcagtttggtacttttccaggcaactatgtaaaacctttgtatctataagaagactgaaaaccatggagattatttttattgg

SEQ ID NO: 184813 - DNA, 7279 bp, Homo sapiens
  Payload ID: 16399
  Gene Symbol: SORBS1
  Gene Name: sorbin and SH3 domain containing 1
  Uniprot ID: Q9BX66
  ENST ID: ENST00000371227
  CDS Start-End: 191-3991
gcagcgtgtagtgcgagtggggcggacgcgcgcagcccgcccgcccggcgaccagcaaggagttggcatcctttggaagagttcgtgaaagctttctgcccagagctcctggaccaatgcatcttcccaccaccttaaaccactgagcagttcagagccccagttgcagacgacttgtcctgccaccaccatgagttctgaatgtgatggtggttccaaagctgtgatgaatggcttggcacctggcagcaatgggcaagacaaagcaactgccgaccctttacgcgcacgctctatttctgctgttaaaatcattcctgtgaagacagtgaaaaacgcctcaggcctagttctccctacagacatggatcttacaaaaatctgcactgggaagggagcggtgactctccgggcctcgtcttcctacagggaaaccccaagcagtagccctgcgagccctcaggaaacccggcaacacgaaagcaaaccaggtctggagccagagccttcttcagcagatgagtggaggctttcttccagtgctgatgccaatggaaatgcccagccctcttcactcgctgccaagggctacagaagtgtgcatcccaaccttccttctgacaagtcccaggatgccacttcctccagtgcagcccagccggaggtaatagttgtccctctctacctggttaatactgacagagggcaagaaggcactgccagacctccaacacctctggggcctcttggctgcgtccccacaatcccagcgactgcctctgccgcctcacctctgaccttcccgactctagatgatttcattccccctcatctgcagaggtggccccaccacagccagccagcccgcgcctctggctcctttgcccccattagccagacgccaccatccttctcaccaccacctccgctggtccctcctgccccggaggacctccgcagagtctcggagcctgacctcacgggagctgtttcgagtaccgattccagtcctctactaaatgaagtttcttcttcccttattggaactgattcccaagcctttccatcagttagcaagccttcatccgcctatccctccacaacgattgtcaatcctactattgtgctcttgcaacacaatcgagaacagcaaaaacgactcagtagcctttcagatcctgtctcagaaagaagagtgggagagcaggactcagcaccaacccaggaaaaacccacctcacctggcaaggctattgaaaaaagagcaaaggatgacagtaggcgggtggtgaagagcactcaggacttaagcgatgtttccatggatgaagtgggcatcccactccggaacactgagagatcaaaagactggtacaagactatgtttaaacagatccacaaactgaacagagatgatgattcagatctgtactctcccagatactcattttctgaagacacaaaatctcccctttctgtgcctcgctcaaaaagtgagatgagctacattgatggtgagaaggtagtcaagaggtcggccacactacccctcccagcccgctcttcctcactgaagtcaagctcagaaagaaatgactgggaacccccagataagaaagtagacacaagaaaatatcgtgcagagcccaagagcatttacgaatatcagcctggcaagtcttccgttctgaccaacgaaaagatgagtcgggatataagcccagaagagatagatttaaagaatgaaccttggtataaattcttttcggaattggagtttgggaaaccgcctcccaaaaagatatgggattatactcctggagactgctctatccttcctagagaggatagaaagactaatctagacaaagatctcagcctctgccagacagagttagaggcagatttagaaaaaatggagacgcttaataaagcacccagtgcaaacgtgccacagagctcagccatcagccctactccggaaatttcttcagagactcctggatatatatattcttccaacttccatgcagtgaagagggaatcagacggggctcctggggatctcactagcttggagaatgagagacaaatttataaaagtgtcttggaaggtggtgacatccctcttcagggcctgagtgggctcaagcgaccatccagctctgcttccactaaagattcagaatcgccaagacattttataccagctgattacttggaatccacggaagaatttattcgaagacgtcatgatgataaagagaaacttttagcggaccagagacgacttaaacgcgagcaagaagaggctgatattgcagctcgacgccacacaggcgtcattccgacgcaccatcagtttatcactaatgagcgctttggggacctcctcaatatagacgatactgcaaaaaggaaatctgggtcagagatgagacctgccagagccaaatttgactttaaagctcagacactaaaggagcttcctctgcagaagggagatattgtttacatttataagcaaattgatcagaactggtatgaaggagaacaccacggccgggtgggaatcttcccacgcacctacatcgagcttcttcctcctgctgagaaggcacagcccaaaaagttgacaccagtgcaggttttggaatatggagaagctattgctaagtttaactttaatggtgatacacaagtagaaatgtccttcagaaagggtgagaggatcacactgctccggcaggtagatgagaactggtacgaagggaggatcccggggacatcccgacaaggcatcttccccatcacctacgtggatgtgatcaagcgaccactggtgaaaaaccctgtggattacatggacctgcctttctcctcctccccaagtcgcagtgccactgcaagcccacagttttccagtcacagcaagctcatcacgccagccccctcatctctgccccactcccgccgagccctgtcccccgagatgcacgctgtcacctctgagtggatctcactgactgtgggggtcccaggcaggcgttctctggccctgaccccacccttgcctcctctgccagaggcttctatctataacactgaccacctcgccttgtcaccaagggccagtccctccctgtctctcagcctcccccatttgagttggtcagatcgtcccaccccacgatcagtagcttctccactggccctaccttccccacacaaaacctactccctagcacctacttcccaggcctcccttcacatgaatggagacggtggtgtccacacgccatcttcaggcatccaccaagatagcttcttgcagctgccgctggggagctctgatagtgtcatctcccagcttagtgatgcctttagcagccagagcaagaggcagccatggcgcgaagagagtggacaatatgagaggaaagcagagaggggggcaggcgaaagaggccctggtggacccaagatctctaagaagagctgcttgaagccttcagacgtggtcaggtgcctgagtactgaacagagactctcagatctcaacacccctgaggagagccggcccggcaagcccctgggtagcgcttttccaggaagtgaggctgagcagacagagcggcatagaggtggcgagcaggcggggaggaaagctgctcggagaggtgggagccagctttctcatcattcattgagagcaggaccagatctcacagaatctgaaaagagctatgtgcaacctcaagcccagcagcgaagagtcacccccgacaggagtcaaacctcacaagatttatttagctatcaagcattatatagctatataccacagaatgatgatgagttggaactccgcgatggagatatcgttgatgtcatggaaaaatgtgacgatggatggtttgttggtacttcaagaaggacaaagcagtttggtacttttccaggcaactatgtaaaacctttgtatctataagaagactgaaaaccatggagattatttttattggaggaggaagcatcattcatgaaccgatctttttagttgagtcagtaggaaaattaatacagtggataaagtaagaagcaaaagacagggacagagaagtgttgtgtttaaaacccaagcctgtctaaggttactgtgtattagacagggccgaactagtgtgctgagcaaaaagaattgaagcaaattgtatttacttagccgcttctgggagccacttcagcctttcccctcccctccacttcttgggtaatctgacctgaagcatagtccaggagcagagttagccagaaatgcctcctgctgccccagccttagagagctcccatctcaatcattgagcctgaaggcttcaagcccaagaatgcaacaagacccccagcctacatttctcagctcccctggagccagctgatcctgtaacgctgctggaggtcagtctgagctaccaagactgtccctagacaaaggtggagtcccccacactgcccaagaccaaatccctcactcaacctgctgaggtgtggatggggaaacagaggcaaaactgaggcacctgatgcattcagcctgctgtgcagcagtgccattgactgccctgatgttcagagagaaacgcacacaaggtttgcccatgagaattggggagcagatggccaagcagataggttatgtctgttttctgagtgatgaagtcaggaagccctgtggctctggaggccacttgtggttcattcttttcccatatccttggcttttagaaatggttaccttcaggacagtgcagctgcatttatcagagcactattgctaagttttcttttctggcttgtgtttttctgggacagtttagaattgggaggcctattctcatagaacaccaaaaatgatgttcagtgattcatttaacatacaccaatgtactctggctgctggggggacaaccataagcaagacatgcccagggtttgccgtggctccagatctactccctgtaggagttcaaggatcacacaaacggtagtaaccagggttgtgaatctgagtacaccctggcaaggcttctcttcagactgaagcagcaattctgccactaccagcagcaaccaggacgtctgttctttgtgggggccagatcagaagagagaggcccctgtgacgcccgggctgcttggtcacaactctgtccaattcaaggatgtttatcggcctctcttagatcctgagtgagacaaatacagaaatgacccattccctgcccaccagaaactcagaggtgattggggagactgacacaggaaaatgaacttaatcaagagagactgtgatatgtgctaagaagggtgtgagggagggagagatgaattttccctggagggatcctagaaagcattgtcatattgccatctccattagctcacttttaaacaactagggtgctggaagaacctttgtctgagggtagttcatagctggaaatacttggaatattttccagagtctctaaactctcatcttcccccacagatacacatccaagctcacaaataggagtagcaattctaggtggtagggttgtgtacggaacccctggctgtctgcatatatctcagaattaccccaggaccattgtcccaaagtctagagtctttacaggtaggcaaaatttgttttcaatgcctgtgcctcagctgctgtcacaaatacccatcttaggatcccatcagcttcccatcccccaccagacagccacagtaccctcactttctccctattgttctttcaaatcctgttctcaggaaagaaactgccactaattcattcacactaaggtgtaaatgattgataataggaatgagttacctcttcccacagacatttgtttttaagtatgacagagcagggccttaatcccaagggaaaaggttatggaactggagggggtgagctttctgggtagaaggagacttcctgaatttccttaaaacccagtaagagtaagacctgttgttttggaaggtctgctccaccatctaagagcactgtttttttttttttgttgttgttgttgttttacggtctctgagggaatatagtaaaaatgcatatgcacgtgcaatttgcacggcagcatttcaccgattgtggactgtattggctaatgtgtttcctggtctttagatgcaaaccattaataacactatcttatctcatagttttttcaggggtgcttcttgattagtagggaattttgaacacctctttaaatacagctagaaaataaaaccaatttgtaaagccacatttgcatatgatgccagcctcacgcatttgtatatctccagaaattcaggtatgcctcaccaatttgcccgtctttaataaaatcttgtgttaaaatttgcatcacgtcgccttcctatgtatgacgaaacaagaaacagagatttccaattgctcttttgtcttcagacatttagtaatataaagtacctatttttatgctgaaatgtttatacaggtttattaatagcaagtgcaactaactggcggcatgccttgcaacacattttgatatattagccatgcttccgggtaaaggcaagccccaaactccttatcttttgcagtctctctgggatcagtaaaagaaaaaaaaaataatgtgcttaagaagtgggactgtaaatatgtatatttaactttgtatagcccatgtacctaccttgtatagaaaaataattttaaaaatttgaatggaagggggtaaaggaagtcatgaagtttttttgcatttttatttaaatgaaggaattccaaataactcacctacagatttttagcacaaaaatagccattgtaaagtgttaaaatttacgataagtattctattggggaggaaaggtaactctgatctcagttacagtttttttttcctttttaatttcattattttgggtttttggtttttgcagtcctatttatctgcagtcgtattaagtcctattgctagaataggttactacaaaaaaggttatattctgaaagaaaaataactgacattatatataaccaattaatttaaagtattgccatttaaattacacactgagagcatgtcctatgcagacatagatttttctgttcatttatttttcttcattgcagtggattgatttgataaatagatgtgttgaattactacatttgctgtacatattatttaataaactttattcagaattgcgtggcata

SEQ ID NO: 184814 - DNA, 558 bp, Homo sapiens
  Payload ID: 16399
  Gene Symbol: SORBS1
  Gene Name: sorbin and SH3 domain containing 1
  ENST ID: ENST00000371228
  CDS Start-End: 1-558
agcagacctctagacagcctgagtggcgcctggatgccagaggggacaagagcaccctcctcaggaacatctacctaatgagcccccttcctttccggctgaaaaagcccctccaccaccaccccagacaaccttcccctggtgactcctcaggcctcctggtgggccagaagccagacctccccagtcagccccatcaggaccagcccccttctggggggaagcccgtggttcccacacgcctgtcttcccgacacaccatggccaggcttagccgcagctcagagccctctcaggagagacccacggccctggaggactacccaagggccattaataatggaaactccgtgccatactcagaccacagcctggacaggaacaacaacccacaaagtgaactggcaccatcccgtggagattcagaatcgccaagacattttataccagctgattacttggaatccacggaagaatttattcgaagacgtcatgatgataaagagatgagacctgccagagccaaatttgactttaaagctcagacactaaaggagc

SEQ ID NO: 184815 - DNA, 2436 bp, Homo sapiens
  Payload ID: 16399
  Gene Symbol: SORBS1
  Gene Name: sorbin and SH3 domain containing 1
  Uniprot ID: Q9BX66
  ENST ID: ENST00000371239
  CDS Start-End: 1-2436
atgagttctgaatgtgatggtggttccaaagctgtgatgaatggcttggcacctggcagcaatgggcaagacaaagacatggatcttacaaaaatctgcactgggaagggagcggtgactctccgggcctcgtcttcctacagggaaaccccaagcagtagccctgcgagccctcaggaaacccggcaacacgaaagcaaaccaggtctggagccagagccttcttcagcagatgagtggaggctttcttccagtgctgatgccaatggaaatgcccagccctcttcactcgctgccaagggctacagaagtgtgcatcccaaccttccttctgacaagtcccaggattccagtcctctactaaatgaagtttcttcttcccttattggaactgattcccaagcctttccatcagttagcaagccttcatccgcctatccctccacaacgattgtcaatcctactattgtgctcttgcaacacaatcgagaacagcaaaaacgactcagtagcctttcagatcctgtctcagaaagaagagtgggagagcaggactcagcaccaacccaggaaaaacccacctcacctggcaaggctattgaaaaaagagcaaaggatgacagtaggcgggtggtgaagagcactcaggacttaagcgatgtttccatggatgaagtgggcatcccactccggaacactgagagatcaaaagactggtacaagactatgtttaaacagatccacaaactgaacagagatgatgattcagatctgtactctcccagatactcattttctgaagacacaaaatctcccctttctgtgcctcgctcaaaaagtgagatgagctacattgatggtgagaaggtagtcaagaggtcggccacactacccctcccagcccgctcttcctcactgaagtcaagctcagaaagaaatgactgggaacccccagataagaaagtagacacaagaaaatatcgtgcagagcccaagagcatttacgaatatcagcctggcaagtcttccgttctgaccaacgaaaagatgagtcgggatataagcccagaagagatagatttaaagaatgaaccttggtataaattcttttcggaattggagtttgggaaaccgactaatctagacaaagatctcagcctctgccagacagagttagaggcagatttagaaaaaatggagacgcttaataaagcacccagtgcaaacgtgccacagagctcagccatcagccctactccggaaatttcttcagagactcctggatatatatattcttccaacttccatgcagtgaagagggaatcagacggggctcctggggatctcactagcttggagaatgagagacaaatttataaaagtgtcttggaaggtggtgacatccctcttcagggcctgagtgggctcaagcgaccatccagctctgcttccactaaagattcagaatcgccaagacattttataccagctgattacttggaatccacggaagaatttattcgaagacgtcatgatgataaagagaaacttttagcggaccagagacgacttaaacgcgagcaagaagaggctgatattgcagctcgacgccacacaggcgtcattccgacgcaccatcagtttatcactaatgagcgctttggggacctcctcaatatagacgatactgcaaaaaggaaatctgggtcagagatgagacctgccagagccaaatttgactttaaagctcagacactaaaggagcttcctctgcagaagggagatattgtttacatttataagcaaattgatcagaactggtatgaaggagaacaccacggccgggtgggaatcttcccacgcacctacatcgagcttcttcctcctgctgagaaggcacagcccaaaaagttgacaccagtgcaggttttggaatatggagaagctattgctaagtttaactttaatggtgatacacaagtagaaatgtccttcagaaagggtgagaggatcacactgctccggcaggtagatgagaactggtacgaagggaggatcccggggacatcccgacaaggcatcttccccatcacctacgtggatgtgatcaagcgaccactggtgaaaaaccctgtggattacatggacctgcctttctcctcctccccaagtcgcagtgccactgcaagcccacagcaacctcaagcccagcagcgaagagtcacccccgacaggagtcaaacctcacaagatttatttagctatcaagcattatatagctatataccacagaatgatgatgagttggaactccgcgatggagatatcgttgatgtcatggaaaaatgtgacgatggatggtttgttggtacttcaagaaggacaaagcagtttggtacttttccaggcaactatgtaaaacctttgtatctataa

SEQ ID NO: 184816 - DNA, 2055 bp, Homo sapiens
  Payload ID: 16399
  Gene Symbol: SORBS1
  Gene Name: sorbin and SH3 domain containing 1
  Uniprot ID: Q9BX66
  ENST ID: ENST00000371241
  CDS Start-End: 1-2055
atgagttctgaatgtgatggtggttccaaagctgtgatgaatggcttggcacctggcagcaatgggcaagacaaagacatggatcttacaaaaatctgcactgggaagggagcggtgactctccgggcctcgtcttcctacagggaaaccccaagcagtagccctgcgagccctcaggaaacccggcaacacgaaagcaaaccagatgagtggaggctttcttccagtgctgatgccaatggaaatgcccagccctcttcactcgctgccaagggctacagaagtgtgcatcccaaccttccttctgacaagtcccaggattccagtcctctactaaatgaagtttcttcttcccttattggaactgattcccaagcctttccatcagttagcaagccttcatccgcctatccctccacaacgattgtcaatcctactattgtgctcttgcaacacaatcgagaacagcaaaaacgactcagtagcctttcagatcctgtctcagaaagaagagtgggagagcaggactcagcaccaacccaggaaaaacccacctcacctggcaaggctattgaaaaaagagcaaaggatgacagtaggcgggtggtgaagagcactcaggacttaagcgatgtttccatggatgaagtgggcatcccactccggaacactgagagatcaaaagactggtacaagactatgtttaaacagatccacaaactgaacagagatgatgattcagatctgtactctcccagatactcattttctgaagacacaaaatctcccctttctgtgcctcgctcaaaaagtgagatgagctacattgatggtgagaaggtagtcaagaggtcggccacactacccctcccagcccgctcttcctcactgaagtcaagctcagaaagaaatgactgggaacccccagataagaaagtagacacaagaaaatatcgtgcagagcccaagagcatttacgaatatcagcctggcaagtcttccgttctgaccaacgaaaagatgagctcagccatcagccctactccggaaatttcttcagagactcctggatatatatattcttccaacttccatgcagtgaagagggaatcagacggggctcctggggatctcactagcttggagaatgagagacaaatttataaaagtgtcttggaaggtggtgacatccctcttcagggcctgagtgggctcaagcgaccatccagctctgcttccactaaagattcagaatcgccaagacattttataccagctgattacttggaatccacggaagaatttattcgaagacgtcatgatgataaagagatgagacctgccagagccaaatttgactttaaagctcagacactaaaggagcttcctctgcagaagggagatattgtttacatttataagcaaattgatcagaactggtatgaaggagaacaccacggccgggtgggaatcttcccacgcacctacatcgagcttcttcctcctgctgagaaggcacagcccaaaaagttgacaccagtgcaggttttggaatatggagaagctattgctaagtttaactttaatggtgatacacaagtagaaatgtccttcagaaagggtgagaggatcacactgctccggcaggtagatgagaactggtacgaagggaggatcccggggacatcccgacaaggcatcttccccatcacctacgtggatgtgatcaagcgaccactggtgaaaaaccctgtggattacatggacctgcctttctcctcctccccaagtcgcagtgccactgcaagcccacagcaacctcaagcccagcagcgaagagtcacccccgacaggagtcaaacctcacaagatttatttagctatcaagcattatatagctatataccacagaatgatgatgagttggaactccgcgatggagatatcgttgatgtcatggaaaaatgtgacgatggatggtttgttggtacttcaagaaggacaaagcagtttggtacttttccaggcaactatgtaaaacctttgtatctataa

SEQ ID NO: 184817 - DNA, 2779 bp, Homo sapiens
  Payload ID: 16399
  Gene Symbol: SORBS1
  Gene Name: sorbin and SH3 domain containing 1
  Uniprot ID: Q9BX66
  ENST ID: ENST00000371245
  CDS Start-End: 28-2745
ttgcagacgacttgtcctgccaccaccatgagttctgaatgtgatggtggttccaaagctgtgatgaatggcttggcacctggcagcaatgggcaagacaaagcaactgccgaccctttacgcgcacgctctatttctgctgttaaaatcattcctgtgaagacagtgaaaaacgcctcaggcctagttctccctacagacatggatcttacaaaaatctgcactgggaagggagcggtgactctccgggcctcgtcttcctacagggaaaccccaagcagtagccctgcgagccctcaggaaacccggcaacacgaaagcaaaccaggtctggagccagagccttcttcagcagatgagtggaggctttcttccagtgctgatgccaatggaaatgcccagccctcttcactcgctgccaagggctacagaagtgtgcatcccaaccttccttctgacaagtcccagaggtggccccaccacagccagccagcccgcgcctctggctcctttgcccccattagccagacgccaccatccttctcaccaccacctccgctggtccctcctgccccggaggacctccgcagagtctcggagcctgacctcacgggagctgtttcgagtaccgattccagtcctctactaaatgaagtttcttcttcccttattggaactgattcccaagcctttccatcagttagcaagccttcatccgcctatccctccacaacgattgtcaatcctactattgtgctcttgcaacacaatcgagaacagcaaaaacgactcagtagcctttcagatcctgtctcagaaagaagagtgggagagcaggactcagcaccaacccaggaaaaacccacctcacctggcaaggctattgaaaaaagagcaaaggatgacagtaggcgggtggtgaagagcactcaggacttaagcgatgtttccatggatgaagtgggcatcccactccggaacactgagagatcaaaagactggtacaagactatgtttaaacagatccacaaactgaacagagatgatgattcagatctgtactctcccagatactcattttctgaagacacaaaatctcccctttctgtgcctcgctcaaaaagtgagatgagctacattgatggtgagaaggtagtcaagaggtcggccacactacccctcccagcccgctcttcctcactgaagtcaagctcagaaagaaatgactgggaacccccagataagaaagtagacacaagaaaatatcgtgcagagcccaagagcatttacgaatatcagcctggcaagtcttccgttctgaccaacgaaaagatgagtcgggatataagcccagaagagatagatttaaagaatgaaccttggtataaattcttttcggaattggagtttgggaaaccgcctcccaaaaagatatgggattatactcctggagactgctctatccttcctagagaggatagaaagagctcagccatcagccctactccggaaatttcttcagagactcctggatatatatattcttccaacttccatgcagtgaagagggaatcagacggggctcctggggatctcactagcttggagaatgagagacaaatttataaaagtgtcttggaaggtggtgacatccctcttcagggcctgagtgggctcaagcgaccatccagctctgcttccactaaagattcagaatcgccaagacattttataccagctgattacttggaatccacggaagaatttattcgaagacgtcatgatgataaagagaaacttttagcggaccagagacgacttaaacgcgagcaagaagaggctgatattgcagctcgacgccacacaggcgtcattccgacgcaccatcagtttatcactaatgagcgctttggggacctcctcaatatagacgatactgcaaaaaggaaatctgggtcagagatgagacctgccagagccaaatttgactttaaagctcagacactaaaggagcttcctctgcagaagggagatattgtttacatttataagcaaattgatcagaactggtatgaaggagaacaccacggccgggtgggaatcttcccacgcacctacatcgagcttcttcctcctgctgagaaggcacagcccaaaaagttgacaccagtgcaggttttggaatatggagaagctattgctaagtttaactttaatggtgatacacaagtagaaatgtccttcagaaagggtgagaggatcacactgctccggcaggtagatgagaactggtacgaagggaggatcccggggacatcccgacaaggcatcttccccatcacctacgtggatgtgatcaagcgaccactggtgaaaaaccctgtggattacatggacctgcctttctcctcctccccaagtcgcagtgccactgcaagcccacagctttctcatcattcattgagagcaggaccagatctcacagaatctgaaaagagctatgtgcaacctcaagcccagcagcgaagagtcacccccgacaggagtcaaacctcacaagatttatttagctatcaagcattatatagctatataccacagaatgatgatgagttggaactccgcgatggagatatcgttgatgtcatggaaaaatgtgacgatggatggtttgttggtacttcaagaaggacaaagcagtttggtacttttccaggcaactatgtaaaacctttgtatctataagaagactgaaaaccatggagattatttttattgg

SEQ ID NO: 184818 - DNA, 6931 bp, Homo sapiens
  Payload ID: 16399
  Gene Symbol: SORBS1
  Gene Name: sorbin and SH3 domain containing 1
  Uniprot ID: Q9BX66
  ENST ID: ENST00000371246
  CDS Start-End: 191-3646
gcagcgtgtagtgcgagtggggcggacgcgcgcagcccgcccgcccggcgaccagcaaggagttggcatcctttggaagagttcgtgaaagctttctgcccagagctcctggaccaatgcatcttcccaccaccttaaaccactgagcagttcagagccccagttgcagacgacttgtcctgccaccaccatgagttctgaatgtgatggtggttccaaagctgtgatgaatggcttggcacctggcagcaatgggcaagacaaagcaactgccgaccctttacgcgcacgctctatttctgctgttaaaatcattcctgtgaagacagtgaaaaacgcctcaggcctagttctccctacagacatggatcttacaaaaatctgcactgggaagggagcggtgactctccgggcctcgtcttcctacagggaaaccccaagcagtagccctgcgagccctcaggaaacccggcaacacgaaagcaaaccaggtctggagccagagccttcttcagcagatgagtggaggctttcttccagtgctgatgccaatggaaatgcccagccctcttcactcgctgccaagggctacagaagtgtgcatcccaaccttccttctgacaagtcccaggatgccacttcctccagtgcagcccagccggaggtaatagttgtccctctctacctggttaatactgacagagggcaagaaggcactgccagacctccaacacctctggggcctcttggctgcgtccccacaatcccagcgactgcctctgccgcctcacctctgaccttcccgactctagatgatttcattccccctcatctgcagaggtggccccaccacagccagccagcccgcgcctctggctcctttgcccccattagccagacgccaccatccttctcaccaccacctccgctggtccctcctgccccggaggacctccgcagagtctcggagcctgacctcacgggagctgtttcgagtaccgattccagtcctctactaaatgaagtttcttcttcccttattggaactgattcccaagcctttccatcagttagcaagccttcatccgcctatccctccacaacgattgtcaatcctactattgtgctcttgcaacacaatcgagaacagcaaaaacgactcagtagcctttcagatcctgtctcagaaagaagagtgggagagcaggactcagcaccaacccaggaaaaacccacctcacctggcaaggctattgaaaaaagagcaaaggatgacagtaggcgggtggtgaagagcactcaggacttaagcgatgtttccatggatgaagtgggcatcccactccggaacactgagagatcaaaagactggtacaagactatgtttaaacagatccacaaactgaacagagacactcctgaagaaaacccttatttccctacgtacaaattccctgaacttcctgaaatccagcaaacttccgaagagacaaagtcttgctctgtcatgtcacccaggctggagtgcagtggtacagtcatagctcactgcagcctcaaactcctagactcaagcaatcctcccacctcagcctcccaagtagctgggactgcagatgatgattcagatctgtactctcccagatactcattttctgaagacacaaaatctcccctttctgtgcctcgctcaaaaagtgagatgagctacattgatggtgagaaggtagtcaagaggtcggccacactacccctcccagcccgctcttcctcactgaagtcaagctcagaaagaaatgactgggaacccccagataagaaagtagacacaagaaaatatcgtgcagagcccaagagcatttacgaatatcagcctggcaagtcttccgttctgaccaacgaaaagatgagtcgggatataagcccagaagagatagatttaaagaatgaaccttggtataaattcttttcggaattggagtttgggaaaccgcctcccaaaaagatatgggattatactcctggagactgctctatccttcctagagaggatagaaagactaatctagacaaagatctcagcctctgccagacagagttagaggcagatttagaaaaaatggagacgcttaataaagcacccagtgcaaacgtgccacagagctcagccatcagccctactccggaaatttcttcagagactcctggatatatatattcttccaacttccatgcagtgaagagggaatcagacggggctcctggggatctcactagcttggagaatgagagacaaatttataaaagtgtcttggaaggtggtgacatccctcttcagggcctgagtgggctcaagcgaccatccagctctgcttccactaaagattcagaatcgccaagacattttataccagctgattacttggaatccacggaagaatttattcgaagacgtcatgatgataaagagaaacttttagcggaccagagacgacttaaacgcgagcaagaagaggctgatattgcagctcgacgccacacaggcgtcattccgacgcaccatcagtttatcactaatgagcgctttggggacctcctcaatatagacgatactgcaaaaaggaaatctgggtcagagatgagacctgccagagccaaatttgactttaaagctcagacactaaaggagcttcctctgcagaagggagatattgtttacatttataagcaaattgatcagaactggtatgaaggagaacaccacggccgggtgggaatcttcccacgcacctacatcgagcttcttcctcctgctgagaaggcacagcccaaaaagttgacaccagtgcaggttttggaatatggagaagctattgctaagtttaactttaatggtgatacacaagtagaaatgtccttcagaaagggtgagaggatcacactgctccggcaggtagatgagaactggtacgaagggaggatcccggggacatcccgacaaggcatcttccccatcacctacgtggatgtgatcaagcgaccactggtgaaaaaccctgtggattacatggacctgcctttctcctcctccccaagtcgcagtgccactgcaagcccacagccatggcgcgaagagagtggacaatatgagaggaaagcagagaggggggcaggcgaaagaggccctggtggacccaagatctctaagaagagctgcttgaagccttcagacgtggtcaggtgcctgagtactgaacagagactctcagatctcaacacccctgaggagagccggcccggcaagcccctgggtagcgcttttccaggaagtgaggctgagcagacagagcggcatagaggtggcgagcaggcggggaggaaagctgctcggagaggtgggagccagcaacctcaagcccagcagcgaagagtcacccccgacaggagtcaaacctcacaagatttatttagctatcaagcattatatagctatataccacagaatgatgatgagttggaactccgcgatggagatatcgttgatgtcatggaaaaatgtgacgatggatggtttgttggtacttcaagaaggacaaagcagtttggtacttttccaggcaactatgtaaaacctttgtatctataagaagactgaaaaccatggagattatttttattggaggaggaagcatcattcatgaaccgatctttttagttgagtcagtaggaaaattaatacagtggataaagtaagaagcaaaagacagggacagagaagtgttgtgtttaaaacccaagcctgtctaaggttactgtgtattagacagggccgaactagtgtgctgagcaaaaagaattgaagcaaattgtatttacttagccgcttctgggagccacttcagcctttcccctcccctccacttcttgggtaatctgacctgaagcatagtccaggagcagagttagccagaaatgcctcctgctgccccagccttagagagctcccatctcaatcattgagcctgaaggcttcaagcccaagaatgcaacaagacccccagcctacatttctcagctcccctggagccagctgatcctgtaacgctgctggaggtcagtctgagctaccaagactgtccctagacaaaggtggagtcccccacactgcccaagaccaaatccctcactcaacctgctgaggtgtggatggggaaacagaggcaaaactgaggcacctgatgcattcagcctgctgtgcagcagtgccattgactgccctgatgttcagagagaaacgcacacaaggtttgcccatgagaattggggagcagatggccaagcagataggttatgtctgttttctgagtgatgaagtcaggaagccctgtggctctggaggccacttgtggttcattcttttcccatatccttggcttttagaaatggttaccttcaggacagtgcagctgcatttatcagagcactattgctaagttttcttttctggcttgtgtttttctgggacagtttagaattgggaggcctattctcatagaacaccaaaaatgatgttcagtgattcatttaacatacaccaatgtactctggctgctggggggacaaccataagcaagacatgcccagggtttgccgtggctccagatctactccctgtaggagttcaaggatcacacaaacggtagtaaccagggttgtgaatctgagtacaccctggcaaggcttctcttcagactgaagcagcaattctgccactaccagcagcaaccaggacgtctgttctttgtgggggccagatcagaagagagaggcccctgtgacgcccgggctgcttggtcacaactctgtccaattcaaggatgtttatcggcctctcttagatcctgagtgagacaaatacagaaatgacccattccctgcccaccagaaactcagaggtgattggggagactgacacaggaaaatgaacttaatcaagagagactgtgatatgtgctaagaagggtgtgagggagggagagatgaattttccctggagggatcctagaaagcattgtcatattgccatctccattagctcacttttaaacaactagggtgctggaagaacctttgtctgagggtagttcatagctggaaatacttggaatattttccagagtctctaaactctcatcttcccccacagatacacatccaagctcacaaataggagtagcaattctaggtggtagggttgtgtacggaacccctggctgtctgcatatatctcagaattaccccaggaccattgtcccaaagtctagagtctttacaggtaggcaaaatttgttttcaatgcctgtgcctcagctgctgtcacaaatacccatcttaggatcccatcagcttcccatcccccaccagacagccacagtaccctcactttctccctattgttctttcaaatcctgttctcaggaaagaaactgccactaattcattcacactaaggtgtaaatgattgataataggaatgagttacctcttcccacagacatttgtttttaagtatgacagagcagggccttaatcccaagggaaaaggttatggaactggagggggtgagctttctgggtagaaggagacttcctgaatttccttaaaacccagtaagagtaagacctgttgttttggaaggtctgctccaccatctaagagcactgtttttttttttttgttgttgttgttgttttacggtctctgagggaatatagtaaaaatgcatatgcacgtgcaatttgcacggcagcatttcaccgattgtggactgtattggctaatgtgtttcctggtctttagatgcaaaccattaataacactatcttatctcatagttttttcaggggtgcttcttgattagtagggaattttgaacacctctttaaatacagctagaaaataaaaccaatttgtaaagccacatttgcatatgatgccagcctcacgcatttgtatatctccagaaattcaggtatgcctcaccaatttgcccgtctttaataaaatcttgtgttaaaatttgcatcacgtcgccttcctatgtatgacgaaacaagaaacagagatttccaattgctcttttgtcttcagacatttagtaatataaagtacctatttttatgctgaaatgtttatacaggtttattaatagcaagtgcaactaactggcggcatgccttgcaacacattttgatatattagccatgcttccgggtaaaggcaagccccaaactccttatcttttgcagtctctctgggatcagtaaaagaaaaaaaaaataatgtgcttaagaagtgggactgtaaatatgtatatttaactttgtatagcccatgtacctaccttgtatagaaaaataattttaaaaatttgaatggaagggggtaaaggaagtcatgaagtttttttgcatttttatttaaatgaaggaattccaaataactcacctacagatttttagcacaaaaatagccattgtaaagtgttaaaatttacgataagtattctattggggaggaaaggtaactctgatctcagttacagtttttttttcctttttaatttcattattttgggtttttggtttttgcagtcctatttatctgcagtcgtattaagtcctattgctagaataggttactacaaaaaaggttatattctgaaagaaaaataactgacattatatataaccaattaatttaaagtattgccatttaaattacacactgagagcatgtcctatgcagacatagatttttctgttcatttatttttcttcattgcagtggattgatttgataaatagatgtgttgaattactacatttgctgtacatattatttaataaactttattcagaattgcgtggc

SEQ ID NO: 184819 - DNA, 7354 bp, Homo sapiens
  Payload ID: 16399
  Gene Symbol: SORBS1
  Gene Name: sorbin and SH3 domain containing 1
  Uniprot ID: Q9BX66
  ENST ID: ENST00000371247
  CDS Start-End: 191-4069
gcagcgtgtagtgcgagtggggcggacgcgcgcagcccgcccgcccggcgaccagcaaggagttggcatcctttggaagagttcgtgaaagctttctgcccagagctcctggaccaatgcatcttcccaccaccttaaaccactgagcagttcagagccccagttgcagacgacttgtcctgccaccaccatgagttctgaatgtgatggtggttccaaagctgtgatgaatggcttggcacctggcagcaatgggcaagacaaagcaactgccgaccctttacgcgcacgctctatttctgctgttaaaatcattcctgtgaagacagtgaaaaacgcctcaggcctagttctccctacagacatggatcttacaaaaatctgcactgggaagggagcggtgactctccgggcctcgtcttcctacagggaaaccccaagcagtagccctgcgagccctcaggaaacccggcaacacgaaagcaaaccaggtctggagccagagccttcttcagcagatgagtggaggctttcttccagtgctgatgccaatggaaatgcccagccctcttcactcgctgccaagggctacagaagtgtgcatcccaaccttccttctgacaagtcccaggatgccacttcctccagtgcagcccagccggaggtaatagttgtccctctctacctggttaatactgacagagggcaagaaggcactgccagacctccaacacctctggggcctcttggctgcgtccccacaatcccagcgactgcctctgccgcctcacctctgaccttcccgactctagatgatttcattccccctcatctgcagaggtggccccaccacagccagccagcccgcgcctctggctcctttgcccccattagccagacgccaccatccttctcaccaccacctccgctggtccctcctgccccggaggacctccgcagagtctcggagcctgacctcacgggagctgtttcgagtaccgattccagtcctctactaaatgaagtttcttcttcccttattggaactgattcccaagcctttccatcagttagcaagccttcatccgcctatccctccacaacgattgtcaatcctactattgtgctcttgcaacacaatcgagaacagcaaaaacgactcagtagcctttcagatcctgtctcagaaagaagagtgggagagcaggactcagcaccaacccaggaaaaacccacctcacctggcaaggctattgaaaaaagagcaaaggatgacagtaggcgggtggtgaagagcactcaggacttaagcgatgtttccatggatgaagtgggcatcccactccggaacactgagagatcaaaagactggtacaagactatgtttaaacagatccacaaactgaacagagacactcctgaagaaaacccttatttccctacgtacaaattccctgaacttcctgaaatccagcaaacttccgaagaggacaatccttacactcccacctaccagtttcctgcatctactcctagtcctaaatctgaagatgatgattcagatctgtactctcccagatactcattttctgaagacacaaaatctcccctttctgtgcctcgctcaaaaagtgagatgagctacattgatggtgagaaggtagtcaagaggtcggccacactacccctcccagcccgctcttcctcactgaagtcaagctcagaaagaaatgactgggaacccccagataagaaagtagacacaagaaaatatcgtgcagagcccaagagcatttacgaatatcagcctggcaagtcttccgttctgaccaacgaaaagatgagtcgggatataagcccagaagagatagatttaaagaatgaaccttggtataaattcttttcggaattggagtttgggaaaccgcctcccaaaaagatatgggattatactcctggagactgctctatccttcctagagaggatagaaagactaatctagacaaagatctcagcctctgccagacagagttagaggcagatttagaaaaaatggagacgcttaataaagcacccagtgcaaacgtgccacagagctcagccatcagccctactccggaaatttcttcagagactcctggatatatatattcttccaacttccatgcagtgaagagggaatcagacggggctcctggggatctcactagcttggagaatgagagacaaatttataaaagtgtcttggaaggtggtgacatccctcttcagggcctgagtgggctcaagcgaccatccagctctgcttccactaaagattcagaatcgccaagacattttataccagctgattacttggaatccacggaagaatttattcgaagacgtcatgatgataaagagaaacttttagcggaccagagacgacttaaacgcgagcaagaagaggctgatattgcagctcgacgccacacaggcgtcattccgacgcaccatcagtttatcactaatgagcgctttggggacctcctcaatatagacgatactgcaaaaaggaaatctgggtcagagatgagacctgccagagccaaatttgactttaaagctcagacactaaaggagcttcctctgcagaagggagatattgtttacatttataagcaaattgatcagaactggtatgaaggagaacaccacggccgggtgggaatcttcccacgcacctacatcgagcttcttcctcctgctgagaaggcacagcccaaaaagttgacaccagtgcaggttttggaatatggagaagctattgctaagtttaactttaatggtgatacacaagtagaaatgtccttcagaaagggtgagaggatcacactgctccggcaggtagatgagaactggtacgaagggaggatcccggggacatcccgacaaggcatcttccccatcacctacgtggatgtgatcaagcgaccactggtgaaaaaccctgtggattacatggacctgcctttctcctcctccccaagtcgcagtgccactgcaagcccacagttttccagtcacagcaagctcatcacgccagccccctcatctctgccccactcccgccgagccctgtcccccgagatgcacgctgtcacctctgagtggatctcactgactgtgggggtcccaggcaggcgttctctggccctgaccccacccttgcctcctctgccagaggcttctatctataacactgaccacctcgccttgtcaccaagggccagtccctccctgtctctcagcctcccccatttgagttggtcagatcgtcccaccccacgatcagtagcttctccactggccctaccttccccacacaaaacctactccctagcacctacttcccaggcctcccttcacatgaatggagacggtggtgtccacacgccatcttcaggcatccaccaagatagcttcttgcagctgccgctggggagctctgatagtgtcatctcccagcttagtgatgcctttagcagccagagcaagaggcagccatggcgcgaagagagtggacaatatgagaggaaagcagagaggggggcaggcgaaagaggccctggtggacccaagatctctaagaagagctgcttgaagccttcagacgtggtcaggtgcctgagtactgaacagagactctcagatctcaacacccctgaggagagccggcccggcaagcccctgggtagcgcttttccaggaagtgaggctgagcagacagagcggcatagaggtggcgagcaggcggggaggaaagctgctcggagaggtgggagccagcaacctcaagcccagcagcgaagagtcacccccgacaggagtcaaacctcacaagatttatttagctatcaagcattatatagctatataccacagaatgatgatgagttggaactccgcgatggagatatcgttgatgtcatggaaaaatgtgacgatggatggtttgttggtacttcaagaaggacaaagcagtttggtacttttccaggcaactatgtaaaacctttgtatctataagaagactgaaaaccatggagattatttttattggaggaggaagcatcattcatgaaccgatctttttagttgagtcagtaggaaaattaatacagtggataaagtaagaagcaaaagacagggacagagaagtgttgtgtttaaaacccaagcctgtctaaggttactgtgtattagacagggccgaactagtgtgctgagcaaaaagaattgaagcaaattgtatttacttagccgcttctgggagccacttcagcctttcccctcccctccacttcttgggtaatctgacctgaagcatagtccaggagcagagttagccagaaatgcctcctgctgccccagccttagagagctcccatctcaatcattgagcctgaaggcttcaagcccaagaatgcaacaagacccccagcctacatttctcagctcccctggagccagctgatcctgtaacgctgctggaggtcagtctgagctaccaagactgtccctagacaaaggtggagtcccccacactgcccaagaccaaatccctcactcaacctgctgaggtgtggatggggaaacagaggcaaaactgaggcacctgatgcattcagcctgctgtgcagcagtgccattgactgccctgatgttcagagagaaacgcacacaaggtttgcccatgagaattggggagcagatggccaagcagataggttatgtctgttttctgagtgatgaagtcaggaagccctgtggctctggaggccacttgtggttcattcttttcccatatccttggcttttagaaatggttaccttcaggacagtgcagctgcatttatcagagcactattgctaagttttcttttctggcttgtgtttttctgggacagtttagaattgggaggcctattctcatagaacaccaaaaatgatgttcagtgattcatttaacatacaccaatgtactctggctgctggggggacaaccataagcaagacatgcccagggtttgccgtggctccagatctactccctgtaggagttcaaggatcacacaaacggtagtaaccagggttgtgaatctgagtacaccctggcaaggcttctcttcagactgaagcagcaattctgccactaccagcagcaaccaggacgtctgttctttgtgggggccagatcagaagagagaggcccctgtgacgcccgggctgcttggtcacaactctgtccaattcaaggatgtttatcggcctctcttagatcctgagtgagacaaatacagaaatgacccattccctgcccaccagaaactcagaggtgattggggagactgacacaggaaaatgaacttaatcaagagagactgtgatatgtgctaagaagggtgtgagggagggagagatgaattttccctggagggatcctagaaagcattgtcatattgccatctccattagctcacttttaaacaactagggtgctggaagaacctttgtctgagggtagttcatagctggaaatacttggaatattttccagagtctctaaactctcatcttcccccacagatacacatccaagctcacaaataggagtagcaattctaggtggtagggttgtgtacggaacccctggctgtctgcatatatctcagaattaccccaggaccattgtcccaaagtctagagtctttacaggtaggcaaaatttgttttcaatgcctgtgcctcagctgctgtcacaaatacccatcttaggatcccatcagcttcccatcccccaccagacagccacagtaccctcactttctccctattgttctttcaaatcctgttctcaggaaagaaactgccactaattcattcacactaaggtgtaaatgattgataataggaatgagttacctcttcccacagacatttgtttttaagtatgacagagcagggccttaatcccaagggaaaaggttatggaactggagggggtgagctttctgggtagaaggagacttcctgaatttccttaaaacccagtaagagtaagacctgttgttttggaaggtctgctccaccatctaagagcactgtttttttttttttgttgttgttgttgttttacggtctctgagggaatatagtaaaaatgcatatgcacgtgcaatttgcacggcagcatttcaccgattgtggactgtattggctaatgtgtttcctggtctttagatgcaaaccattaataacactatcttatctcatagttttttcaggggtgcttcttgattagtagggaattttgaacacctctttaaatacagctagaaaataaaaccaatttgtaaagccacatttgcatatgatgccagcctcacgcatttgtatatctccagaaattcaggtatgcctcaccaatttgcccgtctttaataaaatcttgtgttaaaatttgcatcacgtcgccttcctatgtatgacgaaacaagaaacagagatttccaattgctcttttgtcttcagacatttagtaatataaagtacctatttttatgctgaaatgtttatacaggtttattaatagcaagtgcaactaactggcggcatgccttgcaacacattttgatatattagccatgcttccgggtaaaggcaagccccaaactccttatcttttgcagtctctctgggatcagtaaaagaaaaaaaaaataatgtgcttaagaagtgggactgtaaatatgtatatttaactttgtatagcccatgtacctaccttgtatagaaaaataattttaaaaatttgaatggaagggggtaaaggaagtcatgaagtttttttgcatttttatttaaatgaaggaattccaaataactcacctacagatttttagcacaaaaatagccattgtaaagtgttaaaatttacgataagtattctattggggaggaaaggtaactctgatctcagttacagtttttttttcctttttaatttcattattttgggtttttggtttttgcagtcctatttatctgcagtcgtattaagtcctattgctagaataggttactacaaaaaaggttatattctgaaagaaaaataactgacattatatataaccaattaatttaaagtattgccatttaaattacacactgagagcatgtcctatgcagacatagatttttctgttcatttatttttcttcattgcagtggattgatttgataaatagatgtgttgaattactacatttgctgtacatattatttaataaactttattcagaattgcgtggc

SEQ ID NO: 184820 - DNA, 5927 bp, Homo sapiens
  Payload ID: 16399
  Gene Symbol: SORBS1
  Gene Name: sorbin and SH3 domain containing 1
  Uniprot ID: Q9BX66
  ENST ID: ENST00000371249
  CDS Start-End: 191-2641
gcagcgtgtagtgcgagtggggcggacgcgcgcagcccgcccgcccggcgaccagcaaggagttggcatcctttggaagagttcgtgaaagctttctgcccagagctcctggaccaatgcatcttcccaccaccttaaaccactgagcagttcagagccccagttgcagacgacttgtcctgccaccaccatgagttctgaatgtgatggtggttccaaagctgtgatgaatggcttggcacctggcagcaatgggcaagacaaagacatggatcttacaaaaatctgcactgggaagggagcggtgactctccgggcctcgtcttcctacagggaaaccccaagcagtagccctgcgagccctcaggaaacccggcaacacgaaagcaaaccaggtctggagccagagccttcttcagcagatgagtggaggctttcttccagtgctgatgccaatggaaatgcccagccctcttcactcgctgccaagggctacagaagtgtgcatcccaaccttccttctgacaagtcccaggatgccacttcctccagtgcagcccagccggaggtaatagttgtccctctctacctggttaatactgacagagggcaagaaggcactgccagacctccaacacctctggggcctcttggctgcgtccccacaatcccagcgactgcctctgccgcctcacctctgaccttcccgactctagatgatttcattccccctcatctgcagaggtggccccaccacagccagccagcccgcgcctctggctcctttgcccccattagccagacgccaccatccttctcaccaccacctccgctggtccctcctgccccggaggacctccgcagagtctcggagcctgacctcacgggagctgtttcgagtaccgattccagtcctctactaaatgaagtttcttcttcccttattggaactgattcccaagcctttccatcagttagcaagccttcatccgcctatccctccacaacgattgtcaatcctactattgtgctcttgcaacacaatcgagaacagcaaaaacgactcagtagcctttcagatcctgtctcagaaagaagagtgggagagcaggactcagcaccaacccaggaaaaacccacctcacctggcaaggctattgaaaaaagagcaaaggatgacagtaggcgggtggtgaagagcactcaggacttaagcgatgtttccatggatgaagtgggcatcccactccggaacactgagagatcaaaagactggtacaagactatgtttaaacagatccacaaactgaacagagatgatgattcagatctgtactctcccagatactcattttctgaagacacaaaatctcccctttctgtgcctcgctcaaaaagtgagatgagctacattgatggtgagaaggtagtcaagaggtcggccacactacccctcccagcccgctcttcctcactgaagtcaagctcagaaagaaatgactgggaacccccagataagaaagtagacacaagaaaatatcgtgcagagcccaagagcatttacgaatatcagcctggcaagtcttccgttctgaccaacgaaaagatgagctcagccatcagccctactccggaaatttcttcagagactcctggatatatatattcttccaacttccatgcagtgaagagggaatcagacggggctcctggggatctcactagcttggagaatgagagacaaatttataaaagtgtcttggaaggtggtgacatccctcttcagggcctgagtgggctcaagcgaccatccagctctgcttccactaaagattcagaatcgccaagacattttataccagctgattacttggaatccacggaagaatttattcgaagacgtcatgatgataaagagatgagacctgccagagccaaatttgactttaaagctcagacactaaaggagcttcctctgcagaagggagatattgtttacatttataagcaaattgatcagaactggtatgaaggagaacaccacggccgggtgggaatcttcccacgcacctacatcgagcttcttcctcctgctgagaaggcacagcccaaaaagttgacaccagtgcaggttttggaatatggagaagctattgctaagtttaactttaatggtgatacacaagtagaaatgtccttcagaaagggtgagaggatcacactgctccggcaggtagatgagaactggtacgaagggaggatcccggggacatcccgacaaggcatcttccccatcacctacgtggatgtgatcaagcgaccactggtgaaaaaccctgtggattacatggacctgcctttctcctcctccccaagtcgcagtgccactgcaagcccacagcaacctcaagcccagcagcgaagagtcacccccgacaggagtcaaacctcacaagatttatttagctatcaagcattatatagctatataccacagaatgatgatgagttggaactccgcgatggagatatcgttgatgtcatggaaaaatgtgacgatggatggtttgttggtacttcaagaaggacaaagcagtttggtacttttccaggcaactatgtaaaacctttgtatctataagaagactgaaaaccatggagattatttttattggaggaggaagcatcattcatgaaccgatctttttagttgagtcagtaggaaaattaatacagtggataaagtaagaagcaaaagacagggacagagaagtgttgtgtttaaaacccaagcctgtctaaggttactgtgtattagacagggccgaactagtgtgctgagcaaaaagaattgaagcaaattgtatttacttagccgcttctgggagccacttcagcctttcccctcccctccacttcttgggtaatctgacctgaagcatagtccaggagcagagttagccagaaatgcctcctgctgccccagccttagagagctcccatctcaatcattgagcctgaaggcttcaagcccaagaatgcaacaagacccccagcctacatttctcagctcccctggagccagctgatcctgtaacgctgctggaggtcagtctgagctaccaagactgtccctagacaaaggtggagtcccccacactgcccaagaccaaatccctcactcaacctgctgaggtgtggatggggaaacagaggcaaaactgaggcacctgatgcattcagcctgctgtgcagcagtgccattgactgccctgatgttcagagagaaacgcacacaaggtttgcccatgagaattggggagcagatggccaagcagataggttatgtctgttttctgagtgatgaagtcaggaagccctgtggctctggaggccacttgtggttcattcttttcccatatccttggcttttagaaatggttaccttcaggacagtgcagctgcatttatcagagcactattgctaagttttcttttctggcttgtgtttttctgggacagtttagaattgggaggcctattctcatagaacaccaaaaatgatgttcagtgattcatttaacatacaccaatgtactctggctgctggggggacaaccataagcaagacatgcccagggtttgccgtggctccagatctactccctgtaggagttcaaggatcacacaaacggtagtaaccagggttgtgaatctgagtacaccctggcaaggcttctcttcagactgaagcagcaattctgccactaccagcagcaaccaggacgtctgttctttgtgggggccagatcagaagagagaggcccctgtgacgcccgggctgcttggtcacaactctgtccaattcaaggatgtttatcggcctctcttagatcctgagtgagacaaatacagaaatgacccattccctgcccaccagaaactcagaggtgattggggagactgacacaggaaaatgaacttaatcaagagagactgtgatatgtgctaagaagggtgtgagggagggagagatgaattttccctggagggatcctagaaagcattgtcatattgccatctccattagctcacttttaaacaactagggtgctggaagaacctttgtctgagggtagttcatagctggaaatacttggaatattttccagagtctctaaactctcatcttcccccacagatacacatccaagctcacaaataggagtagcaattctaggtggtagggttgtgtacggaacccctggctgtctgcatatatctcagaattaccccaggaccattgtcccaaagtctagagtctttacaggtaggcaaaatttgttttcaatgcctgtgcctcagctgctgtcacaaatacccatcttaggatcccatcagcttcccatcccccaccagacagccacagtaccctcactttctccctattgttctttcaaatcctgttctcaggaaagaaactgccactaattcattcacactaaggtgtaaatgattgataataggaatgagttacctcttcccacagacatttgtttttaagtatgacagagcagggccttaatcccaagggaaaaggttatggaactggagggggtgagctttctgggtagaaggagacttcctgaatttccttaaaacccagtaagagtaagacctgttgttttggaaggtctgctccaccatctaagagcactgtttttttttttttgttgttgttgttgttttacggtctctgagggaatatagtaaaaatgcatatgcacgtgcaatttgcacggcagcatttcaccgattgtggactgtattggctaatgtgtttcctggtctttagatgcaaaccattaataacactatcttatctcatagttttttcaggggtgcttcttgattagtagggaattttgaacacctctttaaatacagctagaaaataaaaccaatttgtaaagccacatttgcatatgatgccagcctcacgcatttgtatatctccagaaattcaggtatgcctcaccaatttgcccgtctttaataaaatcttgtgttaaaatttgcatcacgtcgccttcctatgtatgacgaaacaagaaacagagatttccaattgctcttttgtcttcagacatttagtaatataaagtacctatttttatgctgaaatgtttatacaggtttattaatagcaagtgcaactaactggcggcatgccttgcaacacattttgatatattagccatgcttccgggtaaaggcaagccccaaactccttatcttttgcagtctctctgggatcagtaaaagaaaaaaaaaataatgtgcttaagaagtgggactgtaaatatgtatatttaactttgtatagcccatgtacctaccttgtatagaaaaataattttaaaaatttgaatggaagggggtaaaggaagtcatgaagtttttttgcatttttatttaaatgaaggaattccaaataactcacctacagatttttagcacaaaaatagccattgtaaagtgttaaaatttacgataagtattctattggggaggaaaggtaactctgatctcagttacagtttttttttcctttttaatttcattattttgggtttttggtttttgcagtcctatttatctgcagtcgtattaagtcctattgctagaataggttactacaaaaaaggttatattctgaaagaaaaataactgacattatatataaccaattaatttaaagtattgccatttaaattacacactgagagcatgtcctatgcagacatagatttttctgttcatttatttttcttcattgcagtggattgatttgataaatagatgtgttgaattactacatttgctgtacatattatttaataaactttattcagaattgcgtggca

SEQ ID NO: 184821 - DNA, 575 bp, Homo sapiens
  Payload ID: 16399
  Gene Symbol: SORBS1
  Gene Name: sorbin and SH3 domain containing 1
  ENST ID: ENST00000486141
  CDS Start-End: 1-575
gcacagccggcacaggaaaaccaccccctgctcctcctcctgaccctcccaagctattctttgacatccgtaaagatgccgttaaccgtggcgagagtccttccctggggactcaggcttcgttcccagatgtgagaccacctgtgctaggcccccgggttacctctgatcccgaaaaccggaagagcaaagaatcttaccttttgcagccgagttatccagccaaggattccagtcctctactaaatgaagtttcttcttcccttattggaactgattcccaagcctttccatcagttagcaagccttcatccgcctatccctccacaacgattgtcaatcctactattgtgctcttgcaacacaatcgagaacagcaaaaacgactcagtagcctttcagatcctgtctcagaaagaagagtgggagagcaggactcagcaccaacccaggaaaaacccacctcacctggcaaggctattgaaaaaagagcaaaggatgacagtaggcgggtggtgaagagcactcaggacttaagcgatgtttccatggatgaagtgggcatcccactccgg

SEQ ID NO: 184822 - DNA, 720 bp, Homo sapiens
  Payload ID: 16399
  Gene Symbol: SORBS1
  Gene Name: sorbin and SH3 domain containing 1
  ENST ID: ENST00000492542
  CDS Start-End: 284-720
agtagagatgggttcctaatgtcatcgtttatttctcatggctgccagtaataaacacgaaagaagaactaaatatagtgagttatgtactcaccagctcatggtattatcctgaacttgccgcactgagaggaaattctgtagctctgtttagtagatggtacagagtaaaccccaggcagagagttttcatcttcttgtcatcccgcagaatatttctgatgactagagctctcagagcagttcagagccccagttgcagacgacttgtcctgccaccaccatgagttctgaatgtgatggtggttccaaagctgtgatgaatggcttggcacctggcagcaatgggcaagacaaagacatggatcttacaaaaatctgcactgggaagggagcggtgactctccgggcctcgtcttcctacagggaaaccccaagcagtagccctgcgagccctcaggaaacccggcaacacgaaagcaaaccagatgagtggaggctttcttccagtgctgatgccaatggaaatgcccagccctcttcactcgctgccaagggctacagaagtgtgcatcccaaccttccttctgacaagtcccaggatgccacttcctccagtgcagcccagccggaggtaatagttgtccctctctacctggttaatactgacagagggcaagaaggcactgccagacctccaacacctctggggcctcttgg

SEQ ID NO: 184823 - DNA, 4374 bp, Homo sapiens
  Payload ID: 16399
  Gene Symbol: SORBS1
  Gene Name: sorbin and SH3 domain containing 1
  Uniprot ID: Q9BX66
  ENST ID: ENST00000607232
  CDS Start-End: 168-4052
ggacgcgcgcagcccgcccgcccggcgaccagcaaggagttggcatcctttggaagagttcgtgaaagctttctgcccagagctcctggaccaatgcatcttcccaccaccttaaaccactgagcagttcagagccccagttgcagacgacttgtcctgccaccaccatgagttctgaatgtgatggtggttccaaagctgtgatgaatggcttggcacctggcagcaatgggcaagacaaagacatggatcttacaaaaatctgcactgggaagggagcggtgactctccgggcctcgtcttcctacagggaaaccccaagcagtagccctgcgagccctcaggaaacccggcaacacgaaagcaaaccaggtctggagccagagccttcttcagcagatgagtggaggctttcttccagtgctgatgccaatggaaatgcccagccctcttcactcgctgccaagggctacagaagtgtgcatcccaaccttccttctgacaagtcccaggattccagtcctctactaaatgaagtttcttcttcccttattggaactgattcccaagcctttccatcagttagcaagccttcatccgcctatccctccacaacgattgtcaatcctactattgtgctcttgcaacacaatcgagatcctgtctcagaaagaagagtgggagagcaggactcagcaccaacccaggaaaaacccacctcacctggcaaggctattgaaaaaagagcaaaggatgacagtaggcgggtggtgaagagcactcaggacttaagcgatgtttccatggatgaagtgggcatcccactccggaacactgagagatcaaaagactggtacaagactatgtttaaacagatccacaaactgaacagagatgatgattcagatctgtactctcccagatactcattttctgaagacacaaaatctcccctttctgtgcctcgctcaaaaagtgagatgagctacattgatggtgagaaggtagtcaagaggtcggccacactacccctcccagcccgctcttcctcactgaagtcaagctcagaaagaaatgactgggaacccccagataagaaagtagacacaagaaaatatcgtgcagagcccaagagcatttacgaatatcagcctggcaagtcttccgttctgaccaacgaaaagatgagtcgggatataagcccagaagagatagatttaaagaatgaaccttggtataaattcttttcggaattggagtttgggaaaccgactaatctagacaaagatctcagcctctgccagacagagttagaggcagatttagaaaaaatggagacgcttaataaagcacccagtgcaaacgtgccacagagctcagccatcagccctactccggaaatttcttcagagactcctggatatatatattcttccaacttccatgcagtgaagagggaatcagacggggctcctggggatctcactagcttggagaatgagagacaaatttataaaagtgtcttggaaggtggtgacatccctcttcagggcctgagtgggctcaagcgaccatccagctctgcttccactaaagtggatcgtaaaggtgggaatgctcacatgatttcttcatcttcagtccatagccgaacgtttaacactagcaatgcgttaggccctgtgtgtaagcacaagaagcccctgtcagctgcgaaggcctgcatttcggaaatccttccatccaaattcaaacccaggctctctgctcccagcgctcttttgcaggaacagaagagtatcctcttgccctcagagaaggctcaaagctgtgagaacctttgtgtttctggttctttaaatgattccaaaagaggcctccccctccaagtgggagggagcattgagaacctgctcatgcgctcccgacgggattatgacagcaagtcgagcagtaccatgagcctccaggagtacagcaccagcggcaggaggccctgtcctctctcaagaaaggctgggatgcagttcaccatgctttatcgggacatgcaccagatcaaccgatctggcctcttcctgggctccatctcctcctcctcgagtgtgcgggatcttgcctcccactttgaaaagagtagcctggcattgtccaggggtgagctgggccccagccaggagggctcggaacacatccccaagcacaccgtctcttcccgcatcaccgcttttgagcagctgattcagcggtcccgttccatgccatccctggacctgtccggaaggctgagcaagtctcccacacctgtgctgtcccggggcagcctgacctcagcccgctcggccgagtccctacttgagtcaaccaagctccatcccaaggagatggatgggatgaactccagtggggtctatgcttccccaacatgtagcaatatggcacaccatgccttgagcttcaggggccttgtgccttctgagcctctctccacctgctctgatgacgtggaccgctgttcaaatatctccactgacagcagagaaggcagtggcggcagtgttcatggagatttccccaaacatcgcctcaacaagtgcaagggcacctgcccggcctcatacacccgcttcaccaccatccggaagcatgagcagcagcagacctctagacagcctgagtggcgcctggatgccagaggggacaagagcaccctcctcaggaacatctacctaatgagcccccttcctttccggctgaaaaagcccctccaccaccaccccagacaaccttcccctggtgactcctcaggcctcctggtgggccagaagccagacctccccagtcagccccatcaggaccagcccccttctggggggaagcccgtggttcccacacgcctgtcttcccgacacaccatggccaggcttagccgcagctcagagccctctcaggagagacccacggccctggaggactacccaagggccattaataatggaaactccgtgccatactcagaccacagcctggacaggaacaacaacccacaaagtgaactggcaccatcccgtggagattcagaatcgccaagacattttataccagctgattacttggaatccacggaagaatttattcgaagacgtcatgatgataaagagaaacttttagcggaccagagacgacttaaacgcgagcaagaagaggctgatattgcagctcgacgccacacaggcgtcattccgacgcaccatcagtttatcactaatgagcgctttggggacctcctcaatatagacgatactgcaaaaaggaaatctgggtcagagatgagacctgccagagccaaatttgactttaaagctcagacactaaaggagcttcctctgcagaagggagatattgtttacatttataagcaaattgatcagaactggtatgaaggagaacaccacggccgggtgggaatcttcccacgcacctacatcgagcttcttcctcctgctgagaaggcacagcccaaaaagttgacaccagtgcaggttttggaatatggagaagctattgctaagtttaactttaatggtgatacacaagtagaaatgtccttcagaaagggtgagaggatcacactgctccggcaggtagatgagaactggtacgaagggaggatcccggggacatcccgacaaggcatcttccccatcacctacgtggatgtgatcaagcgaccactggtgaaaaaccctgtggattacatggacctgcctttctcctcctccccaagtcgcagtgccactgcaagcccacagcaacctcaagcccagcagcgaagagtcacccccgacaggagtcaaacctcacaagatttatttagctatcaagcattatatagctatataccacagaatgatgatgagttggaactccgcgatggagatatcgttgatgtcatggaaaaatgtgacgatggatggtttgttggtacttcaagaaggacaaagcagtttggtacttttccaggcaactatgtaaaacctttgtatctataagaagactgaaaaccatggagattatttttattggaggaggaagcatcattcatgaaccgatctttttagttgagtcagtaggaaaattaatacagtggataaagtaagaagcaaaagacagggacagagaagtgttgtgtttaaaacccaagcctgtctaaggttactgtgtattagacagggccgaactagtgtgctgagcaaaaagaattgaagcaaattgtatttacttagccgcttctgggagccacttcagcctttcccctcccctccacttcttgggtaatctgacctgaagcatagtccaggagcagagttagcc

SEQ ID NO: 184824 - DNA, 1847 bp, Homo sapiens
  Payload ID: 16399
  Gene Symbol: SORBS1
  Gene Name: sorbin and SH3 domain containing 1
  ENST ID: ENST00000634504
  CDS Start-End: 1-1523
ctcccctttctgtgcctcgctcaaaaagtgagatgagctacattgatggtgagaaggtagtcaagaggtcggccacactacccctcccagcccgctcttcctcactgaagtcaagctcagaaagaaatgactgggaacccccagataagaaagtagacacaagaaaatatcgtgcagagcccaagagcatttacgaatatcagcctggcaagtcttccgttctgaccaacgaaaagatgagtcgggatataagcccagaagagatagatttaaagaatgaaccttggtataaattcttttcggaattggagtttgggaaaccgagctcagccatcagccctactccggaaatttcttcagagactcctggatatatatattcttccaacttccatgcagtgaagagggaatcagacggggctcctggggatctcactagcttggagaatgagagacaaatttataaaagtgtcttggaaggtggtgacatccctcttcagggcctgagtgggctcaagcgaccatccagctctgcttccactaaagattcagaatcgccaagacattttataccagctgattacttggaatccacggaagaatttattcgaagacgtcatgatgataaagagaaacttttagcggaccagagacgacttaaacgcgagcaagaagaggctgatattgcagctcgacgccacacaggcgtcattccgacgcaccatcagtttatcactaatgagcgctttggggacctcctcaatatagacgatactgcaaaaaggaaatctgggtcagagatgagacctgccagagccaaatttgactttaaagctcagacactaaaggagcttcctctgcagaagggagatattgtttacatttataagcaaattgatcagaactggtatgaaggagaacaccacggccgggtgggaatcttcccacgcacctacatcgagcttcttcctcctgctgagaaggcacagcccaaaaagttgacaccagtgcaggttttggaatatggagaagctattgctaagtttaactttaatggtgatacacaagtagaaatgtccttcagaaagggtgagaggatcacactgctccggcaggtagatgagaactggtacgaagggaggatcccggggacatcccgacaaggcatcttccccatcacctacgtggatgtgatcaagcgaccactggtgaaaaaccctgtggattacatggacctgcctttctcctcctccccaagtcgcagtgccactgcaagcccacagcaacctcaagcccagcagcgaagagtcacccccgacaggagtcaaacctcacaagatttatttagctatcaagcattatatagctatataccacagaatgatgatgagttggaactccgcgatggagatatcgttgatgtcatggaaaaatgtgacgatggatggtttgttggtacttcaagaaggacaaagcagtttggtacttttccaggcaactatgtaaaacctttgtatctataagaagactgaaaaccatggagattatttttattggaggaggaagcatcattcatgaaccgatctttttagttgagtcagtaggaaaattaatacagtggataaagtaagaagcaaaagacagggacagagaagtgttgtgtttaaaacccaagcctgtctaaggttactgtgtattagacagggccgaactagtgtgctgagcaaaaagaattgaagcaaattgtatttacttagccgcttctgggagccacttcagcctttcccctcccctccacttcttgggtaatctgacctgaagcatagtccaggagcagagttagccag

SEQ ID NO: 184825 - DNA, 5996 bp, Homo sapiens
  Payload ID: 16400
  Gene Symbol: SORBS2
  Gene Name: sorbin and SH3 domain containing 2
  Uniprot ID: O94875
  ENST ID: ENST00000284776
  CDS Start-End: 511-3813
tccttttattgtggatgaacaccacgtacatgccgtaaatgctccctaggctggctgcggctacaaggcagacccgggagctgagaatagaggaatacctgcccaagcaactcattctgcacagcagccgacaagacagcgattttcctgtgctggaatgtgcccatccaaagacacttggattggacttaatcttaaacctctggagttcaagaccttttaaaaagggctaaataaacaatctctacatgtaaaaggccactgactcctacttcctctgtatagagcaactgttgaactcagctgcctgtagggcgtgattctcagtcaccagactcagcttggagatcttacaatgatggcaatcaggagacactgaacggagatgctacatattcctctcttgcagcaaaaggttttagaagcgttcgaccaaacctacaagataaaagatcaccaactcagagccagataacagtgaatggaaactcaggaggtgccgtgagtcccatgagttactatcagaggccgttttccccctcggcatattctctcccagcctcactcaactccagcattgtcatgcagcacggcacatccctcgattccacagacacatatccccagcatgcgcagtctctggatggcaccaccagcagctctatccccctgtaccgatcctcagaggaagagaagagagtgacagtcatcaaagccccgcattacccagggatcgggcccgtggatgaatccggaatccccacagcaattagaacgacagtcgaccggcccaaggactggtacaagacgatgtttaagcaaattcacatggtgcacaagccggatgatgacacagacatgtataatactccttatacatacaatgcaggtctgtacaacccaccctacagtgctcagtcacaccctgctgcaaagacccaaacctacagacctctttccaaaagccactccgacaacagccccaatgcctttaaggatgcgtcctccccagtgcctcccccacatgttccacctccagtcccgccgcttcgaccaagagatcggtcttcaacagaaaagcatgactgggatcctccagacagaaaagtggacacaagaaaatttcggtctgagccaaggagtatttttgaatatgaacctggcaagtcatcaattcttcagcatgaaagaccagcctccttgtatcagtcctctatagacagaagcctggaaagacccatgagttctgcaagcatggccagtgacttcaggaagcggaggaagagcgagcctgcagtgggtccaccacggggcttgggagatcaaagtgcgagcaggactagcccaggccgagtggacctcccaggatcaagcaccactcttacaaagtctttcactagctcttctccttcttccccatcaagagcaaaaggtggggatgatagcaaaatatgtccatccctttgcagttactcagggctcaacggcaacccctccagtgagttagattactgtagcacttacagacagcacttggatgtccctcgggactcaccaagagccattagtttcaagaacggctggcaaatggcccggcaaaacgcagaaatctggagcagcacggaagaaaccgtctctcccaaaatcaaatcccggagctgtgacgatctcctaaacgacgactgcgatagcttcccggacccgaaagtcaagtcggaaagcatgggctccctgttatgtgaggaggactccaaggagagctgccccatggcgtgggggtccccctacgtcccggaggttcgcagtaacggcagatcaaggatcagacacaggtcagcccgcaacgccccggggttcctgaagatgtacaagaaaatgcaccgcatcaaccgcaaggacctgatgaactccgaggtgatctgctccgtgaagtccaggattctgcagtacgagagcgagcagcagcacaaggacctgctgcgcgcctggagccagtgctccacggaggaggtgccccgggacatggtgcccacacgcatctccgaattcgaaaagctgatccagaagtccaaatccatgccaaatttaggggatgacatgctgtctcccgtaaccctagaaccaccgcaaaatggcctatgtcccaagaggcggttttccattgagtatttgctggaggaagaaaatcaaagcggcccccccgctcggggccggcgaggctgccagtctaacgccctggtgcccattcacattgaagtcaccagcgatgagcagccccgagcacacgtggagttttccgacagcgaccaggacggggttgtgtccgaccacagtgactacattcacctagaggggtcatccttctgcagtgaaagtgactttgatcacttttccttcacatcctccgaaagcttttacggatccagccaccaccaccaccatcaccaccaccaccaccaccgccacctcatcagctcctgcaaaggcaggtgcccggcctcctacactcgatttaccacaatgttaaaacacgaaagagccagacacgaaaacaccgaggagcccagaaggcaagaaatggaccctggcctttctaaacttgcttttctagtcagtcctgtgcctttccggaggaaaaaaaattcggctcctaagaaacagactgaaaaggcaaaatgtaaagcatctgtgtttgaggctctggactctgcccttaaagacatctgtgaccaaattaaagctgaaaagaaaagggggagcttgccggacaacagcatcctgcaccgcctcatcagtgagctgctgccagatgttcccgagaggaactcatccctgagagcgctgaggaggagccccctgcaccagcctctccacccactgcctcccgatggtgctattcattgtccaccctaccagaatgactgcgggagaatgccccgcagtgcctctttccaagacgtggacacagccaacagcagctgccaccaccaagaccgtggcggtgcactccaagaccgtgagtcccctagaagttactcatccactttgactgacatggggagaagtgcaccaagggaaagaagaggaactccagaaaaagagaaattgcctgcaaaagctgtttatgattttaaggctcagacatctaaggagttgtcatttaagaaaggagatactgtctacatcctcaggaaaattgatcaaaattggtatgagggagaacaccacgggagagtgggcatcttcccgatctcatacgtagagaaactcacacctcctgagaaagcacagcctgcaagaccacctccgccagcccagcccggagaaatcggagaagctatagccaaatacaacttcaacgcagacacaaatgtggagctgtcactgagaaagggagatagagttattcttcttaaaagagttgatcaaaactggtatgaaggtaaaatcccaggaaccaacagacaaggcatcttccctgtttcctatgtggaggtcgtcaagaagaacacaaaaggtgctgaggactaccctgaccctccaataccccacagctattctagtgataggattcacagcttgagctcaaataagccacagcgtcctgtgtttactcatgaaaatattcaaggtgggggggaaccgtttcaggctctgtataactatactcccaggaatgaagatgagctggagctcagagaaagtgatgtcattgatgtcatggaaaagtgtgatgacggctggtttgtggggacctcaagaagaaccaaattctttggtactttccccggaaactacgtcaagaggctgtgaattgcgctccctccttctgtagaggccgcctgccagccatgcacctgcgtcaacgcgcctgaaacaccccgcgggcctcccgttgtcatgccttacggtttccaatgcgccgtcaccatctccacctgccaccaaaccaccagcagagtagccgccgctgctgtgagcctggggacgacatggcaggctggtccccctccgtgaaagtgtggattcctacttcctgctctaagctttgacacgtcaaaatgtgggatcagaaagaaaaaaatcatgatatttaaaaatggtcaaatatttgaggcaaaaaaaaaaaaaaaaagtgtctccaggaggctgtccagcctcgtggctccatttcaacatctccccccaggcgatgttctcccccaagacgaccagaaaattgtttattggggaatgctgtggtttgcattttcatattcttcgcttggcagtgtgtattcttttcacaagtttgcctagtgtcttggtttacacaatatgacaactgtaactgtactttagctattgtttgcctgcacatacatgttgtaatatgcacagtgattacaacctttaaagcaagaggaggcgagttaatttggatgagtgtgattttgctgattgaatgtgagttttcaaataggagtctttttctgcaatttgtttgcattttttagaagtgcaaacagtaagtaaataaaagccttcggtaataatcatgacaatacaagaggctgagctaggctacaggggaaaactattgtgttgtaaagttgcatcgctattttatattaaaatgtaatgatcagcatcatgaacaatgagctcttagtgttttatttatctgaaaaaatgtaagtaaaagcagtgttagtgagaggtgcaaagaattattctaacagacacctgaaagtatctgtaagcaatactagtaggtaagatttcactgtgtgtacacatacacatttgagattgtatgagaacatataatccatatgatatgttgtacattttatggaaatgtaatagaatctcacacattattttatagaaatagagtacagaagcatcacaagtattaaagttggttttagcaaggattaggattactacaattatttttactataataattatttttcttctatggaactcagaatcctggctacatttgaggacaggaatatgttgagcctgattttcctggtgtgtgtaaaatatttcctaggaataaattaggcactttttagaagcaatgttaaatcattcaggttttattttctgccctgaagcagaaatttaaaaaatgatattgggacctggaaggtttaatatggttcacagtgcctgaattacacctgctccgaaaactagctttgtatttcttatgactttgcataagaactgttcatctttggatcttgagcaccttacagataaaactttttatggcatctctttcatggacagtgatattgatcttttcacaatgtacgtagcctctagaattttgtacatatgtttgctctttttttgtacagactagttgttgagaaaacaggggcgtttcctaatttggtctttatcctgcgacaacactttcagcagactagcctctccttatctcacagatcacaagcacccctagatagtgtgattctgtcagatagcatttatgcaaaaatctatgaagttaaaagatcgtagaagccaaatgaaatgtacatatctactgactgatgacaagggaatttcattaggaagaaggtaaagaaacatcgttgagtagcctaccttgatttctgtcaagttcataaccagcttcatattttaaaggcttcaggtttgaaattaagtcaactgcatgcagctttgctgataaatgaataattctctttgatgccatttatgagaaaagacttcaatatctgttgcctgtcatatttaagaaaaattactgtttctactctctgtatctgattttaaaagaaaaaactattcatacctggcttccaggtaattgactttgaattcttacaagcaaaggtcattgtgtttttcttgaatagacatctaataaattttgcttggaagtatacttcagtttttcttcttgacatttatctttataaaaattgtgtattttattccaacttgttaaactaagagaaaatgca

SEQ ID NO: 184826 - DNA, 2011 bp, Homo sapiens
  Payload ID: 16400
  Gene Symbol: SORBS2
  Gene Name: sorbin and SH3 domain containing 2
  ENST ID: ENST00000319454
  CDS Start-End: 103-2011
taaaaggccactgactcctacttcctctgtatagagcaactgttgaactcagctgcctgtaggaaaactgaagactttaataacaaactctccaaggtgaaaatgaacacagggcgtgattctcagtcaccagactcagcaaaaggttttagaagcgttcgaccaaacctacaagataaaagatcaccaactcagagccagataacagtgaatggaaactcaggaggtgccgtgagtcccatgagttactatcagaggccgttttccccctcggcatattctctcccagcctcactcaactccagcattgtcatgcagcacggcacatccctcgattccacagacacatatccccagcatgcgcagtctctggatggcaccaccagcagctctatccccctgtaccgatcctcagaggaagagaagagagtgacagtcatcaaagccccgcattacccagggatcgggcccgtggatgaatccggaatccccacagcaattagaacgacagtcgaccggcccaaggactggtacaagacgatgtttaagcaaattcacatggtgcacaagccggatgatgacacagacatgtataatactccttatacatacaatgcaggtctgtacaacccaccctacagtgctcagtcacaccctgctgcaaagacccaaacctacagacctctttccaaaagccactccgacaacagccccaatgcctttaaggatgcgtcctccccagtgcctcccccacatgttccacctccagtcccgccgcttcgaccaagagatcggtcttcaacagaaaagcatgactgggatcctccagacagaaaagtggacacaagaaaatttcggtctgagccaaggagtatttttgaatatgaacctggcaagtcatcaattcttcagcatgaaagaccaccccctctcccaacaactccgacacctgttccaagggaacctggccggaagcctctttctagctcccgactcggagaagtcactggtagcccctcccctccgccccggagtggcgcccccacaccaagctcgcgcgccccggctctgtctcccacccggcctcctaaaaagcctctggactatgttcaagatcattcttctggtgttttcaatgaggcctccttgtatcagtcctctatagacagaagcctggaaagacccatgagttctgcaagcatggccagtgacttcaggaagcggaggaagagcgagcctgcagtgggtccaccacggggcttgggagatcaaagtgcgagcaggactagcccaggccgagtggacctcccaggatcaagcaccactcttacaaagtctttcactagctcttctccttcttccccatcaagagcaaaagaccgtgagtcccctagaagttactcatccactttgactgacatggggagaagtgcaccaagggaaagaagaggaactccagaaaaagagaaattgcctgcaaaagctgtttatgattttaaggctcagacatctaaggagttgtcatttaagaaaggagatactgtctacatcctcaggaaaattgatcaaaattggtatgagggagaacaccacgggagagtgggcatcttcccgatctcatacgtagagaaactcacacctcctgagaaagcacagcctgcaagaccacctccgccagcccagcccggagaaatcggagaagctatagccaaatacaacttcaacgcagacacaaatgtggagctgtcactgagaaagggagatagagttattcttcttaaaagagttgatcaaaactggtatgaaggtaaaatcccaggaaccaacagacaaggcatcttccctgtttcctatgtggaggtcgtcaagaagaacacaaaaggtgctgaggactaccctgaccctccaataccccacagctattctagtgataggattcacagcttgagctcaaataagccacagcgtcctgtgtttactcatgaaaatattcaaggtgggggggaaccgt

SEQ ID NO: 184827 - DNA, 2824 bp, Homo sapiens
  Payload ID: 16400
  Gene Symbol: SORBS2
  Gene Name: sorbin and SH3 domain containing 2
  Uniprot ID: O94875
  ENST ID: ENST00000319471
  CDS Start-End: 307-2502
cgttcacacctcctttccgagtatctgcatgccttgctggcccagagcacaagacccccattgtgctcccccggctcagaatccaaggaaagaaaggaagcgaagcctctgcattgagttctaggacagctgagacacttggattggacttaatcttaaacctctggagttcaagaccttttaaaaagggctaaataaacaatctctacatgtaaaaggccactgactcctacttcctctgtatagagcaactgttgaactcagctgcctgtagatagcggtgggtgtgctcgcaaacgtgccgccatgtctgttacgctaacatctgtgaagagagtgcaaagttctccaaacctattggctgcagggcgtgattctcagtcaccagactcagcttggagatcttacaatgatggcaatcaggagacactgaacggagatgctacatattcctctcttgcagcaaaaggttttagaagcgttcgaccaaacctacaagataaaagatcaccaactcagagccagataacagtgaatggaaactcaggaggtgccgtgagtcccatgagttactatcagaggccgttttccccctcggcatattctctcccagcctcactcaactccagcattgtcatgcagcacggcacatccctcgattccacagacacatatccccagcatgcgcagtctctggatggcaccaccagcagctctatccccctgtaccgatcctcagaggaagagaagagagtgacagtcatcaaagccccgcattacccagggatcgggcccgtggatgaatccggaatccccacagcaattagaacgacagtcgaccggcccaaggactggtacaagacgatgtttaagcaaattcacatggtgcacaagccggatgatgacacagacatgtataatactccttatacatacaatgcaggtctgtacaacccaccctacagtgctcagtcacaccctgctgcaaagacccaaacctacagacctctttccaaaagccactccgacaacagccccaatgcctttaaggatgcgtcctccccagtgcctcccccacatgttccacctccagtcccgccgcttcgaccaagagatcggtcttcaacagaaaagcatgactgggatcctccagacagaaaagtggacacaagaaaatttcggtctgagccaaggagtatttttgaatatgaacctggcaagtcatcaattcttcagcatgaaagaccaccccctctcccaacaactccgacacctgttccaagggaacctggccggaagcctctttctagctcccgactcggagaagtcactggtagcccctcccctccgccccggagtggcgcccccacaccaagctcgcgcgccccggctctgtctcccacccggcctcctaaaaagcctctggactatgttcaagatcattcttctggtgttttcaatgaggcctccttgtatcagtcctctatagacagaagcctggaaagacccatgagttctgcaagcatggccagtgacttcaggaagcggaggaagagcgagcctgcagtgggtccaccacggggcttgggagatcaaagtgcgagcaggactagcccaggccgagtggacctcccaggatcaagcaccactcttacaaagtctttcactagctcttctccttcttccccatcaagagcaaaagaccgtgagtcccctagaagttactcatccactttgactgacatggggagaagtgcaccaagggaaagaagaggaactccagaaaaagagaaattgcctgcaaaagctgtttatgattttaaggctcagacatctaaggagttgtcatttaagaaaggagatactgtctacatcctcaggaaaattgatcaaaattggtatgagggagaacaccacgggagagtgggcatcttcccgatctcatacgtagagaaactcacacctcctgagaaagcacagcctgcaagaccacctccgccagcccagcccggagaaatcggagaagctatagccaaatacaacttcaacgcagacacaaatgtggagctgtcactgagaaagggagatagagttattcttcttaaaagagttgatcaaaactggtatgaaggtaaaatcccaggaaccaacagacaaggcatcttccctgtttcctatgtggaggtcgtcaagaagaacacaaaaggtgctgaggactaccctgaccctccaataccccacagctattctagtgataggattcacagcttgagctcaaataagccacagcgtcctgtgtttactcatgaaaatattcaaggtgggggggaaccgtttcaggctctgtataactatactcccaggaatgaagatgagctggagctcagagaaagtgatgtcattgatgtcatggaaaagtgtgatgacggctggtttgtggggacctcaagaagaaccaaattctttggtactttccccggaaactacgtcaagaggctgtgaattgcgctccctccttctgtagaggccgcctgccagccatgcacctgcgtcaacgcgcctgaaacaccccgcgggcctcccgttgtcatgccttacggtttccaatgcgccgtcaccatctccacctgccaccaaaccaccagcagagtagccgccgctgctgtgagcctggggacgacatggcaggctggtccccctccgtgaaagtgtggattcctacttcctgctctaagctttgacacgtcaaaatgtgggatcagaaagaaaaaaatcatgatatttaaaaatggtcaaatatttgaggcaaaaaaaaaaaaaaaaa

SEQ ID NO: 184828 - DNA, 4622 bp, Homo sapiens
  Payload ID: 16400
  Gene Symbol: SORBS2
  Gene Name: sorbin and SH3 domain containing 2
  Uniprot ID: O94875
  ENST ID: ENST00000355634
  CDS Start-End: 715-4317
ttttattacgtctctccttgtggattacgtagaactttggaaaattaaacattagacatcttcatagaaaatcatgtcactgatttttaaagccagctcaatttaacctgccactgattccctaaccagctcttctctgactgtatcccgagggaaaatgtattgaacgcagcagaaggttaaggcagaggagttcggctagaccgggtagcagccaatcagatggggagggtccaaggatctgatgcctccaggcgagcagcgccaagctgagctggttagtctccttttattgtggatgaacaccacgtacatgccgtaaatgctccctaggctggctgcggctacaaggcagacccgggagctgagaatagaggaatacctgcccaagcaactcattctgcacagcagccgacaagacagcgattttcctgtgctggaatgtgcccatccaaagccaaccaatttgttggaaaatcagtcaaaatctaattttgatgttctgcaagttccctgggggccatgaagcacctgacacttggattggacttaatcttaaacctctggagttcaagaccttttaaaaagggctaaataaacaatctctacatgtaaaaggccactgactcctacttcctctgtatagagcaactgttgaactcagctgcctgtaggaaaactgaagactttaataacaaactctccaaggtgaaaatgaacacagatagcggtgggtgtgctcgcaaacgtgccgccatgtctgttacgctaacatctgtgaagagagtgcaaagttctccaaacctattggctgcagggcgtgattctcagtcaccagactcagcttggagatcttacaatgatggcaatcaggagacactgaacggagatgctacatattcctctcttgcagcaaaaggttttagaagcgttcgaccaaacctacaagataaaagatcaccaactcagagccagataacagtgaatggaaactcaggaggtgccgtgagtcccatgagttactatcagaggccgttttccccctcggcatattctctcccagcctcactcaactccagcattgtcatgcagcacggcacatccctcgattccacagacacatatccccagcatgcgcagtctctggatggcaccaccagcagctctatccccctgtaccgatcctcagaggaagagaagagagtgacagtcatcaaagccccgcattacccagggatcgggcccgtggatgaatccggaatccccacagcaattagaacgacagtcgaccggcccaaggactggtacaagacgatgtttaagcaaattcacatggtgcacaagccggatgatgacacagacatgtataatactccttatacatacaatgcaggtctgtacaacccaccctacagtgctcagtcacaccctgctgcaaagacccaaacctacagacctctttccaaaagccactccgacaacagccccaatgcctttaaggatgcgtcctccccagtgcctcccccacatgttccacctccagtcccgccgcttcgaccaagagatcggtcttcaacagaaaagcatgactgggatcctccagacagaaaagtggacacaagaaaatttcggtctgagccaaggagtatttttgaatatgaacctggcaagtcatcaattcttcagcatgaaagaccagcctccttgtatcagtcctctatagacagaagcctggaaagacccatgagttctgcaagcatggccagtgacttcaggaagcggaggaagagcgagcctgcagtgggtccaccacggggcttgggagatcaaagtgcgagcaggactagcccaggccgagtggacctcccaggatcaagcaccactcttacaaagtctttcactagctcttctccttcttccccatcaagagcaaaaggtggggatgatagcaaaatatgtccatccctttgcagttactcagggctcaacggcaacccctccagtgagttagattactgtagcacttacagacagcacttggatgtccctcgggactcaccaagagccattagtttcaagaacggctggcaaatggcccggcaaaacgcagaaatctggagcagcacggaagaaaccgtctctcccaaaatcaaatcccggagctgtgacgatctcctaaacgacgactgcgatagcttcccggacccgaaagtcaagtcggaaagcatgggctccctgttatgtgaggaggactccaaggagagctgccccatggcgtgggggtccccctacgtcccggaggttcgcagtaacggcagatcaaggatcagacacaggtcagcccgcaacgccccggggttcctgaagatgtacaagaaaatgcaccgcatcaaccgcaaggacctgatgaactccgaggtgatctgctccgtgaagtccaggattctgcagtacgagagcgagcagcagcacaaggacctgctgcgcgcctggagccagtgctccacggaggaggtgccccgggacatggtgcccacacgcatctccgaattcgaaaagctgatccagaagtccaaatccatgccaaatttaggggatgacatgctgtctcccgtaaccctagaaccaccgcaaaatggcctatgtcccaagaggcggttttccattgagtatttgctggaggaagaaaatcaaagcggcccccccgctcggggccggcgaggctgccagtctaacgccctggtgcccattcacattgaagtcaccagcgatgagcagccccgagcacacgtggagttttccgacagcgaccaggacggggttgtgtccgaccacagtgactacattcacctagaggggtcatccttctgcagtgaaagtgactttgatcacttttccttcacatcctccgaaagcttttacggatccagccaccaccaccaccatcaccaccaccaccaccaccgccacctcatcagctcctgcaaaggcaggtgcccggcctcctacactcgatttaccacaatgttaaaacacgaaagagccagacacgaaaacaccgaggagcccagaaggcaagaaatggaccctggcctttctaaacttgcttttctagtcagtcctgtgcctttccggaggaaaaaaaattcggctcctaagaaacagactgaaaaggcaaaatgtaaagcatctgtgtttgaggctctggactctgcccttaaagacatctgtgaccaaattaaagctgaaaagaaaagggggagcttgccggacaacagcatcctgcaccgcctcatcagtgagctgctgccagatgttcccgagaggaactcatccctgagagcgctgaggaggagccccctgcaccagcctctccacccactgcctcccgatggtgctattcattgtccaccctaccagaatgactgcgggagaatgccccgcagtgcctctttccaagacgtggacacagccaacagcagctgccaccaccaagaccgtggcggtgcactccaagaccgtgagtcccctagaagttactcatccactttgactgacatggggagaagtgcaccaagggaaagaagaggaactccagaaaaagagaaattgcctgcaaaagctgtttatgattttaaggctcagacatctaaggagttgtcatttaagaaaggagatactgtctacatcctcaggaaaattgatcaaaattggtatgagggagaacaccacgggagagtgggcatcttcccgatctcatacgtagagaaactcacacctcctgagaaagcacagcctgcaagaccacctccgccagcccagcccggagaaatcggagaagctatagccaaatacaacttcaacgcagacacaaatgtggagctgtcactgagaaagggagatagagttattcttcttaaaagagttgatcaaaactggtatgaaggtaaaatcccaggaaccaacagacaaggcatcttccctgtttcctatgtggaggtcgtcaagaagaacacaaaaggtgctgaggactaccctgaccctccaataccccacagctattctagtgataggattcacagcttgagctcaaataagccacagcgtcctgtgtttactcatgaaaatattcaaggtgggggggaaccgtttcaggctctgtataactatactcccaggaatgaagatgagctggagctcagagaaagtgatgtcattgatgtcatggaaaagtgtgatgacggctggtttgtggggacctcaagaagaaccaaattctttggtactttccccggaaactacgtcaagaggctgtgaattgcgctccctccttctgtagaggccgcctgccagccatgcacctgcgtcaacgcgcctgaaacaccccgcgggcctcccgttgtcatgccttacggtttccaatgcgccgtcaccatctccacctgccaccaaaccaccagcagagtagccgccgctgctgtgagcctggggacgacatggcaggctggtccccctccgtgaaagtgtggattcctacttcctgctctaagctttgacacgtcaaaatgtgggatcagaaagaaaaaaatcatgatatttaaaaatggtcaaatatttgaggc

SEQ ID NO: 184829 - DNA, 842 bp, Homo sapiens
  Payload ID: 16400
  Gene Symbol: SORBS2
  Gene Name: sorbin and SH3 domain containing 2
  ENST ID: ENST00000393523
  CDS Start-End: 815-842
ggaaaacagtgtggcatattctgctgagcttcgccctggaagaagcctcttttatacatctcttcagggaagagagaagcaatgggcatgttagtatacaatgatcacagccacgcaggcctgcaagctgccttttggacaggctgttgactgccgttccaattagctgattggagaatgtggaatgcagagtgataatgctgcatatctgctatcaggcagcagcaaaggtttttgtcttgggaaggcaagctttccctgcaatattatctcagcagctccctagctgcttaccctgaaaacgagggatccaaacggagggtgttgcactctgctaacgctggtcctgtgcgtggctgtggcatatgagcggcaggtctgaaaaagcaggtgtgtgctgggacgggcactggactggaacgcaggcggacgctctcgggtttacctgcttcctgttaacagattgtgggctcccagggcatatgtctgcacgctgaggccgaggcggagaaggggcttcctgagcgtcccagtacactgacagagacacttggattggacttaatcttaaacctctggagttcaagaccttttaaaaagggctaaataaacaatctctacatgtaaaaggccactgactcctacttcctctgtatagagcaactgttgaactcagctgcctgtagggcgtgattctcagtcaccagactcagcaaaaggttttagaagcgttcgaccaaacctacaagataaaagatcaccaactcagagccagataacagtgaatggaaactcaggaggtgccgtgagtcccatgagttactatcagaggccgttttccc

SEQ ID NO: 184830 - DNA, 3043 bp, Homo sapiens
  Payload ID: 16400
  Gene Symbol: SORBS2
  Gene Name: sorbin and SH3 domain containing 2
  Uniprot ID: O94875
  ENST ID: ENST00000393528
  CDS Start-End: 739-2739
cattttacttatggaaaacagtgtggcatattctgctgagcttcgccctggaagaagcctcttttatacatctcttcagggaagagagaagcaatgggcatgttagtatacaatgatcacagccacgcaggcctgcaagctgccttttggacaggctgttgactgccgttccaattagctgattggagaatgtggaatgcagagtgataatgctgcatatctgctatcaggcagcagcaaaggtttttgtcttgggaaggcaagctttccctgcaatattatctcagcagctccctagctgcttaccctgaaaacgagggatccaaacggagggtgttgcactctgctaacgctggtcctgtgcgtggctgtggcatatgagcggcaggtctgaaaaagcaggtgtgtgctgggacgggcactggactggaacgcaggcggacgctctcgggtttacctgcttcctgttaacagattgtgggctcccagggcatatgtctgcacgctgaggccgaggcggagaaggggcttcctgagcgtcccagtacactgacagagacacttggattggacttaatcttaaacctctggagttcaagaccttttaaaaagggctaaataaacaatctctacatgtaaaaggccactgactcctacttcctctgtatagagcaactgttgaactcagctgcctgtaggaaaactgaagactttaataacaaactctccaaggtgaaaatgaacacagggcgtgattctcagtcaccagactcagcaaaaggttttagaagcgttcgaccaaacctacaagataaaagatcaccaactcagagccagataacagtgaatggaaactcaggaggtgccgtgagtcccatgagttactatcagaggccgttttccccctcggcatattctctcccagcctcactcaactccagcattgtcatgcagcacggcacatccctcgattccacagacacatatccccagcatgcgcagtctctggatggcaccaccagcagctctatccccctgtaccgatcctcagaggaagagaagagagtgacagtcatcaaagccccgcattacccagggatcgggcccgtggatgaatccggaatccccacagcaattagaacgacagtcgaccggcccaaggactggtacaagacgatgtttaagcaaattcacatggtgcacaagccggatgatgacacagacatgtataatactccttatacatacaatgcaggtctgtacaacccaccctacagtgctcagtcacaccctgctgcaaagacccaaacctacagacctctttccaaaagccactccgacaacagccccaatgcctttaaggatgcgtcctccccagtgcctcccccacatgttccacctccagtcccgccgcttcgaccaagagatcggtcttcaacagaaaagcatgactgggatcctccagacagaaaagtggacacaagaaaatttcggtctgagccaaggagtatttttgaatatgaacctggcaagtcatcaattcttcagcatgaaagaccaactgatcgcataaatccagatgacatagatttagaaaatgagccctggtataaattcttttcagaactggagtttggacgcccgcctcctaaaaagcctctggactatgttcaagatcattcttctggtgttttcaatgaggcctccttgtatcagtcctctatagacagaagcctggaaagacccatgagttctgcaagcatggccagtgacttcaggaagcggaggaagagcgagcctgcagtgggtccaccacggggcttgggagatcaaagtgcgagcaggactagcccaggccgagtggacctcccaggatcaagcaccactcttacaaagtctttcactagctcttctccttcttccccatcaagagcaaaagaccgtgagtcccctagaagttactcatccactttgactgacatggggagaagtgcaccaagggaaagaagaggaactccagaaaaagagaaattgcctgcaaaagctgtttatgattttaaggctcagacatctaaggagttgtcatttaagaaaggagatactgtctacatcctcaggaaaattgatcaaaattggtatgagggagaacaccacgggagagtgggcatcttcccgatctcatacgtagagaaactcacacctcctgagaaagcacagcctgcaagaccacctccgccagcccagcccggagaaatcggagaagctatagccaaatacaacttcaacgcagacacaaatgtggagctgtcactgagaaagggagatagagttattcttcttaaaagagttgatcaaaactggtatgaaggtaaaatcccaggaaccaacagacaaggcatcttccctgtttcctatgtggaggtcgtcaagaagaacacaaaaggtgctgaggactaccctgaccctccaataccccacagctattctagtgataggattcacagcttgagctcaaataagccacagcgtcctgtgtttactcatgaaaatattcaaggtgggggggaaccgtttcaggctctgtataactatactcccaggaatgaagatgagctggagctcagagaaagtgatgtcattgatgtcatggaaaagtgtgatgacggctggtttgtggggacctcaagaagaaccaaattctttggtactttccccggaaactacgtcaagaggctgtgaattgcgctccctccttctgtagaggccgcctgccagccatgcacctgcgtcaacgcgcctgaaacaccccgcgggcctcccgttgtcatgccttacggtttccaatgcgccgtcaccatctccacctgccaccaaaccaccagcagagtagccgccgctgctgtgagcctggggacgacatggcaggctggtccccctccgtgaaagtgtggattcctacttcctgctctaagctttgacacgtcaaaatgtgggatcagaaagaaaaaaatcatgatatttaaaaatggtcaaatatttgagg

SEQ ID NO: 184831 - DNA, 543 bp, Homo sapiens
  Payload ID: 16400
  Gene Symbol: SORBS2
  Gene Name: sorbin and SH3 domain containing 2
  ENST ID: ENST00000456060
  CDS Start-End: 498-543
agatagaatatgactggtgatagagtcctgaaaaagaagaaaagcctgggggttctgcagaagatttacgttgttcatggcattaatcatggtagattcccagaggaggtgaaatgttatggacgggtggaatgtgatccattttactgaggaagtaaaactattcttgccttgaagattgtgggctcccagggcatatgtctgcacgctgaggccgaggcggagaaggggcttcctgagcgtcccagtacactgacagagacacttggattggacttaatcttaaacctctggagttcaagaccttttaaaaagggctaaataaacaatctctacatgtaaaaggccactgactcctacttcctctgtatagagcaactgttgaactcagctgcctgtagagcgagaataggacagactcgtataccattctgatctgggtgcatttcttcagaaggaaaactgaagactttaataacaaactctccaaggtgaaaatgaacacagatagcggtgggtgtgctcgcaaacgtgccgccatgt

SEQ ID NO: 184832 - DNA, 871 bp, Homo sapiens
  Payload ID: 16400
  Gene Symbol: SORBS2
  Gene Name: sorbin and SH3 domain containing 2
  ENST ID: ENST00000438278
  CDS Start-End: 1-871
ctcagaggaagagaagagagtgacagtcatcaaagccccgcattacccagggatcgggcccgtggatgaatccggaatccccacagcaattagaacgacagtcgaccggcccaaggactggtacaagacgatgtttaagcaaattcacatggtgcacaagccggatgatgacacagacatgtataatactccttatacatacaatgcaggtctgtacaacccaccctacagtgctcagtcacaccctgctgcaaagacccaaacctacagacctctttccaaaagccactccgacaacagccccaatgcctttaaggatgcgtcctccccagtgcctcccccacatgttccacctccagtcccgccgcttcgaccaagagatcggtcttcaacagaaaagcatgactgggatcctccagacagaaaagtggacacaagaaaatttcggtctgagccaaggagtatttttgaatatgaacctggcaagtcatcaattcttcagcatgaaagaccagcctccttgtatcagtcctctatagacagaagcctggaaagacccatgagttctgcaagcatggccagtgacttcaggaagcggaggaagagcgagcctgcagtgggtccaccacggggcttgggagatcaaagtgcgagcaggactagcccaggccgagtggacctcccaggatcaagcaccactcttacaaagtctttcactagctcttctccttcttccccatcaagagcaaaagaccgtgagtcccctagaagttactcatccactttgactgacatggggagaagtgcaccaagggaaagaagaggaactccagaaaaagagaaattgcctgcaaaagctgtttatgatttt

SEQ ID NO: 184833 - DNA, 534 bp, Homo sapiens
  Payload ID: 16400
  Gene Symbol: SORBS2
  Gene Name: sorbin and SH3 domain containing 2
  ENST ID: ENST00000429056
  CDS Start-End: 323-534
ctgttaacagattgtgggctcccagggcatatgtctgcacgctgaggccgaggcggagaaggggcttcctgagcgtcccagtacactgacagagacacttggattggacttaatcttaaacctctggagttcaagaccttttaaaaagggctaaataaacaatctctacatgtaaaaggccactgactcctacttcctctgtatagagcaactgttgaactcagctgcctgtagagcgagaataggacagactcgtataccattctgatctgggtgcatttcttcagaagatagcggtgggtgtgctcgcaaacgtgccgccatgtctgttacgctaacatctgtgaagagagtgcaaagttctccaaacctattggctgcagggcgtgattctcagtcaccagactcagcttggagatcttacaatgatggcaatcaggagacactgaacggagatgctacatattcctctcttgcagcaaaaggttttagaagcgttcgaccaaacctacaagataaaagatcaccaactca

SEQ ID NO: 184834 - DNA, 759 bp, Homo sapiens
  Payload ID: 16400
  Gene Symbol: SORBS2
  Gene Name: sorbin and SH3 domain containing 2
  ENST ID: ENST00000445625
  CDS Start-End: 1-759
agcaaattcacatggtgcacaagccggatgatgacacagacatgtataatactccttatacatacaatgcaggtctgtacaacccaccctacagtgctcagtcacaccctgctgcaaagacccaaacctacagacctctttccaaaagccactccgacaacagccccaatgcctttaaggatgcgtcctccccagtgcctcccccacatgttccacctccagtcccgccgcttcgaccaagagatcggtcttcaacagaaaagcatgactgggatcctccagacagaaaagtggacacaagaaaatttcggtctgagccaaggagtatttttgaatatgaacctggcaagtcatcaattcttcagcatgaaagaccaccccctctcccaacaactccgacacctgttccaagggaacctggccggaagcctctttctagctcccgactcggagaagtcactggtagcccctcccctccgccccggagtggcgcccccacaccaagctcgcgcgccccggctctgtctcccacccggtcctctatagacagaagcctggaaagacccatgagttctgcaagcatggccagtgacttcaggaagcggaggaagagcgagcctgcagtgggtccaccacggggcttgggagatcaaagtgcgagcaggactagcccaggccgagtggacctcccaggatcaagcaccactcttacaaagtctttcactagctcttctccttcttccccatcaagagcaaaag

SEQ ID NO: 184835 - DNA, 574 bp, Homo sapiens
  Payload ID: 16400
  Gene Symbol: SORBS2
  Gene Name: sorbin and SH3 domain containing 2
  ENST ID: ENST00000421420
  CDS Start-End: 29-574
ctttaataacaaactctccaaggtgaaaatgaacacagatagcggtgggtgtgctcgcaaacgtgccgccatgtctgttacgctaacatctgtgaagagagtgcaaagttctccaaacctattggctgcagggcgtgattctcagtcaccagactcagcttggagatcttacaatgatggcaatcaggagacactgaacggagatgctacatattcctctcttgcagcaaaaggttttagaagcgttcgaccaaacctacaagataaaagatcaccaactcaggcaccccctccaccagaaagaaaagagagctttcatagctctttgataaccagtcacacaaagggtgtcattttagaccagttagtaactaacacacaaattccctccagtacagagtactttgctaacaaaaaacctcttcagggaactatgtattccaatgaagattcgagacagacaattgtatattctgaagaatctaacacaaccatgtcatatacacaaaaaatcactaatccactaccagcagcttccagcacggatcctgcaccattcgctaacatcaacacc

SEQ ID NO: 184836 - DNA, 3381 bp, Homo sapiens
  Payload ID: 16400
  Gene Symbol: SORBS2
  Gene Name: sorbin and SH3 domain containing 2
  Uniprot ID: O94875
  ENST ID: ENST00000437304
  CDS Start-End: 585-3059
agctttcaaaaatagcatagttgatgaaactggaaatttaggtgcgggctcttttaagaaatcatttgtcttcagtcttaagaatagactgacaacagatactgctaccagagggctctcaactatttcttaagaccccctaggaaatatcagaagaaaagcctccttctcaataaagcataagtaggacatctcgttttcagtgaatcagacacttggattggacttaatcttaaacctctggagttcaagaccttttaaaaagggctaaataaacaatctctacatgtaaaaggccactgactcctacttcctctgtatagagcaactgttgaactcagctgcctgtagggcgtgattctcagtcaccagactcagcaaaaggttttagaagcgttcgaccaaacctacaagataaaagatcaccaactcaggcaccccctccaccagaaagaaaagagagctttcatagctctttgataaccagtcacacaaagggtgtcattttagaccagttagtaactaacacacaaattccctccagtacagagtactttgctaacaaaaaacctcttcagggaactatgtattccaatgaagattcgagacagacaattgtatattctgaagaatctaacacaaccatgtcatatacacaaaaaatcactaatccactaccagcagcttccagcacggatcctgcaccattcgctaacatcaacaccccagttctacaagaggactacaggcaagattctcaaactcggaggatttctaccttgaaactaacccataaccaggatctaggaagtagcagccccattagtactccacagttctccaaatctgtcgaagtaccgtcatttctcaaaaggccccgctcactgacccctaatccagtgcctgagacacacacagcatctctttccattcagatagctcccctttcaggacaggatcttgaaagccacaaacagctacctgagctttctccagagactgcaaagatacctcttcagcaagagagacaaaaatctgcagttgcagcggcctctcagtcctcagactgcagagtgagccagataacagtgaatggaaactcaggaggtgccgtgagtcccatgagttactatcagaggccgttttccccctcggcatattctctcccagcctcactcaactccagcattgtcatgcagcacggcacatccctcgattccacagacacatatccccagcatgcgcagtctctggatggcaccaccagcagctctatccccctgtaccgatcctcagaggaagagaagagagtgacagtcatcaaagccccgcattacccagggatcgggcccgtggatgaatccggaatccccacagcaattagaacgacagtcgaccggcccaaggactggtacaagacgatgtttaagcaaattcacatggtgcacaagccggatgatgacacagacatgtataatactccttatacatacaatgcaggtctgtacaacccaccctacagtgctcagtcacaccctgctgcaaagacccaaacctacagacctctttccaaaagccactccgacaacagccccaatgcctttaaggatgcgtcctccccagtgcctcccccacatgttccacctccagtcccgccgcttcgaccaagagatcggtcttcaacagaaaagcatgactgggatcctccagacagaaaagtggacacaagaaaatttcggtctgagccaaggagtatttttgaatatgaacctggcaagtcatcaattcttcagcatgaaagaccaccccctctcccaacaactccgacacctgttccaagggaacctggccggaagcctctttctagctcccgactcggagaagtcactggtagcccctcccctccgccccggagtggcgcccccacaccaagctcgcgcgccccggctctgtctcccacccggcctcctaaaaagcctctggactatgttcaagatcattcttctggtgttttcaatgaggcctccttgtatcagtcctctatagacagaagcctggaaagacccatgagttctgcaagcatggccagtgacttcaggaagcggaggaagagcgagcctgcagtgggtccaccacggggcttgggagatcaaagtgcgagcaggactagcccaggccgagtggacctcccaggatcaagcaccactcttacaaagtctttcactagctcttctccttcttccccatcaagagcaaaagaccgtgagtcccctagaagttactcatccactttgactgacatggggagaagtgcaccaagggaaagaagaggaactccagaaaaagagaaattgcctgcaaaagctgtttatgattttaaggctcagacatctaaggagttgtcatttaagaaaggagatactgtctacatcctcaggaaaattgatcaaaattggtatgagggagaacaccacgggagagtgggcatcttcccgatctcatacgtagagaaactcacacctcctgagaaagcacagcctgcaagaccacctccgccagcccagcccggagaaatcggagaagctatagccaaatacaacttcaacgcagacacaaatgtggagctgtcactgagaaagggagatagagttattcttcttaaaagagttgatcaaaactggtatgaaggtaaaatcccaggaaccaacagacaaggcatcttccctgtttcctatgtggaggtcgtcaagaagaacacaaaaggtgctgaggactaccctgaccctccaataccccacagctattctagtgataggattcacagcttgagctcaaataagccacagcgtcctgtgtttactcatgaaaatattcaaggtgggggggaaccgtttcaggctctgtataactatactcccaggaatgaagatgagctggagctcagagaaagtgatgtcattgatgtcatggaaaagtgtgatgacggctggtttgtggggacctcaagaagaaccaaattctttggtactttccccggaaactacgtcaagaggctgtgaattgcgctccctccttctgtagaggccgcctgccagccatgcacctgcgtcaacgcgcctgaaacaccccgcgggcctcccgttgtcatgccttacggtttccaatgcgccgtcaccatctccacctgccaccaaaccaccagcagagtagccgccgctgctgtgagcctggggacgacatggcaggctggtccccctccgtgaaagtgtggattcctacttcctgctctaagctttgacacgtcaaaatgtgggatcagaaagaaaaaaatcatgatatttaaaaatggtcaaatatttgaggcaaaaaaaaaaaaaaaaa

SEQ ID NO: 184837 - DNA, 611 bp, Homo sapiens
  Payload ID: 16400
  Gene Symbol: SORBS2
  Gene Name: sorbin and SH3 domain containing 2
  ENST ID: ENST00000444781
  CDS Start-End: 312-611
gtaaatgctccctaggctggctgcggctacaaggcagacccgggagctgagaatagaggaatacctgcccaagcaactcattctgcacagcagccgacaagacagcgattttcctgtgctggaatgtgcccatccaaagacacttggattggacttaatcttaaacctctggagttcaagaccttttaaaaagggctaaataaacaatctctacatgtaaaaggccactgactcctacttcctctgtatagagcaactgttgaactcagctgcctgtagatagcggtgggtgtgctcgcaaacgtgccgccatgtctgttacgctaacatctgtgaagagagtgcaaagttctccaaacctattggctgcagggcgtgattctcagtcaccagactcagcaaaaggttttagaagcgttcgaccaaacctacaagataaaagatcaccaactcagagccagataacagtgaatggaaactcaggaggtgccgtgagtcccatgagttactatcagaggccgttttccccctcggcatattctctcccagcctcactcaactccagcattgtcatgcagcacggcacatccctcgattccacagacacatat

SEQ ID NO: 184838 - DNA, 3049 bp, Homo sapiens
  Payload ID: 16400
  Gene Symbol: SORBS2
  Gene Name: sorbin and SH3 domain containing 2
  Uniprot ID: O94875
  ENST ID: ENST00000449407
  CDS Start-End: 794-2728
gagctgagaggaccagccattttacttatggaaaacagtgtggcatattctgctgagcttcgccctggaagaagcctcttttatacatctcttcagggaagagagaagcaatgggcatgttagtatacaatgatcacagccacgcaggcctgcaagctgccttttggacaggctgttgactgccgttccaattagctgattggagaatgtggaatgcagagtgataatgctgcatatctgctatcaggcagcagcaaaggtttttgtcttgggaaggcaagctttccctgcaatattatctcagcagctccctagctgcttaccctgaaaacgagggatccaaacggagggtgttgcactctgctaacgctggtcctgtgcgtggctgtggcatatgagcggcaggtctgaaaaagcaggtgtgtgctgggacgggcactggactggaacgcaggcggacgctctcgggtttacctgcttcctgttaacagattgtgggctcccagggcatatgtctgcacgctgaggccgaggcggagaaggggcttcctgagcgtcccagtacactgacagagacacttggattggacttaatcttaaacctctggagttcaagaccttttaaaaagggctaaataaacaatctctacatgtaaaaggccactgactcctacttcctctgtatagagcaactgttgaactcagctgcctgtaggaaaactgaagactttaataacaaactctccaaggtgaaaatgaacacagcggtgggtgtgctcgcaaacgtgccgccatgtctgttacgctaacatctgtgaagagagtgcaaagttctccaaacctattggctgcagggcgtgattctcagtcaccagactcagcttggagatcttacaatgatggcaatcaggagacactgaacggagatgctacatattcctctcttgcagcaaaaggttttagaagcgttcgaccaaacctacaagataaaagatcaccaactcagagccagataacagtgaatggaaactcaggaggtgccgtgagtcccatgagttactatcagaggccgttttccccctcggcatattctctcccagcctcactcaactccagcattgtcatgcagcacggcacatccctcgattccacagacacatatccccagcatgcgcagtctctggatggcaccaccagcagctctatccccctgtaccgatcctcagaggaagagaagagagtgacagtcatcaaagccccgcattacccagggatcgggcccgtggatgaatccggaatccccacagcaattagaacgacagtcgaccggcccaaggactggtacaagacgatgtttaagcaaattcacatggtgcacaagccgggtctgtacaacccaccctacagtgctcagtcacaccctgctgcaaagacccaaacctacagacctctttccaaaagccactccgacaacagccccaatgcctttaaggatgcgtcctccccagtgcctcccccacatgttccacctccagtcccgccgcttcgaccaagagatcggtcttcaacagaaaagcatgactgggatcctccagacagaaaagtggacacaagaaaatttcggtctgagccaaggagtatttttgaatatgaacctggcaagtcatcaattcttcagcatgaaagaccagcctccttgtatcagtcctctatagacagaagcctggaaagacccatgagttctgcaagcatggccagtgacttcaggaagcggaggaagagcgagcctgcagtgggtccaccacggggcttgggagatcaaagtgcgagcaggactagcccaggccgagtggacctcccaggatcaagcaccactcttacaaagtctttcactagctcttctccttcttccccatcaagagcaaaagaccgtgagtcccctagaagttactcatccactttgactgacatggggagaagtgcaccaagggaaagaagaggaactccagaaaaagagaaattgcctgcaaaagctgtttatgattttaaggctcagacatctaaggagttgtcatttaagaaaggagatactgtctacatcctcaggaaaattgatcaaaattggtatgagggagaacaccacgggagagtgggcatcttcccgatctcatacgtagagaaactcacacctcctgagaaagcacagcctgcaagaccacctccgccagcccagcccggagaaatcggagaagctatagccaaatacaacttcaacgcagacacaaatgtggagctgtcactgagaaagggagatagagttattcttcttaaaagagttgatcaaaactggtatgaaggtaaaatcccaggaaccaacagacaaggcatcttccctgtttcctatgtggaggtcgtcaagaagaacacaaaaggtgctgaggactaccctgaccctccaataccccacagctattctagtgataggattcacagcttgagctcaaataagccacagcgtcctgtgtttactcatgaaaatattcaaggtgggggggaaccgtttcaggctctgtataactatactcccaggaatgaagatgagctggagctcagagaaagtgatgtcattgatgtcatggaaaagtgtgatgacggctggtttgtggggacctcaagaagaaccaaattctttggtactttccccggaaactacgtcaagaggctgtgaattgcgctccctccttctgtagaggccgcctgccagccatgcacctgcgtcaacgcgcctgaaacaccccgcgggcctcccgttgtcatgccttacggtttccaatgcgccgtcaccatctccacctgccaccaaaccaccagcagagtagccgccgctgctgtgagcctggggacgacatggcaggctggtccccctccgtgaaagtgtggattcctacttcctgctctaagctttgacacgtcaaaatgtgggatcagaaagaaaaaaatcatgatatttaaaaatggtcaaatatttgaggcaaaaaaaaaaaaaaaa

SEQ ID NO: 184839 - DNA, 5529 bp, Homo sapiens
  Payload ID: 16400
  Gene Symbol: SORBS2
  Gene Name: sorbin and SH3 domain containing 2
  Uniprot ID: O94875
  ENST ID: ENST00000418609
  CDS Start-End: 332-3346
gatttgggagttgggaggtgagatgattggagtgaagagagttaatgtcatggaaaggaaaagctgtctgaagaaaaatacacattttaatgtccctcttcagccgtgcctgctgagagctctcctgggatgataagtgaaagtgtttggatttttttttaagttttaaaactctgccaaagcattgctcagtgtatctgggcagccccttccggcaaaacgcagcagtagcagaggcagcttctgagagcctgggcaggcagcagctggctgaccaagtccactggaagagaaggcttgtgccagccgggagaaggaagccggggacaggatgaaagcaacaacacctttgcagacagtcgaccggcccaaggactggtacaagacgatgtttaagcaaattcacatggtgcacaagccgggtctgtacaacccaccctacagtgctcagtcacaccctgctgcaaagacccaaacctacagacctctttccaaaagccactccgacaacagccccaatgcctttaaggatgcgtcctccccagtgcctcccccacatgttccacctccagtcccgccgcttcgaccaagagatcggtcttcaacagaaaagcatgactgggatcctccagacagaaaagtggacacaagaaaatttcggtctgagccaaggagtatttttgaatatgaacctggcaagtcatcaattcttcagcatgaaagaccagcctccttgtatcagtcctctatagacagaagcctggaaagacccatgagttctgcaagcatggccagtgacttcaggaagcggaggaagagcgagcctgcagtgggtccaccacggggcttgggagatcaaagtgcgagcaggactagcccaggccgagtggacctcccaggatcaagcaccactcttacaaagtctttcactagctcttctccttcttccccatcaagagcaaaaggtggggatgatagcaaaatatgtccatccctttgcagttactcagggctcaacggcaacccctccagtgagttagattactgtagcacttacagacagcacttggatgtccctcgggactcaccaagagccattagtttcaagaacggctggcaaatggcccggcaaaacgcagaaatctggagcagcacggaagaaaccgtctctcccaaaatcaaatcccggagctgtgacgatctcctaaacgacgactgcgatagcttcccggacccgaaagtcaagtcggaaagcatgggctccctgttatgtgaggaggactccaaggagagctgccccatggcgtgggggtccccctacgtcccggaggttcgcagtaacggcagatcaaggatcagacacaggtcagcccgcaacgccccggggttcctgaagatgtacaagaaaatgcaccgcatcaaccgcaaggacctgatgaactccgaggtgatctgctccgtgaagtccaggattctgcagtacgagagcgagcagcagcacaaggacctgctgcgcgcctggagccagtgctccacggaggaggtgccccgggacatggtgcccacacgcatctccgaattcgaaaagctgatccagaagtccaaatccatgccaaatttaggggatgacatgctgtctcccgtaaccctagaaccaccgcaaaatggcctatgtcccaagaggcggttttccattgagtatttgctggaggaagaaaatcaaagcggcccccccgctcggggccggcgaggctgccagtctaacgccctggtgcccattcacattgaagtcaccagcgatgagcagccccgagcacacgtggagttttccgacagcgaccaggacggggttgtgtccgaccacagtgactacattcacctagaggggtcatccttctgcagtgaaagtgactttgatcacttttccttcacatcctccgaaagcttttacggatccagccaccaccaccaccatcaccaccaccaccaccaccgccacctcatcagctcctgcaaaggcaggtgcccggcctcctacactcgatttaccacaatgttaaaacacgaaagagccagacacgaaaacaccgaggagcccagaaggcaagaaatggaccctggcctttctaaacttgcttttctagtcagtcctgtgcctttccggaggaaaaaaaattcggctcctaagaaacagactgaaaaggcaaaatgtaaagcatctgtgtttgaggctctggactctgcccttaaagacatctgtgaccaaattaaagctgaaaagaaaagggggagcttgccggacaacagcatcctgcaccgcctcatcagtgagctgctgccagatgttcccgagaggaactcatccctgagagcgctgaggaggagccccctgcaccagcctctccacccactgcctcccgatggtgctattcattgtccaccctaccagaatgactgcgggagaatgccccgcagtgcctctttccaagacgtggacacagccaacagcagctgccaccaccaagaccgtggcggtgcactccaagaccgtgagtcccctagaagttactcatccactttgactgacatggggagaagtgcaccaagggaaagaagaggaactccagaaaaagagaaattgcctgcaaaagctgtttatgattttaaggctcagacatctaaggagttgtcatttaagaaaggagatactgtctacatcctcaggaaaattgatcaaaattggtatgagggagaacaccacgggagagtgggcatcttcccgatctcatacgtagagaaactcacacctcctgagaaagcacagcctgcaagaccacctccgccagcccagcccggagaaatcggagaagctatagccaaatacaacttcaacgcagacacaaatgtggagctgtcactgagaaagggagatagagttattcttcttaaaagagttgatcaaaactggtatgaaggtaaaatcccaggaaccaacagacaaggcatcttccctgtttcctatgtggaggtcgtcaagaagaacacaaaaggtgctgaggactaccctgaccctccaataccccacagctattctagtgataggattcacagcttgagctcaaataagccacagcgtcctgtgtttactcatgaaaatattcaaggtgggggggaaccgtttcaggctctgtataactatactcccaggaatgaagatgagctggagctcagagaaagtgatgtcattgatgtcatggaaaagtgtgatgacggctggtttgtggggacctcaagaagaaccaaattctttggtactttccccggaaactacgtcaagaggctgtgaattgcgctccctccttctgtagaggccgcctgccagccatgcacctgcgtcaacgcgcctgaaacaccccgcgggcctcccgttgtcatgccttacggtttccaatgcgccgtcaccatctccacctgccaccaaaccaccagcagagtagccgccgctgctgtgagcctggggacgacatggcaggctggtccccctccgtgaaagtgtggattcctacttcctgctctaagctttgacacgtcaaaatgtgggatcagaaagaaaaaaatcatgatatttaaaaatggtcaaatatttgaggcaaaaaaaaaaaaaaaaagtgtctccaggaggctgtccagcctcgtggctccatttcaacatctccccccaggcgatgttctcccccaagacgaccagaaaattgtttattggggaatgctgtggtttgcattttcatattcttcgcttggcagtgtgtattcttttcacaagtttgcctagtgtcttggtttacacaatatgacaactgtaactgtactttagctattgtttgcctgcacatacatgttgtaatatgcacagtgattacaacctttaaagcaagaggaggcgagttaatttggatgagtgtgattttgctgattgaatgtgagttttcaaataggagtctttttctgcaatttgtttgcattttttagaagtgcaaacagtaagtaaataaaagccttcggtaataatcatgacaatacaagaggctgagctaggctacaggggaaaactattgtgttgtaaagttgcatcgctattttatattaaaatgtaatgatcagcatcatgaacaatgagctcttagtgttttatttatctgaaaaaatgtaagtaaaagcagtgttagtgagaggtgcaaagaattattctaacagacacctgaaagtatctgtaagcaatactagtaggtaagatttcactgtgtgtacacatacacatttgagattgtatgagaacatataatccatatgatatgttgtacattttatggaaatgtaatagaatctcacacattattttatagaaatagagtacagaagcatcacaagtattaaagttggttttagcaaggattaggattactacaattatttttactataataattatttttcttctatggaactcagaatcctggctacatttgaggacaggaatatgttgagcctgattttcctggtgtgtgtaaaatatttcctaggaataaattaggcactttttagaagcaatgttaaatcattcaggttttattttctgccctgaagcagaaatttaaaaaatgatattgggacctggaaggtttaatatggttcacagtgcctgaattacacctgctccgaaaactagctttgtatttcttatgactttgcataagaactgttcatctttggatcttgagcaccttacagataaaactttttatggcatctctttcatggacagtgatattgatcttttcacaatgtacgtagcctctagaattttgtacatatgtttgctctttttttgtacagactagttgttgagaaaacaggggcgtttcctaatttggtctttatcctgcgacaacactttcagcagactagcctctccttatctcacagatcacaagcacccctagatagtgtgattctgtcagatagcatttatgcaaaaatctatgaagttaaaagatcgtagaagccaaatgaaatgtacatatctactgactgatgacaagggaatttcattaggaagaaggtaaagaaacatcgttgagtagcctaccttgatttctgtcaagttcataaccagcttcatattttaaaggcttcaggtttgaaattaagtcaactgcatgcagctttgctgataaatgaataattctctttgatgccatttatgagaaaagacttcaatatctgttgcctgtcatatttaagaaaaattactgtttctactctctgtatctgattttaaaagaaaaaactattcatacctggcttccaggtaattgactttgaattcttacaagcaaaggtcattgtgtttttcttgaatagacatctaataaattttgcttggaagtatacttcagtttttcttcttgacatttatctttataaaaattgtgtattttattccaacttgttaaactaagagaaaatgca

SEQ ID NO: 184840 - DNA, 575 bp, Homo sapiens
  Payload ID: 16400
  Gene Symbol: SORBS2
  Gene Name: sorbin and SH3 domain containing 2
  ENST ID: ENST00000445115
  CDS Start-End: 372-575
attctttccctctctcatttgcctctctcttgctttttttccttcagacacttggattggacttaatcttaaacctctggagttcaagaccttttaaaaagggctaaataaacaatctctacatgtaaaaggccactgactcctacttcctctgtatagagcaactgttgaactcagctgcctgtagagcgagaataggacagactcgtataccattctgatctgggtgcatttcttcagaagggcgtgattctcagtcaccagactcagcaaaaggttttagaagcgttcgaccaaacctacaagataaaagatcaccaactcagagccagataacagtgaatggaaactcaggaggtgccgtgagtcccatgagttactatcagaggccgttttccccctcggcatattctctcccagcctcactcaactccagcattgtcatgcagcacggcacatccctcgattccacagacacatatccccagcatgcgcagtctctggatggcaccaccagcagctctatccccctgtaccgatcctcagaggaagagaagagagtgacagtcatcaaa

SEQ ID NO: 184841 - DNA, 573 bp, Homo sapiens
  Payload ID: 16400
  Gene Symbol: SORBS2
  Gene Name: sorbin and SH3 domain containing 2
  ENST ID: ENST00000457247
  CDS Start-End: 396-573
agaacagtagcaccacccagcagctgggattctttccctctctcatttgcctctctcttgctttttttccttcagacacttggattggacttaatcttaaacctctggagttcaagaccttttaaaaagggctaaataaacaatctctacatgtaaaaggccactgactcctacttcctctgtatagagcaactgttgaactcagctgcctgtaggtaaacacggtgttccagaatacagcaggagcatctgggcatttttgtggctggcgtgattctcagtcaccagactcagcaaaaggttttagaagcgttcgaccaaacctacaagataaaagatcaccaactcagagccagataacagtgaatggaaactcaggaggtgccgtgagtcccatgagttactatcagaggccgttttccccctcggcatattctctcccagcctcactcaactccagcattgtcatgcagcacggcacatccctcgattccacagacacatatccccagcatgcgcagtctctggatggcaccaccagcagctctatccccctgtaccgatcctcagagg

SEQ ID NO: 184842 - DNA, 546 bp, Homo sapiens
  Payload ID: 16400
  Gene Symbol: SORBS2
  Gene Name: sorbin and SH3 domain containing 2
  ENST ID: ENST00000445343
  CDS Start-End: 246-546
agcacaacaatcatttgttgagagcctactcaagactctgtacttgtccgtgacagtcactgggagcatagcctttctccaatgacatcgccctgaacatccactctaaaaatgcagggcgtgattctcagtcaccagactcagcaaaaggttttagaagcgttcgaccaaacctacaagataaaagatcaccaactcagagccagataacagtgaatggaaactcaggaggtgccgtgagtcccatgagttactatcagaggccgttttccccctcggcatattctctcccagcctcactcaactccagcattgtcatgcagcacggcacatccctcgattccacagacacatatccccagcatgcgcagtctctggatggcaccaccagcagctctatccccctgtaccgatcctcagaggaagagaagagagtgacagtcatcaaagccccgcattacccagggatcgggcccgtggatgaatccggaatccccacagcaattagaacgacagtcgaccggcccaaggactggtacaagacga

SEQ ID NO: 184843 - DNA, 873 bp, Homo sapiens
  Payload ID: 16400
  Gene Symbol: SORBS2
  Gene Name: sorbin and SH3 domain containing 2
  ENST ID: ENST00000451974
  CDS Start-End: 1-873
caaacctacagacctctttccaaaagccactccgacaacagccccaatgcctttaaggatgcgtcctccccagtgcctcccccacatgttccacctccagtcccgccgcttcgaccaagagatcggtcttcaacagaaaagcatgactgggatcctccagacagaaaagtggacacaagaaaatttcggtctgagccaaggagtatttttgaatatgaacctggcaagtcatcaattcttcagcatgaaagaccacctcctaaaaagcctctggactatgttcaagatcattcttctggtgttttcaatgaggcctccttgtatcagtcctctatagacagaagcctggaaagacccatgagttctgcaagcatggccagtgacttcaggaagcggaggaagagcgagcctgcagtgggtccaccacggggcttgggagatcaaagtgcgagcaggactagcccaggccgagtggacctcccaggatcaagcaccactcttacaaagtctttcactagctcttctccttcttccccatcaagagcaaaagaccgtgagtcccctagaagttactcatccactttgactgacatggggagaagtgcaccaagggaaagaagaggaactccagaaaaagagaaattgcctgcaaaagctgtttatgattttaaggctcagacatctaaggagttgtcatttaagaaaggagatactgtctacatcctcaggaaaattgatcaaaattggtatgagggagaacaccacgggagagtgggcatcttcccgatctcatacgtagagaaactcacacctcctgagaaagcacagcctgcaagaccacctccgccagcccagcccggagaaatcggagaa

SEQ ID NO: 184844 - DNA, 525 bp, Homo sapiens
  Payload ID: 16400
  Gene Symbol: SORBS2
  Gene Name: sorbin and SH3 domain containing 2
  ENST ID: ENST00000428330
  CDS Start-End: 271-525
ctgttaacagattgtgggctcccagggcatatgtctgcacgctgaggccgaggcggagaaggggcttcctgagcgtcccagtacactgacagagacacttggattggacttaatcttaaacctctggagttcaagaccttttaaaaagggctaaataaacaatctctacatgtaaaaggccactgactcctacttcctctgtatagagcaactgttgaactcagctgcctgaaaactgaagactttaataacaaactctccaaggtgaaaatgaacacagggcgtgattctcagtcaccagactcagcttggagatcttacaatgatggcaatcaggagacactgaacggagatgctacatattcctctcttgcagcaaaaggttttagaagcgttcgaccaaacctacaagataaaagatcaccaactcagcttggaaatcagaacttacctgccagtgtgttggaggtaaatgcttcacagacacacagacaaaccacaccagaagcttctcctccgtgccct

SEQ ID NO: 184845 - DNA, 590 bp, Homo sapiens
  Payload ID: 16400
  Gene Symbol: SORBS2
  Gene Name: sorbin and SH3 domain containing 2
  ENST ID: ENST00000414724
  CDS Start-End: 243-590
tttttttccttcagacacttggattggacttaatcttaaacctctggagttcaagaccttttaaaaagggctaaataaacaatctctacatgtaaaaggccactgactcctacttcctctgtatagagcaactgttgaactcagctgcctgtagagcgagaataggacagactcgtataccattctgatctgggtgcatttcttcagaagatagcggtgggtgtgctcgcaaacgtgccgccatgtctgttacgctaacatctgtgaagagagtgcaaagttctccaaacctattggctgcagggcgtgattctcagtcaccagactcagcttggagatcttacaatgatggcaatcaggagacactgaacggagatgctacatattcctctcttgcagcaaaaggttttagaagcgttcgaccaaacctacaagataaaagatcaccaactcagagccagataacagtgaatggaaactcaggaggtgccgtgagtcccatgagttactatcagaggccgttttccccctcggcatattctctcccagcctcactcaactccagcattgtcatgcagcacggcacatcc

SEQ ID NO: 184846 - DNA, 582 bp, Homo sapiens
  Payload ID: 16400
  Gene Symbol: SORBS2
  Gene Name: sorbin and SH3 domain containing 2
  ENST ID: ENST00000451701
  CDS Start-End: 229-582
gattctttccctctctcatttgcctctctcttgctttttttccttcagacacttggattggacttaatcttaaacctctggagttcaagaccttttaaaaagggctaaataaacaatctctacatgtaaaaggccactgactcctacttcctctgtatagagcaactgttgaactcagctgcctgtaggaaaactgaagactttaataacaaactctccaaggtgaaaatgaacacagatagcggtgggtgtgctcgcaaacgtgccgccatgtctgttacgctaacatctgtgaagagagtgcaaagttctccaaacctattggctgcagggcgtgattctcagtcaccagactcagcaaaaggttttagaagcgttcgaccaaacctacaagataaaagatcaccaactcagcttggaaatcagaacttacctgccagtgtgttggaggtaaatgcttcacagacacacagacaaaccacaccagaagcttctcctccgtgccctccttccgtggtacctttgaaccgagccactttctcaccaggcagtggcaccagctcagcatcactcagccttccg

SEQ ID NO: 184847 - DNA, 594 bp, Homo sapiens
  Payload ID: 16400
  Gene Symbol: SORBS2
  Gene Name: sorbin and SH3 domain containing 2
  ENST ID: ENST00000451958
  CDS Start-End: 267-594
agattgtgggctcccagggcatatgtctgcacgctgaggccgaggcggagaaggggcttcctgagcgtcccagtacactgacagagacacttggattggacttaatcttaaacctctggagttcaagaccttttaaaaagggctaaataaacaatctctacatgtaaaaggccactgactcctacttcctctgtatagagcaactgttgaactcagctgcctgtaggaaaactgaagactttaataacaaactctccaaggtgaaaatgaacacagggcgtgattctcagtcaccagactcagcttggagatcttacaatgatggcaatcaggagacactgaacggagatgctacatattcctctcttgcagcaaaaggttttagaagcgttcgaccaaacctacaagataaaagatcaccaactcagagccagataacagtgaatggaaactcaggaggtgccgtgagtcccatgagttactatcagaggccgttttccccctcggcatattctctcccagcctcactcaactccagcattgtcatgcagcacggcacatccctcgattccacagacacatatccccagcatg

SEQ ID NO: 184848 - DNA, 553 bp, Homo sapiens
  Payload ID: 16400
  Gene Symbol: SORBS2
  Gene Name: sorbin and SH3 domain containing 2
  ENST ID: ENST00000457934
  CDS Start-End: 266-553
aaatgctctcagaacagtagcaccacccagcagctgggattctttccctctctcatttgcctctctcttgctttttttccttcagacacttggattggacttaatcttaaacctctggagttcaagaccttttaaaaagggctaaataaacaatctctacatgtaaaaggccactgactcctacttcctctgtatagagcaactgttgaactcagctgcctgtaggaaaactgaagactttaataacaaactctccaaggtgaaaatgaacacagatagcggtgggtgtgctcgcaaacgtgccgccatgtctgttacgctaacatctgtgaagagagtgcaaagttctccaaacctattggctgcagggcgtgattctcagtcaccagactcagcttggagatcttacaatgatggcaatcaggagacactgaacggagatgctacatattcctctcttgcagcaaaaggttttagaagcgttcgaccaaacctacaagataaaagatcaccaactcagagccagataacagtgaatggaaactcaggaggt

SEQ ID NO: 184849 - DNA, 499 bp, Homo sapiens
  Payload ID: 16400
  Gene Symbol: SORBS2
  Gene Name: sorbin and SH3 domain containing 2
  ENST ID: ENST00000430503
  CDS Start-End: 143-499
gactcctacttcctctgtatagagcaactgttgaactcagctgcctagcgagaataggacagactcgtataccattctgatctgggtgcatttcttcagaaggaaaactgaagactttaataacaaactctccaaggtgaaaatgaacacagggcgtgattctcagtcaccagactcagcaaaaggttttagaagcgttcgaccaaacctacaagataaaagatcaccaactcagagccagataacagtgaatggaaactcaggaggtgccgtgagtcccatgagttactatcagaggccgttttccccctcggcatattctctcccagcctcactcaactccagcattgtcatgcagcacggcacatccctcgattccacagacacatatccccagcatgcgcagtctctggatggcaccaccagcagctctatccccctgtaccgatcctcagaggaagagaagagagtgacagtcatcaaagccccgcattaccca

SEQ ID NO: 184850 - DNA, 562 bp, Homo sapiens
  Payload ID: 16400
  Gene Symbol: SORBS2
  Gene Name: sorbin and SH3 domain containing 2
  ENST ID: ENST00000431902
  CDS Start-End: 322-562
accacgtacatgccgtaaatgctccctaggctggctgcggctacaaggcagacccgggagctgagaatagaggaatacctgcccaagcaactcattctgcacagcagccgacaagacagcgattttcctgtgctggaatgtgcccatccaaagacacttggattggacttaatcttaaacctctggagttcaagaccttttaaaaagggctaaataaacaatctctacatgtaaaaggccactgactcctacttcctctgtatagagcaactgttgaactcagctgcctatagcggtgggtgtgctcgcaaacgtgccgccatgtctgttacgctaacatctgtgaagagagtgcaaagttctccaaacctattggctgcagggcgtgattctcagtcaccagactcagcttggagatcttacaatgatggcaatcaggagacactgaacggagatgctacatattcctctcttgcagcaaaaggttttagaagcgttcgaccaaacctacaagataaaagatcaccaactcagagccagataacagtgaatggaaactcag

SEQ ID NO: 184851 - DNA, 572 bp, Homo sapiens
  Payload ID: 16400
  Gene Symbol: SORBS2
  Gene Name: sorbin and SH3 domain containing 2
  ENST ID: ENST00000421639
  CDS Start-End: 348-572
agttgtaaagcaaacagtgtaggtattggaagccgttcacacctcctttccgagtatctgcatgccttgctggcccagagcacaagacccccattgtgctcccccggctcagaatccaaggaaagaaaggaagcgaagcctctgcattgagttctaggacagctgagacacttggattggacttaatcttaaacctctggagttcaagaccttttaaaaagggctaaataaacaatctctacatgtaaaaggccactgactcctacttcctctgtatagagcaactgttgaactcagctgcctgtaggaaaactgaagactttaataacaaactctccaaggtgaaaatgaacacagatagcggtgggtgtgctcgcaaacgtgccgccatgtctgttacgctaacatctgtgaagagagtgcaaagttctccaaacctattggctgcagggcgtgattctcagtcaccagactcagcaaaaggttttagaagcgttcgaccaaacctacaagataaaagatcaccaactcagagccagataacagtgaatggaaactcaggaggtgccgtg

SEQ ID NO: 184852 - DNA, 582 bp, Homo sapiens
  Payload ID: 16400
  Gene Symbol: SORBS2
  Gene Name: sorbin and SH3 domain containing 2
  ENST ID: ENST00000432655
  CDS Start-End: 320-582
gtaaatgctccctaggctggctgcggctacaaggcagacccgggagctgagaatagaggaatacctgcccaagcaactcattctgcacagcagccgacaagacagcgattttcctgtgctggaatgtgcccatccaaagacacttggattggacttaatcttaaacctctggagttcaagaccttttaaaaagggctaaataaacaatctctacatgtaaaaggccactgactcctacttcctctgtatagagcaactgttgaactcagctgcctgtaggaaaactgaagactttaataacaaactctccaaggtgaaaatgaacacagatagcggtgggtgtgctcgcaaacgtgccgccatgtctgttacgctaacatctgtgaagagagtgcaaagttctccaaacctattggctgcagggcgtgattctcagtcaccagactcagcttggagatcttacaatgatggcaatcaggagacactgaacggagatgctacatattcctctcttgcagcaaaaggttttagaagcgttcgaccaaacctacaagataaaagatcaccaactcagagccagat

SEQ ID NO: 184853 - DNA, 835 bp, Homo sapiens
  Payload ID: 16400
  Gene Symbol: SORBS2
  Gene Name: sorbin and SH3 domain containing 2
  ENST ID: ENST00000419063
  CDS Start-End: 497-835
gtttttgtcttgggaaggcaagctttccctgcaatattatctcagcagctccctagctgcttaccctgaaaacgagggatccaaacggagggtgttgcactctgctaacgctggtcctgtgcgtggctgtggcatatgagcggcaggtctgaaaaagcaggtgtgtgctgggacgggcactggactggaacgcaggcggacgctctcgggtttacctgcttcctgttaacagattgtgggctcccagggcatatgtctgcacgctgaggccgaggcggagaaggggcttcctgagcgtcccagtacactgacagagacacttggattggacttaatcttaaacctctggagttcaagaccttttaaaaagggctaaataaacaatctctacatgtaaaaggccactgactcctacttcctctgtatagagcaactgttgaactcagctgcctgtaggaaaactgaagactttaataacaaactctccaaggtgaaaatgaacacagatagcggtgggtgtgctcgcaaacgtgccgccatgtctgttacgctaacatctgtgaagagagtgcaaagttctccaaacctattggctgcagggcgtgattctcagtcaccagactcagcttggagatcttacaatgatggcaatcaggagacactgaacggagatgctacatattcctctcttgcagcaaaaggttttagaagcgttcgaccaaacctacaagataaaagatcaccaactcagagccagataacagtgaatggaaactcaggaggtgccgtgagtcccatgagttactatcagaggccgttttccccctcggcatat

SEQ ID NO: 184854 - DNA, 565 bp, Homo sapiens
  Payload ID: 16400
  Gene Symbol: SORBS2
  Gene Name: sorbin and SH3 domain containing 2
  ENST ID: ENST00000439914
  CDS Start-End: 287-565
aacagattgtgggctcccagggcatatgtctgcacgctgaggccgaggcggagaaggggcttcctgagcgtcccagtacactgacagagggcgtgattctcagtcaccagactcagcttggagatcttacaatgatggcaatcaggagacactgaacggagatgctacatattcctctcttgcagcaaaaggttttagaagcgttcgaccaaacctacaagataaaagatcaccaactcagagccagataacagtgaatggaaactcaggaggtgccgtgagtcccatgagttactatcagaggccgttttccccctcggcatattctctcccagcctcactcaactccagcattgtcatgcagcacggcacatccctcgattccacagacacatatccccagcatgcgcagtctctggatggcaccaccagcagctctatccccctgtaccgatcctcagaggaagagaagagagtgacagtcatcaaagccccgcattacccagggatcgggcccgtggatgaatccggaatccccacagcaattagaacgacagtcgaccgg

SEQ ID NO: 184855 - DNA, 4356 bp, Homo sapiens
  Payload ID: 16400
  Gene Symbol: SORBS2
  Gene Name: sorbin and SH3 domain containing 2
  Uniprot ID: O94875
  ENST ID: ENST00000448662
  CDS Start-End: 188-2173
aagcagataggtttcagagataaagagtgaaaccaaaaacaccgcacacctcatccaaatctgcgctcatacttgcagcaaatgtttgctgtcagttgcttcataataacagcacagaccccgaattgcaggaggaattgcctggtagaaaactgaagactttaataacaaactctccaaggtgaaaatgaacacagggcgtgattctcagtcaccagactcagcttggagatcttacaatgatggcaatcaggagacactgaacggagatgctacatattcctctcttgcagcaaaaggttttagaagcgttcgaccaaacctacaagataaaagatcaccaactcagagccagataacagtgaatggaaactcaggaggtgccgtgagtcccatgagttactatcagaggccgttttccccctcggcatattctctcccagcctcactcaactccagcattgtcatgcagcacggcacatccctcgattccacagacacatatccccagcatgcgcagtctctggatggcaccaccagcagctctatccccctgtaccgatcctcagaggaagagaagagagtgacagtcatcaaagccccgcattacccagggatcgggcccgtggatgaatccggaatccccacagcaattagaacgacagtcgaccggcccaaggactggtacaagacgatgtttaagcaaattcacatggtgcacaagccggatgatgacacagacatgtataatactccttatacatacaatgcaggtctgtacaacccaccctacagtgctcagtcacaccctgctgcaaagacccaaacctacagacctctttccaaaagccactccgacaacagccccaatgcctttaaggatgcgtcctccccagtgcctcccccacatgttccacctccagtcccgccgcttcgaccaagagatcggtcttcaacagaaaagcatgactgggatcctccagacagaaaagtggacacaagaaaatttcggtctgagccaaggagtatttttgaatatgaacctggcaagtcatcaattcttcagcatgaaagaccacctcctaaaaagcctctggactatgttcaagatcattcttctggtgttttcaatgaggcctccttgtatcagtcctctatagacagaagcctggaaagacccatgagttctgcaagcatggccagtgacttcaggaagcggaggaagagcgagcctgcagtgggtccaccacggggcttgggagatcaaagtgcgagcaggactagcccaggccgagtggacctcccaggatcaagcaccactcttacaaagtctttcactagctcttctccttcttccccatcaagagcaaaagaccgtgagtcccctagaagttactcatccactttgactgacatggggagaagtgcaccaagggaaagaagaggaactccagaaaaagagaaattgcctgcaaaagctgtttatgattttaaggctcagacatctaaggagttgtcatttaagaaaggagatactgtctacatcctcaggaaaattgatcaaaattggtatgagggagaacaccacgggagagtgggcatcttcccgatctcatacgtagagaaactcacacctcctgagaaagcacagcctgcaagaccacctccgccagcccagcccggagaaatcggagaagctatagccaaatacaacttcaacgcagacacaaatgtggagctgtcactgagaaagggagatagagttattcttcttaaaagagttgatcaaaactggtatgaaggtaaaatcccaggaaccaacagacaaggcatcttccctgtttcctatgtggaggtcgtcaagaagaacacaaaaggtgctgaggactaccctgaccctccaataccccacagctattctagtgataggattcacagcttgagctcaaataagccacagcgtcctgtgtttactcatgaaaatattcaaggtgggggggaaccgtttcaggctctgtataactatactcccaggaatgaagatgagctggagctcagagaaagtgatgtcattgatgtcatggaaaagtgtgatgacggctggtttgtggggacctcaagaagaaccaaattctttggtactttccccggaaactacgtcaagaggctgtgaattgcgctccctccttctgtagaggccgcctgccagccatgcacctgcgtcaacgcgcctgaaacaccccgcgggcctcccgttgtcatgccttacggtttccaatgcgccgtcaccatctccacctgccaccaaaccaccagcagagtagccgccgctgctgtgagcctggggacgacatggcaggctggtccccctccgtgaaagtgtggattcctacttcctgctctaagctttgacacgtcaaaatgtgggatcagaaagaaaaaaatcatgatatttaaaaatggtcaaatatttgaggcaaaaaaaaaaaaaaaaagtgtctccaggaggctgtccagcctcgtggctccatttcaacatctccccccaggcgatgttctcccccaagacgaccagaaaattgtttattggggaatgctgtggtttgcattttcatattcttcgcttggcagtgtgtattcttttcacaagtttgcctagtgtcttggtttacacaatatgacaactgtaactgtactttagctattgtttgcctgcacatacatgttgtaatatgcacagtgattacaacctttaaagcaagaggaggcgagttaatttggatgagtgtgattttgctgattgaatgtgagttttcaaataggagtctttttctgcaatttgtttgcattttttagaagtgcaaacagtaagtaaataaaagccttcggtaataatcatgacaatacaagaggctgagctaggctacaggggaaaactattgtgttgtaaagttgcatcgctattttatattaaaatgtaatgatcagcatcatgaacaatgagctcttagtgttttatttatctgaaaaaatgtaagtaaaagcagtgttagtgagaggtgcaaagaattattctaacagacacctgaaagtatctgtaagcaatactagtaggtaagatttcactgtgtgtacacatacacatttgagattgtatgagaacatataatccatatgatatgttgtacattttatggaaatgtaatagaatctcacacattattttatagaaatagagtacagaagcatcacaagtattaaagttggttttagcaaggattaggattactacaattatttttactataataattatttttcttctatggaactcagaatcctggctacatttgaggacaggaatatgttgagcctgattttcctggtgtgtgtaaaatatttcctaggaataaattaggcactttttagaagcaatgttaaatcattcaggttttattttctgccctgaagcagaaatttaaaaaatgatattgggacctggaaggtttaatatggttcacagtgcctgaattacacctgctccgaaaactagctttgtatttcttatgactttgcataagaactgttcatctttggatcttgagcaccttacagataaaactttttatggcatctctttcatggacagtgatattgatcttttcacaatgtacgtagcctctagaattttgtacatatgtttgctctttttttgtacagactagttgttgagaaaacaggggcgtttcctaatttggtctttatcctgcgacaacactttcagcagactagcctctccttatctcacagatcacaagcacccctagatagtgtgattctgtcagatagcatttatgcaaaaatctatgaagttaaaagatcgtagaagccaaatgaaatgtacatatctactgactgatgacaagggaatttcattaggaagaaggtaaagaaacatcgttgagtagcctaccttgatttctgtcaagttcataaccagcttcatattttaaaggcttcaggtttgaaattaagtcaactgcatgcagctttgctgataaatgaataattctctttgatgccatttatgagaaaagacttcaatatctgttgcctgtcatatttaagaaaaattactgtttctactctctgtatctgattttaaaagaaaaaactattcatacctggcttccaggtaattgactttgaattcttacaagcaaaggtcattgtgtttttcttgaatagacatctaataaattttgcttggaagtatacttcagtttttcttcttgacatttatctttataaaaattgtgtattttattccaacttgttaaactaagagaaaatgca

SEQ ID NO: 184856 - DNA, 572 bp, Homo sapiens
  Payload ID: 16400
  Gene Symbol: SORBS2
  Gene Name: sorbin and SH3 domain containing 2
  ENST ID: ENST00000420158
  CDS Start-End: 252-572
attgtgctcccccggctcagaatccaaggaaagaaaggaagcgaagcctctgcattgagttctaggacagctgagacacttggattggacttaatcttaaacctctggagttcaagaccttttaaaaagggctaaataaacaatctctacatgtaaaaggccactgactcctacttcctctgtatagagcaactgttgaactcagctgcctgaaaactgaagactttaataacaaactctccaaggtgaaaatgaacacagatagcggtgggtgtgctcgcaaacgtgccgccatgtctgttacgctaacatctgtgaagagagtgcaaagttctccaaacctattggctgcagggcgtgattctcagtcaccagactcagcttggagatcttacaatgatggcaatcaggagacactgaacggagatgctacatattcctctcttgcagcaaaaggttttagaagcgttcgaccaaacctacaagataaaagatcaccaactcagagccagataacagtgaatggaaactcaggaggtgccgtgagtcccatgagttactatcagaggccg

SEQ ID NO: 184857 - DNA, 760 bp, Homo sapiens
  Payload ID: 16400
  Gene Symbol: SORBS2
  Gene Name: sorbin and SH3 domain containing 2
  ENST ID: ENST00000444771
  CDS Start-End: 494-760
tggcgatctgggcaaggcattttcatccctttgcagacaaccccggctgctgttaatgctgaaaatagctcaaatgctctcagaacagtagcaccacccagcagctgggattctttccctctctcatttgcctctctcttgctttttttccttcagacacttggattggacttaatcttaaacctctggagttcaagaccttttaaaaagggctaaataaacaatctctacatgtaaaaggccactgactcctacttcctctgtatagagcaactgttgaactcagctgcctgtagggcgtgattctcagtcaccagactcagcttggagatcttacaatgatggcaatcaggagacactgaacggagatgctacatattcctctcttgcagcaaaaggttttagaagcgttcgaccaaacctacaagataaaagatcaccaactcagagccagataacagtgaatggaaactcaggaggtgccgtgagtcccatgagttactatcagaggccgttttccccctcggcatattctctcccagcctcactcaactccagcattgtcatgcagcacggcacatccctcgattccacagacacatatccccagcatgcgcagtctctggatggcaccaccagcagctctatccccctgtaccgatcctcagaggaagagaagagagtgacagtcatcaaagccccgcattacccagggatcgggcccgtggatgaatccggaatccccacagcaattagaacg

SEQ ID NO: 184858 - DNA, 574 bp, Homo sapiens
  Payload ID: 16400
  Gene Symbol: SORBS2
  Gene Name: sorbin and SH3 domain containing 2
  ENST ID: ENST00000456596
  CDS Start-End: 408-574
tttttttccttcagacacttggattggacttaatcttaaacctctggagttcaagaccttttaaaaagggctaaataaacaatctctacatgtaaaaggccactgactcctacttcctctgtatagagcaactgttgaactcagctgcctgtagagcgagaataggacagactcgtataccattctgatctgggtgcatttcttcagaagggcgtgattctcagtcaccagactcagcttggagatcttacaatgatggcaatcaggagacactgaacggagatgctacatattcctctcttgcagcaaaaggttttagaagcgttcgaccaaacctacaagataaaagatcaccaactcagagccagataacagtgaatggaaactcaggaggtgccgtgagtcccatgagttactatcagaggccgttttccccctcggcatattctctcccagcctcactcaactccagcattgtcatgcagcacggcacatccctcgattccacagacacatatccccagcatgcgcagtctctggatggcaccaccagcagctctatccccctgtaccg

SEQ ID NO: 184859 - DNA, 571 bp, Homo sapiens
  Payload ID: 16400
  Gene Symbol: SORBS2
  Gene Name: sorbin and SH3 domain containing 2
  ENST ID: ENST00000452351
  CDS Start-End: 359-571
agcagggatgaatgtcctgacagcgtgtgtccactgtgcatgtgcttccacttgtcagcatgggcgaagcccaagtatgatgtgtagacaagaccaccgcttctctctgctccattcctgcacaagccacacacagcagacttgtatttctgtcaagggctccggttttccatcatctattttttatagcactgatactcaaccagttgcagcaaatgaagggtattatttctggtttgagggcatcgcgatgctgatttgccattcctaggaagcaaactcaccgtgttgggctctcattttaccatgggagacccggctccacaaaaccggtgggtgtgctcgcaaacgtgccgccatgtctgttacgctaacatctgtgaagagagtgcaaagttctccaaacctattggctgcagggcgtgattctcagtcaccagactcagcttggagatcttacaatgatggcaatcaggagacactgaacggagatgctacatattcctctcttgcagcaaaaggttttagaagcgttcgaccaaacctacaagataaaagatcaccaactcag

SEQ ID NO: 184860 - DNA, 487 bp, Homo sapiens
  Payload ID: 16400
  Gene Symbol: SORBS2
  Gene Name: sorbin and SH3 domain containing 2
  ENST ID: ENST00000435480
  CDS Start-End: 248-487
agaacagtagcaccacccagcagctgggattctttccctctctcatttgcctctctcttgctttttttccttcagacacttggattggacttaatcttaaacctctggagttcaagaccttttaaaaagggctaaataaacaatctctacatgtaaaaggccactgactcctacttcctctgtatagagcaactgttgaactcagctgcctgtagatagcggtgggtgtgctcgcaaacgtgccgccatgtctgttacgctaacatctgtgaagagagtgcaaagttctccaaacctattggctgcagggcgtgattctcagtcaccagactcagcttggagatcttacaatgatggcaatcaggagacactgaacggagatgctacatattcctctcttgcagcaaaaggttttagaagcgttcgaccaaacctacaagataaaagatcaccaactcagagccagataacagtgaatggaaactca

SEQ ID NO: 184861 - DNA, 626 bp, Homo sapiens
  Payload ID: 16400
  Gene Symbol: SORBS2
  Gene Name: sorbin and SH3 domain containing 2
  ENST ID: ENST00000415274
  CDS Start-End: 387-626
gatgcctccaggcgagcagcgccaagctgagctggttagtctccttttattgtggatgaacaccacgtacatgccgtaaatgctccctaggctggctgcggctacaaggcagacccgggagctgagaatagaggaatacctgcccaagcaactcattctgcacagcagccgacaagacagcgattttcctgtgctggaatgtgcccatccaaagacacttggattggacttaatcttaaacctctggagttcaagaccttttaaaaagggctaaataaacaatctctacatgtaaaaggccactgactcctacttcctctgtatagagcaactgttgaactcagctgcctgtagatagcggtgggtgtgctcgcaaacgtgccgccatgtctgttacgctaacatctgtgaagagagtgcaaagttctccaaacctattggctgcagggcgtgattctcagtcaccagactcagcttggagatcttacaatgatggcaatcaggagacactgaacggagatgctacatattcctctcttgcagcaaaaggttttagaagcgttcgaccaaacctacaagataaaagatcaccaactcagagccagataacagtgaatggaaactca

SEQ ID NO: 184862 - DNA, 629 bp, Homo sapiens
  Payload ID: 16400
  Gene Symbol: SORBS2
  Gene Name: sorbin and SH3 domain containing 2
  ENST ID: ENST00000425679
  CDS Start-End: 266-629
aaatgctctcagaacagtagcaccacccagcagctgggattctttccctctctcatttgcctctctcttgctttttttccttcagacacttggattggacttaatcttaaacctctggagttcaagaccttttaaaaagggctaaataaacaatctctacatgtaaaaggccactgactcctacttcctctgtatagagcaactgttgaactcagctgcctgtaggaaaactgaagactttaataacaaactctccaaggtgaaaatgaacacagggcgtgattctcagtcaccagactcagcttggagatcttacaatgatggcaatcaggagacactgaacggagatgctacatattcctctcttgcagcaaaaggttttagaagcgttcgaccaaacctacaagataaaagatcaccaactcagagccagataacagtgaatggaaactcaggaggtgccgtgagtcccatgagttactatcagaggccgttttccccctcggcatattctctcccagcctcactcaactccagcattgtcatgcagcacggcacatccctcgattccacagacacatatccccagcatgcgcagtctctggatggcaccaccagcagctctatcc

SEQ ID NO: 184863 - DNA, 567 bp, Homo sapiens
  Payload ID: 16400
  Gene Symbol: SORBS2
  Gene Name: sorbin and SH3 domain containing 2
  ENST ID: ENST00000450341
  CDS Start-End: 349-567
gtaaaaggccactgactcctacttcctctgtatagagcaactgttgaactcagctgcctgtagagcgagaataggacagactcgtataccattctgatctgggtgcatttcttcagaaggtacgctgtcctcacgggaaaccgcccgccactgcctgggtttggggctgatgaggccaggaagaaacttaatgcgtgcactctaacaaaaagatttcccaggcgtgattctcagtcaccagactcagcaaaaggttttagaagcgttcgaccaaacctacaagataaaagatcaccaactcagagccagataacagtgaatggaaactcaggaggtgccgtgagtcccatgagttactatcagaggccgttttccccctcggcatattctctcccagcctcactcaactccagcattgtcatgcagcacggcacatccctcgattccacagacacatatccccagcatgcgcagtctctggatggcaccaccagcagctctatccccctgtaccgatcctcagaggaagagaagagagtgacagtcatcaaagccccgcattaccca

SEQ ID NO: 184864 - DNA, 549 bp, Homo sapiens
  Payload ID: 16400
  Gene Symbol: SORBS2
  Gene Name: sorbin and SH3 domain containing 2
  ENST ID: ENST00000439049
  CDS Start-End: 188-549
aagcagataggtttcagagataaagagtgaaaccaaaaacaccgcacacctcatccaaatctgcgctcatacttgcagcaaatgtttgctgtcagttgcttcataataacagcacagaccccgaattgcaggaggaattgcctggtagaaaactgaagactttaataacaaactctccaaggtgaaaatgaacacagggcgtgattctcagtcaccagactcagcttggagatcttacaatgatggcaatcaggagacactgaacggagatgctacatattcctctcttgcagcaaaaggttttagaagcgttcgaccaaacctacaagataaaagatcaccaactcagagccagataacagtgaatggaaactcaggaggtgccgtgagtcccatgagttactatcagaggccgttttccccctcggcatattctctcccagcctcactcaactccagcattgtcatgcagcacggcacatccctcgattccacagacacatatccccagcatgcgcagtctctggatggcaccaccagcagctctat

SEQ ID NO: 184865 - DNA, 3459 bp, Homo sapiens
  Payload ID: 16401
  Gene Symbol: SORBS3
  Gene Name: sorbin and SH3 domain containing 3
  Uniprot ID: O60504
  ENST ID: ENST00000240123
  CDS Start-End: 384-2399
cgcgcgcgccccgacggacggagagcactcgcacgtccctcctctccggcccagccccggcccgcagtccagatccgagacccaaactccgcccgccccgccgcgcgactctcacggtccggcctccggcgcgcgccccttcggcctccctcttcctgcgccggcgcccggcccggcccggcccgtcctgacccggtcacgagggccgcgacggcccgcgcttctccttgcccttcctcctcgagcgcccgcgccaggcagcagccgggcagggatgctcctgcgctcccgggcggcctcgggcccagccacctgctcgccggggaagaggacacgcagaggagcagctggcttgcccggagtcctcccaccttgacccaagcatgcagggcccaccccgcagcctccgcgctgggctcagcctggacgacttcatccctggccacctccagtcccacatagggtcttcctcccgggggacacgggtgcccgtgatccggaatggtggctccaacacccttaatttccagttccacgaccccgcgcccaggactgtgtgcaatgggggctacacaccaagacgagatgcttcccagcacccggaccctgcgtggtatcagacctggccaggccctgggagcaagccctctgcaagcacaaagatccctgcctcccagcacacccagaactggtcagccacgtggaccaaggacagcaagcgtcgggacaagcgctgggtcaagtacgagggaatcgggcccgtggacgagagcggcatgcccattgccccccgatccagcgttgacagacccagagactggtaccggagaatgttccagcagattcaccggaaaatgccagacttgcagctggactggaccttcgaggagccacccagagaccccaggcatctaggagcccagcaaagacctgcccacaggcccggcccggcaacatcttccagtggaagaagctgggaccactctgaagagttacctagaagcaccttcaactacagacctggagcattctccactgtgctgcagccctcaaatcaggtgctcagacgccgggaaaaagtagacaatgtctggacggaagagtcctggaaccagtttctgcaggaactagagactgggcagaggcccaagaaaccgctggtggacgaccctggtgagaagccctcccagcccattgaggtgctgctggagagagagctggccgagctgagcgccgagctggacaaggacctgcgggcaattgagacccgactgccgtcccccaagagctcgccggcgccccgacgggccccggagcagcggcccccggccggcccggcctcagcctggagctccagctacccacatgcaccttacctgggttccgcccggtccctgagtccccacaaaatggctgatggaggaagccccttcctaggtcggagggactttgtctacccttcctcaacccgagaccctagtgcctctaacggagggggcagcccagccaggagggaagagaagaagagaaaggccgccaggctcaagtttgacttccaggcgcagtcccccaaggagctgactctgcagaagggtgacattgtctacatccacaaggaggtggacaagaactggctggagggagagcaccacggccgcctgggcatcttccctgctaattatgtggaggtgctgcccgcagatgagatccctaagcccatcaagcccccgacctaccaggtgctggagtatggagaggctgtggcccagtacaccttcaagggggacctggaggtggagctgtccttccgcaagggagagcacatctgcctgatccgcaaggtgaacgagaactggtacgagggacgcatcacgggcacggggcgccaaggcatattccctgccagctacgtgcaggtgtctcgtgaaccccggctccggctctgtgacgacggcccccagctccccacgtctccccgcctgaccgctgccgcccgctcagcccgtcaccccagctccccctcagccctgcgcagcccagctgaccccatcgacttggggggacagacctccccccgtcgcactggcttctccttccccacccaggagcctagaccccagacccagaatcttggcacccctggtccagctctgtcccactctcgaggtcccagccatcccctggacctggggacctcctctcctaacacctctcagatacactggaccccgtaccgggcgatgtaccagtacaggccccagaacgaagacgagctggagctgcgcgagggggacagggtggatgtcatgcagcagtgtgacgatggctggtttgtgggtgtctcccggaggacccagaaattcggaacgttccctggaaattacgttgccccggtgtgagtggtctccatggcaacttggagccagccaggatggggtggggagcggtggcactcgtgggagggagaggacccccgcccacatcctccttccccaggacctgagctcccagcatctgcagacgacccccgcagcctttccctcggacccccctcgaagccccctggactgattcccacccacgactcacaggcattcctcccacagccctttcatttcctccccaccccactccccaaatacagaggtctgctttgaagcggagaccatttccaggccttattgagaccagaccccaagtcccccacccccatcctgctccagcgtttcctctaacagggaccagctctccgctttgcccccacggggttcctctaaccagaaccagcttcctagcctcgtagagaccaaaggccgcccccgcctgctggggttcctcccagcaccccagcttgctggctgccctctttgccttctggcctccagctgggtgtgggggggcggagcaaggcgggggacagacgcagcaccttcttagcgatctaggcctggcaagagctctggccccaaggcctcctcttcccaggggctgccaagtcctggccctggccctggcatatcaccccgcactgtggggccaggcaccactagcctggctcaaatattccccagggagactgctgtgtgctgcccgcctgcctgctggctctcccccagccccacatcccctctggaagagaatgtaaaataaacctggacacaagggaccttgtctctgcggccttttccttggggtaggggatgcctcctcctgtctaggagatgggaattccttctgtggagggctgtgctgggagacaggtgggacaggtgtgtgtgtaagaggaggaggatggaaaaacaccattattacctccaaagatctctgcccttgggtgtcaggcaggttgcggcagcccccacaattgggcagctgtgtggcaagaagtgctgggagaatgaacagtgccaggccctggtagcagggagacaccagagatgggggactgaatgtggcctt

SEQ ID NO: 184866 - DNA, 456 bp, Homo sapiens
  Payload ID: 16401
  Gene Symbol: SORBS3
  Gene Name: sorbin and SH3 domain containing 3
  ENST ID: ENST00000520563
  CDS Start-End: 1-456
taatttccagttccacgaccccgcgcccaggactgtgtgcaatgggggctacacaccaagacgagatgcttcccagcacccggaccctgcgtggtatcagacctggccaggccctgggagcaagccctctgcaagcacaaagatccctgcctcccagcacacccagaactggtcagccacgtggaccaaggacagcaagcgtcgggacaagcgctgggtcaagtacgagggaatcgggcccgtggacgagagcggcatgcccattgccccccgatccagcgttgacagacccagagactggtaccggagaatgttccagcagattcaccggaaaatgccagaagaagctgggaccactctgaagagttacctagaagcaccttcaactacagacctggagcattctccactgtgctgcagccctcaaatcaggtgctcagacgccgggaaaaagta

SEQ ID NO: 184867 - DNA, 885 bp, Homo sapiens
  Payload ID: 16401
  Gene Symbol: SORBS3
  Gene Name: sorbin and SH3 domain containing 3
  ENST ID: ENST00000517962
  CDS Start-End: 1-560
agaactggtacgagggacgcatcacgggcacggggcgccaaggcatattccctgccagctacgtgcaggtgtctcgtgaaccccggctccggctctgtgacgacggcccccagctccccacgtctccccgcctgaccgctgccgcccgctcagcccgtcaccccagctccccctcagccctgcgcagcccagctgaccccatcgacttggggggacagacctccccccgtcgcactggcttctccttccccacccaggagcctagaccccagacccagaatcttggcacccctggtccagctctgtcccactctcgaggtcccagccatcccctggacctggggacctcctctcctaacacctctcagatacactggaccccgtaccgggcgatgtaccagtacaggccccagaacgaagacgagctggagctgcgcgagggggacagggtggatgtcatgcagcagtgtgacgatggctggtttgtgggtgtctcccggaggacccagaaattcggaacgttccctggaaattacgttgccccggtaggtctgctttgaagcggagaccatttccaggccttattgagaccagaccccaagtcccccacccccatcctgctccagcgtttcctctaacagggaccagctctccgctttgcccccacggggttcctctaaccagaaccagcttcctagcctcgtagagaccaaaggccgcccccgcctgctggggttcctcccagcaccccagcttgctggctgccctctttgccttctggcctccagctgggtgtgggggggcggagcaaggcgggggacagacgcagcaccttcttagcgatctaggcctggcaagagctctggccccaaggcctcctcttcc

SEQ ID NO: 184868 - DNA, 680 bp, Homo sapiens
  Payload ID: 16401
  Gene Symbol: SORBS3
  Gene Name: sorbin and SH3 domain containing 3
  ENST ID: ENST00000523348
  CDS Start-End: 1-680
gcggtcctcgtccccacctgcagggagctgactctgcagaagggtgacattgtctacatccacaaggaggtggacaagaactggctggagggagagcaccacggccgcctgggcatcttccctgctaattatgtggaggtgctgcccgcagatgagatccctaagcccatcaagcccccgacctaccaggtgctggagtatggagaggctgtggcccagtacaccttcaagggggacctggaggtggagctgtccttccgcaagggagagcacatctgcctgatccgcaaggtgaacgagaactggtacgagggacgcatcacgggcacggggcgccaaggcatattccctgccagctacgtgcaggtgtctcgtgaaccccggctccggctctgtgacgacggcccccagctccccacgtctccccgcctgaccgctgccgcccgctcagcccgtcaccccagctccccctcagccctgcgcagcccagctgaccccatcgacttggggggacagacctccccccgtcgcactggcttctccttccccacccaggagcctagaccccagacccagaatcttggcacccctggtccagctctgtcccactctcgaggtcccagccatcccctggacctggggacctcctctcctaacacctctcagatacactggacccc

SEQ ID NO: 184869 - DNA, 601 bp, Homo sapiens
  Payload ID: 16401
  Gene Symbol: SORBS3
  Gene Name: sorbin and SH3 domain containing 3
  ENST ID: ENST00000522721
  CDS Start-End: 320-601
gtgtccgggagggaccgcagcgccactctctgcggggcgccgttcccgcgccaccgagggcagctaactcctagcagaggaccggggtcgcggccgccgggggcgcagcgcggttagggcggccccgccacggcccaggcactcccgctgggccctgccgggcctcacccttccccgcgcagcgactcgggaagtaggacatcctgtggagagcccaggacccgggagacgccctgggaggagcccggcctcagcctggagctccagctacccacatgcaccttacctgggttccgcccggtccctgagtccccacaaaatggctgatggaggaagccccttcctaggtcggagggactttgtctacccttcctcaacccgagaccctagtgcctctaacggagggggcagcccagccaggagggaagagaagaagagaaaggccgccaggctcaagtttgacttccaggcgcagtcccccaaggagctgactctgcagaagggtgacattgtctacatccacaaggaggtggacaagaactggctggagggagagcaccacggccgcctgggcatcttccctgctaattatgtggaggtg

SEQ ID NO: 184870 - DNA, 1228 bp, Homo sapiens
  Payload ID: 16401
  Gene Symbol: SORBS3
  Gene Name: sorbin and SH3 domain containing 3
  ENST ID: ENST00000517500
  CDS Start-End: 152-1138
cttcctcctcgagcgcccgcgccaggcagcagccgggcagggatgctcctgcgctcccgggcggcctcgggcccagccacctgctcgccggggaagaggacacgcagaggagcagctggcttgcccggagtcctcccaccttgacccaagcatgcagggcccaccccgcagcctccgcgctgggctcagcctggacgacttcatccctggccacctccagtcccacatagggtcttcctcccgggggacacgggtgcccgtgatccggaatggtggctccaacacccttaatttccagttccacgaccccgcgcccaggactgtgtgcaatgggggctacacaccaagacgagatgcttcccagcacccggaccctgcgtggtatcagacctggccaggccctgggagcaagccctctgcaagcacaaagatccctgcctcccagcacacccagaactggtcagccacgtggaccaaggacagcaagcgtcgggacaagcgctgggtcaagtacgagggaatcgggcccgtggacgagagcggcatgcccattgccccccgatccagcgttgacagacccagagactggtaccggagaatgttccagcagattcaccggaaaatgccagacttgcagctggactggaccttcgaggagccacccagagaccccaggcatctaggagcccagcaaagacctgcccacaggcccggcccggcaacatcttccagtggaagaagctgggaccactctgaagagttacctagaagcaccttcaactacagacctggagcattctccactgtgctgcagccctcaaatcaggtgctcagacgccgggaaaaagtagacaatgtctggacggaagagtcctggaaccagtttctgcaggaactagagactgggcagaggcccaagaaaccgctggtggacgaccctggtgagaagccctcccagcccattgaggtgctgctggagagagagctggccgagctgagcgccgagctggacaaggacctgcgggcaattgagacccgactgccgtcccccaagcccggcctcagcctggagctccagctacccacatgcaccttacctgggttccgcccggtccctgagtccccacaaaatggctgatggaggaagccccttcctaggtcggagggactttgtctacccttcctcaacccgagaccctagtgcctctaacggagggggcagcccagc

SEQ ID NO: 184871 - DNA, 2028 bp, Homo sapiens
  Payload ID: 16401
  Gene Symbol: SORBS3
  Gene Name: sorbin and SH3 domain containing 3
  Uniprot ID: O60504
  ENST ID: ENST00000523965
  CDS Start-End: 272-1261
ccgggatcggccgcgcgggcgcctctaggaccccgcgtcccgcccgctctcctcccctcccgagccgcgaacttttccggaggcggcggcctcggctgccgctgggtcccggggtcgcgggccctgattgcgccgtttccccgcgcagagctcgccggcgccccgacgggccccggagcagcggcccccggccggcccggcctcagcctggagctccagctacccacatgcaccttacctgggttccgcccggtccctgagtccccacaaaatggctgatggaggaagccccttcctaggtcggagggactttgtctacccttcctcaacccgagaccctagtgcctctaacggagggggcagcccagccaggagggaagagaagaagagaaaggccgccaggctcaagtttgacttccaggcgcagtcccccaaggagctgactctgcagaagggtgacattgtctacatccacaaggaggtggacaagaactggctggagggagagcaccacggccgcctgggcatcttccctgctaattatgtggaggtgctgcccgcagatgagatccctaagcccatcaagcccccgacctaccaggtgctggagtatggagaggctgtggcccagtacaccttcaagggggacctggaggtggagctgtccttccgcaagggagagcacatctgcctgatccgcaaggtgaacgagaactggtacgagggacgcatcacgggcacggggcgccaaggcatattccctgccagctacgtgcaggtgtctcgtgaaccccggctccggctctgtgacgacggcccccagctccccacgtctccccgcctgaccgctgccgcccgctcagcccgtcaccccagctccccctcagccctgcgcagcccagctgaccccatcgacttggggggacagacctccccccgtcgcactggcttctccttccccacccaggagcctagaccccagacccagaatcttggcacccctggtccagctctgtcccactctcgaggtcccagccatcccctggacctggggacctcctctcctaacacctctcagatacactggaccccgtaccgggcgatgtaccagtacaggccccagaacgaagacgagctggagctgcgcgagggggacagggtggatgtcatgcagcagtgtgacgatggctggtttgtgggtgtctcccggaggacccagaaattcggaacgttccctggaaattacgttgccccggtgtgagtggtctccatggcaacttggagccagccaggatggggtggggagcggtggcactcgtgggagggagaggacccccgcccacatcctccttccccaggacctgagctcccagcatctgcagacgacccccgcagcctttccctcggacccccctcgaagccccctggactgattcccacccacgactcacaggcattcctcccacagccctttcatttcctccccaccccactccccaaatacagaggtctgctttgaagcggagaccatttccaggccttattgagaccagaccccaagtcccccacccccatcctgctccagcgtttcctctaacagggaccagctctccgctttgcccccacggggttcctctaaccagaaccagcttcctagcctcgtagagaccaaaggccgcccccgcctgctggggttcctcccagcaccccagcttgctggctgccctctttgccttctggcctccagctgggtgtgggggggcggagcaaggcgggggacagacgcagcaccttcttagcgatctaggcctggcaagagctctggccccaaggcctcctcttcccaggggctgccaagtcctggccctggccctggcatatcaccccgcactgtggggccaggcaccactagcctggctcaaatattccccagggagactgctgtgtgctgcccgcctgcctgctggctctcccccagccccacatcccctctggaagagaatgtaaaataaacctggacacaaggga

SEQ ID NO: 184872 - DNA, 670 bp, Homo sapiens
  Payload ID: 16401
  Gene Symbol: SORBS3
  Gene Name: sorbin and SH3 domain containing 3
  ENST ID: ENST00000523900
  CDS Start-End: 149-670
gagctggccgagctgagcgccgagctggacaaggacctgcgggcaattgagacccgactgccgtcccccaagcccggcctcagcctggagctccagctacccacatgcaccttacctgggttccgcccggtccctgagtccccacaaaatggctgatggaggaagccccttcctaggtcggagggactttgtctacccttcctcaacccgagaccctagtgcctctaacggagggggcagcccagccaggagggaagagaagaagagaaaggccgccaggctcaagtttgacttccaggcgcagtcccccaaggagctgactctgcagaagggtgacattgtctacatccacaaggaggtggacaagaactggctggagggagagcaccacggccgcctgggcatcttccctgctaattatgtggaggtgctgcccgcagatgagatccctaagcccatcaagcccccgacctaccaggtgctggagtatggagaggctgtggcccagtacaccttcaagggggacctggaggtggagctgtccttccgcaagggagagcacatctgcctgatccgcaaggtgaacgagaactggtacgagggacgcatcacgggcacggggcgccaaggcatattccctgccagctacgtgcaggtgtctcgtgaaccc

SEQ ID NO: 184873 - DNA, 4909 bp, Homo sapiens
  Payload ID: 16402
  Gene Symbol: SORD
  Gene Name: sorbitol dehydrogenase
  Uniprot ID: Q00796
  ENST ID: ENST00000267814
  CDS Start-End: 181-1254
ctccacgctagcgccgcccaggctggcacaaaggaggaagcctagtcccgcccctgcgtgcggcgcttctcccaggccccaccttccatccagtgccctggaccctcggctgggtagcgccaccagagcgaccaaacgtcccgcgccttccaggccgcactccagagccaaaagagctccatggcggcggcggccaagcccaacaacctttccctggtggtgcacggaccgggggacttgcgcctggagaactatcctatccctgaaccaggcccaaatgaggtcttgctgaggatgcattctgttggaatctgtggctcagatgtccactactgggagtatggtcgaattgggaattttattgtgaaaaagcccatggtgctgggacatgaagcttcgggaacagtcgaaaaagtgggatcatcggtaaagcacctaaaaccaggtgatcgtgttgccatcgagcctggtgctccccgagaaaatgatgaattctgcaagatgggccgatacaatctgtcaccttccatcttcttctgtgccacgccccccgatgacgggaacctctgccggttctataagcacaatgcagccttttgttacaagcttcctgacaatgtcacctttgaggaaggcgccctgatcgagccactttctgtggggatccatgcctgcaggagaggcggagttaccctgggacacaaggtccttgtgtgtggagctgggccaatcgggatggtcactttgctcgtggccaaagcaatgggagcagctcaagtagtggtgactgatctgtctgctacccgattgtccaaagccaaggagattggggctgatttagtcctccagatctccaaggagagccctcaggaaatcgccaggaaagtagaaggtcagctggggtgcaagccggaagtcaccatcgagtgcacgggggcagaggcctccatccaggcgggcatctacgccactcgctctggtgggaacctcgtgcttgtggggctgggctctgagatgaccaccgtacccctactgcatgcagccatccgggaggtggatatcaagggcgtgtttcgatactgcaacacgtggccagtggcgatttcgatgcttgcgtccaagtctgtgaatgtaaaacccctcgtcacccataggtttcctctggagaaagctctggaggcctttgaaacatttaaaaagggattggggttgaaaatcatgctcaagtgtgaccccagtgaccagaatccctgatgttaatgggctctgccctcatccccacagtcttgggatctcagggcacaatggctggacatgggtgggctctgatgcagaactttctcttttgaatgttaagaataactaatacaattcattgtgaacagaagtccttaagcagaggaattggtgtgccttaaagatacaatctgggatagtttgggggaacttgtagccagaatgccctgttcatgctgagcaaagttcagcaagtagagcagagtttggcaggcaggtgccaggaactccccttcttcctggagtgccttcattgaggaaggaaatctggcccttgggtttcctggttccactgctactgacccagaggggaatgagggctgagttatgaaaagataacttcatgaagacttaactggcccagaagctgattttcatgaaaatctgccactcagggtctgggatgaaggcttgtcagcacttccagtttagaacgcaatgtttctagagacatattggctgtttgttttgatgataaaaggagaataagaaaaggcatcactttcctggatccaggataatttttaaaccaatcaaatgaaaaaaacaaacaaacaaaaaaggaaatgtcatgtgaggttaaaccagtttgcattcccctaatgtggaaaaagtaagaggactactcagcactgtttgaagattgcctcttctacagcttctgagaattgtgttatttcacttgccaagtgaaggaccccctccccaacatgccccagcccacccctaagcatggtcccttgtcaccaggcaaccaggaaactgctacttgtggacctcaccagagaccaggagggtttggttagctcacaggacttcccccaccccagaagattagcatcccatactagactcatactcaactcaactaggctcatactcaattgatggttattagacaattccatttctttctggttattataaacagaaaatctttcctcttctcattaccagtaaaggctcttggtatctttctgttggaatgatttctatgaacttgtcttattttaatggtgggttttttttctggtaagatttagacctaaatcgcatcatgccaacttgtgactttgagactattcatcaagaatgaggatatagtagccatgacatagcttgagctatagcctttaattccttactttggctatgggtggagggtgagtttgaagaggttctgattttcttgtaacctgggaaagccatgaccttgtgcccgattctttcagattgctttgggtaataaatattggtggtggtatctgactcatgctgctgtttatggtcctgtttagtggggaatggactcaggttacccatttcccagagggaaggatcccaggatttttgaaggttacatattttctgtaccaaatataatttcattgacatgaattatctctaatcctcatgacaagccacatacacaatcattttgtagataaagaagatataaatgccagaggagaccttaagattgtcttacaacacaacccttcagttaacgagagaggaaattgaggctcagattggggaagtgacttggcaaatcacacagtgggttagtcaatggcccaggattagacagaacccaggaatcctgacatcaaatcctttacaacatgctgcctctcataggcctgaggtgtccagtcctagaggacaaatgatgctccccatgccaccacccccaccaagcagctcctactgatgagaagatgcactaagcagtcttggtggaaacatcttcctcacgccctgtgccccctttcaggtgcccagagaaggagctccagtgtctgcttcagccagggctttaagagagaaggaagctgggagtgaggggcagaggctctaccagagaatgtctgctggtgtcttggaggcacttcctgcagcctatgcatgcctcgtgaagccatttcactgctgccccttcatcctcctcctccctgagccctaggtagaagtcagtgtgtggaggaggccacccagagatgaccctgaccaggccccaccgcctgtagccagacccagcctctgtcccagctggctgctaatttctgagcatttcttccctgttatttggcctctgtaccttgaacctaggttgacatcatgagcagaggacagttcttaggaaaggcaaatatcccataaatcctatttgcctctctttctcctaacctctggctccaccaactccccaacaggcctcctgcacacacaataggagtcaggagggaggaggcaggactgtgctacacaagggagactgggtggggaagatgtcagagaaccagtgactgagtgcagaggtgacttcacaccagcatctgctgtagccagaggtgggctgcaagagggaattagaggagccaacatgtcctctttctcctttagggtccatggagcagtccgctgcttccaggttgcctgtggggtccttcccagctctccgccctgacacgtcttcactccctagcactcgtggagctgactgggtggggacctcagtgttgactgaaagcgtgaatcaagtgccaggcactggtgacagagcacacagaggctgctgggcctcccaaggtcggggagcttgtggggaattcacattcttggttccgggactgattcactgagtcaatcaatattgattgagcacttagttggttgtggtggtggtaggaatgaattcctgggcttcctgcagcccctttccatgaatctatacatatcaaacatgtgcatgcatttgtaaacattaatgggagtgtactttacttttttcattttactcataaacagacgaggactttaaaaaaatcacaattattaaataattcccattactatacctgacaaaactaataataatttcataatagctaataccccgtcaatccatgccatattttccctcatctaaaaaacagaaaaaattacttttttttcccccaaagacagggtcttgatcagagctcactgcaatatcaaactcctgggttcaagtgatcctcctgtctcagcctctggagtagctgggattataggcatgcaccaccatgcctggctactttttgtagagaaaaaaatttaaaaaggtctcactatgtggcccagagtgttcttgaattcctggcctcaagcaatcttcctgcctcagtttcccaaagcactgagattacaggcatgagccaccatgcccagccaaaactttacttttttacacttgcttttctggaatcaggatctaaacatattgcatgcggttgatatattaagcctgttttattttttattttttcttctttcttaagcctctttattatagttccccctacattttggttcacatgccactgttatgttgaagaaactgggtcctttgtcttctggataccgttttacaaacatacttgttttcatttaataaatggctaaatttctttctatgtcaataattatacacatcattattttaaatcaccacatcccattgtgtggatagactatcatttataaagcaaattgcagtattttgagtgtttggatagtttacagagttttgctctaataataaagttgcaatgacaacccttgttgcata

SEQ ID NO: 184874 - DNA, 1502 bp, Homo sapiens
  Payload ID: 16402
  Gene Symbol: SORD
  Gene Name: sorbitol dehydrogenase
  ENST ID: ENST00000559230
  CDS Start-End: 90-443
agtgccctggaccctcggctgggtagcgccaccagagcgaccaaacgtcccgcgccttccaggccgcactccagagccaaaagagctccatggcggcggcggccaagcccaacaacctttccctggtggtgcacggaccgggggacttgcgcctggagaactatcctatccctgaaccaggcccaaatgaggtcttgctgaggatgcattctgttggaatctgtggctcagatgtccactactgggagtatggtcgaattgggaattttattgtgaaaaagcccatggtgctgggacatgaagcttcgggaacagtcgaaaaagtgggatcatcggtaaagcacctaaaaccaggttggaaaacaaagaaccagaccaaagagcgggcagactctgctcccaccctcggacatggtgccatctttgttttcctctccaggtgatcgtgttgccatcgagcctggtgctccccgagaaaatgatgaattctgcaagatgggccgatacaatctgtcaccttccatcttcttctgtgccacgccccccgatgacgggaacctctgccggttctataagcacaatgcagccttttgttacaagcttcctgacaatgtcacctttgaggaaggcgccctgatcgagccactttctgtggggatccatgcctgcaggagaggcggagttaccctgggacacaaggtccttgtgtgtggagctgggccaatcgggatggtcactttgctcgtggccaaagcaatgggagcagctcaagtagtggtgactgatctgtctgctacccgattgtccaaagccaaggagattggggctgatttagtcctccagatctccaaggagagccctcaggaaatcgccaggaaagtagaaggtcagctggggtgcaagccggaagtcaccatcgagtgcacgggggcagaggcctccatccaggcgggcatctacgccactcgctctggtgggaacctcgtgcttgtggggctgggctctgagatgaccaccgtacccctactgcatgcagccatccgggaggtggatatcaagggcgtgtttcgatactgcaacacgtggccagtggcgatttcgatgcttgcgtccaagtctgtgaatgtaaaacccctcgtcacccataggtttcctctggagaaagctctggaggcctttgaaacatttaaaaagggattggggttgaaaatcatgctcaagtgtgaccccagtgaccagaatccctgatgttaatgggctctgccctcatccccacagtcttgggatctcagggcacaatggctggacatgggtgggctctgatgcagaactttctcttttgaatgttaagaataactaatacaattcattgtgaacagaagtccttaagcagaggaattggtgtgccttaaagatacaatctgggatagtttgggggaacttgtagccagaatgccctgttcatgctgagcaaagttcagcaagtagagcagagtttggca

SEQ ID NO: 184875 - DNA, 1395 bp, Homo sapiens
  Payload ID: 16402
  Gene Symbol: SORD
  Gene Name: sorbitol dehydrogenase
  ENST ID: ENST00000558580
  CDS Start-End: 107-1117
tgagaccaagaacccaccaattccggacacaaagagaggagtatatatgtgattaagatatgtatttctgacttgaagtgaaatattctggaaaactcacacaactatggagaactatcctatccctgaaccaggcccaaatgaggtcttgctgaggatgcattctgttggaatctgtggctcagatgtccactactgggagtatggtcgaattgggaattttattgtgaaaaagcccatggtgctgggacatgaagcttcgggaacagtcgaaaaagtgggatcatcggtaaagcacctaaaaccaggtgatcgtgttgccatcgagcctggtgctccccgagaaaatgatgaattctgcaagatgggccgatacaatctgtcaccttccatcttcttctgtgccacgccccccgatgacgggaacctctgccggttctataagcacaatgcagccttttgttacaagcttcctgacaatgtcacctttgaggaaggcgccctgatcgagccactttctgtggggatccatgcctgcaggagaggcggagttaccctgggacacaaggtccttgtgtgtggagctgggccaatcgggatggtcactttgctcgtggccaaagcaatgggagcagctcaagtagtggtgactgatctgtctgctacccgattgtccaaagccaaggagattggggctgatttagtcctccagatctccaaggagagccctcaggaaatcgccaggaaagtagaaggtcagctggggtgcaagccggaagtcaccatcgagtgcacgggggcagaggcctccatccaggcgggcatctacgccactcgctctggtgggaacctcgtgcttgtggggctgggctctgagatgaccaccgtacccctactgcatgcagccatccgggaggtggatatcaagggcgtgtttcgatactgcaacacgtggccagtggcgatttcgatgcttgcgtccaagtctgtgaatgtaaaacccctcgtcacccataggtttcctctggagaaagctctggaggcctttgaaacatttaaaaagggattggggttgaaaatcatgctcaagtgtgaccccagtgaccagaatccctgatgttaatgggctctgccctcatccccacagtcttgggatctcagggcacaatggctggacatgggtgggctctgatgcagaactttctcttttgaatgttaagaataactaatacaattcattgtgaacagaagtccttaagcagaggaattggtgtgccttaaagatacaatctgggatagtttgggggaacttgtagccagaatgccctgttcatgctgagcaaagttcagcaagtagagcagagtttggcaggcaggtgccaggaactccccttc

SEQ ID NO: 184876 - DNA, 1553 bp, Homo sapiens
  Payload ID: 16402
  Gene Symbol: SORD
  Gene Name: sorbitol dehydrogenase
  Uniprot ID: Q00796
  ENST ID: ENST00000558789
  CDS Start-End: 104-406
cccaccttccatccagtgccctggaccctcggctgggtagcgccaccagagcgaccaaacgtcccgcgccttccaggccgcactccagagccaaaagagctccatggcggcggcggccaagcccaacaacctttccctggtggtgcacggaccgggggacttgcgcctggagaactatcctatccctgaaccaggcccaaatgaggtcttgctgaggatgcattctgttggaatctgtggctcagatgtccactactgggagtatggtcgaattgggaattttattgtgaaaaagcccatggtgctgggacatgaagcttcgggaacagtcgaaaaagtgggatcatcggtaaagcacctaaaaccaggcttcctgacaatgtcacctttgaggaaggcgccctgatcgagccactttctgtggggatccatgcctgcaggagaggcggagttaccctgggacacaaggtccttgtgtgtggagctgggccaatcgggatggtcactttgctcgtggccaaagcaatgggagcagctcaagtagtggtgactgatctgtctgctacccgattgtccaaagccaaggagattggggctgatttagtcctccagatctccaaggagagccctcaggaaatcgccaggaaagtagaaggtcagctggggtgcaagccggaagtcaccatcgagtgcacgggggcagaggcctccatccaggcgggcatctacacctaggaacagataagctgccagtgcccgactcgcccctcagcgacccaccagccacttatgggaagttggcaggaagttggaggtggtgggagggagtgtcattgacagatcaaagtatgaggaaacgaagggaaaataacaacttccaggttccaagccctactgtacgccaggttctctgctgtactttataaacatgaggcctaatctgcacaatagccctgaaaaccagttaccattttatgctgagggatttgtggtttgtttgaggcaagccaagtcaggcccaggcccagccctgccaggccccagtgcctgagttgccccgctgcttaggagaggaagggaaggagggcacgaacaaccatgctagggtggggggacagggccagggctggagagggtagcaggcagccgccaccacaggggactcctgtccctgcctcccagacagcctccccaggtagcgtgggcttcctccttccttctgaggctcacagcaggagggcactttgcatcacatgagacattctagggaaggctgacccaccaagctgagtagcagagctgcctagacctcctcctactaagttgcccagcggccttgggagctgaggaagcagtgggggagagggaggagcgggtgccaccttggcagtgtcgtgagtttcagctggagtcggccagccctctgcttcactgtcataggcagtggtcgccatgtgggaaggggcaaaaagaagccgaagctcagagaggaacaatggatctgtgtgtgattgatctacccatggtatgtcttgggtacctaccatgtgcca

SEQ ID NO: 184877 - DNA, 2010 bp, Homo sapiens
  Payload ID: 16403
  Gene Symbol: SRI
  Gene Name: sorcin
  Uniprot ID: P30626
  ENST ID: ENST00000265729
  CDS Start-End: 54-650
gggcggagaggcctggcgcacagggcgagggcggctgcggcgcagtctgcagcatggcgtacccggggcatcctggcgccggcggcgggtactacccaggcgggtatggaggggctcccggagggcctgcgtttcccggacaaactcaggatccgctgtatggttactttgctgctgtagctggacaggatgggcagatagatgctgatgaattgcagagatgtctgacacagtctggcattgctggaggatacaaaccttttaacctggagacttgccggcttatggtttcaatgctggatagagatatgtctggcacaatgggtttcaatgaatttaaagaactctgggctgtactgaatggctggagacaacactttatcagttttgacactgacaggagtggaacagtagacccacaagaattgcagaaggccctgacaacaatgggatttaggttgagtccccaggctgtgaattcaattgcaaaacgatacagcaccaatggaaagatcaccttcgacgactacatcgcctgctgcgtcaaactgagggctcttacagacagctttcgaagacgggatactgctcagcaaggtgttgtgaatttcccatatgatgatttcattcaatgtgtcatgagtgtttaaatcaagaggaagctgcatgaatgtaatcaacattccaactggagctctcctttgcttgtcctctttgccttcggtaatatgtataaacttacatcacgactttctcttaacagctgttgtaaagtttattactttatgtacaactgaagttttgttttagttttgataataaattctttggaactttaataagatctagtctgttacaccatttagaactttcctgagccattatcagtcatgccttattttcttgctaaaactctatgtaaatttaagtatgcaaaatgtttaagtcacattatttatttttcattgtgagacactaaaaactgttaatcagactacagctgttatctttcctctcctacaaagaatactccacacataaaaacttaggtaaatgacatagacgcacttgggtgaaataaaacaacaaaaaaggtaatccagtaatccacgtcaggattcaccttagaagtttagcacacgcccttcaaaacctgttgaataatttgattggcaaatactatctgtcaccaagtccctttttgtcatctatttaaacctttgttaactctccttaaaaatcttgtacattataagcttaactatataaaaagaaaattgatagaaaaagactaagggaatatatggaaatattaacaatgtttattttggatgaatggaattctagatgactttaattttctttatatcagtatttttcagattttctatatgctttccttttaaaatcagattttagtttttaaaatactgatacatccattttgatataccatgtattcacactttaaaaaatacacatagcagagtatcggaaagtatgtaccaaaacattgatctggctaccactgggagtcaggatcatgagttcatcttcttccttcttactgcttttccaaacattctccagtaagcaggtactacatttataatggaaggaattttttaaaaaattttaagctgtacactttcaagtaagatctgaattctaatgctggcttgtgcctcttactatgtggtttggtcattatagataatgcccagtttcagtttccccatctttgaaaaggagataatatgttatctcttgggagtagttctgaatatgaagtgtgttgatacaagaagcactgacaatgtttctgtttcttaaatttaaaactggcctggtttgccttttttatcaagagagcttaacagataaaaaatgaaattagtctattttctacttgccagcagagtatctgtcttattttaggatgcagtgtgaaacttaccattcaactgaacaactagttgtcaactaatgaaaataaaacattttctctaa

SEQ ID NO: 184878 - DNA, 653 bp, Homo sapiens
  Payload ID: 16403
  Gene Symbol: SRI
  Gene Name: sorcin
  Uniprot ID: P30626
  ENST ID: ENST00000394641
  CDS Start-End: 80-631
gattcttctatttggccactctgcaagaaggcaatcctctaaggatcaccagcttctacctataagacttcaactcaagatgcagtatggaggggctcccggagggcctgcgtttcccggacaaactcaggatccgctgtatggttactttgctgctgtagctggacaggatgggcagatagatgctgatgaattgcagagatgtctgacacagtctggcattgctggaggatacaaaccttttaacctggagacttgccggcttatggtttcaatgctggatagagatatgtctggcacaatgggtttcaatgaatttaaagaactctgggctgtactgaatggctggagacaacactttatcagttttgacactgacaggagtggaacagtagacccacaagaattgcagaaggccctgacaacaatgggatttaggttgagtccccaggctgtgaattcaattgcaaaacgatacagcaccaatggaaagatcaccttcgacgactacatcgcctgctgcgtcaaactgagggctcttacagacagctttcgaagacgggatactgctcagcaaggtgttgtgaatttcccatatgatgatttcattcaatgtgtcatgagtgtttaaatcaagaggaagctgcatgaat

SEQ ID NO: 184879 - DNA, 1418 bp, Homo sapiens
  Payload ID: 16403
  Gene Symbol: SRI
  Gene Name: sorcin
  Uniprot ID: P30626
  ENST ID: ENST00000431660
  CDS Start-End: 63-605
actctgcaagaaggcaatcctctaaggatcaccagcttctacctataagacttcaactcaagatgcagtatggaggggctcccggagggcctgcgtttcccggacaaactcaggatccgctgtatggttactttgctgctgtagctggacaggatgggcagatagatgctgatgaattgcagagatgtctgacacagtctggcattgctggaggatacaaaccttttaacctggagacttgccggcttatggtttcaatgctggatagagatatgtctggcacaatgggtttcaatgaatttaaagaactctgggctgtactgaatggctggagacaacactttatcagttttgacactgacaggagtggaacagtagacccacaagaattgcagaaggccctgacaacaatgggatttaggttgagtccccaggctgtgaattcaattgcaaaacgatacagcaccaatggaaagatcaccttcgacgactacatcgcctgctgcgtcaaactgagggctcttacagacagctttcgaagacgggatactgctcagcaaggtgttgtgaatttcccatatgatgatgtaagtcttagaaattaagagatacagtagatgaaaaggatgtacaccagatgggtatccctttgaaattagctgttaagaatatcttaaggttaaggatgccagagacataagggattcaaaagttagaaagagttatcatccagaatttattaatttcatttattagtcttaactatagtgagaccatgatttgatttgcattcagagacctgggttcaagacccagcttgttgtatttattagctgggtcacttaagcaggtttcttaattgctgtgacactatatgaataaagaagatatagtagtaatgcctttttcactgagccattgtaagatttctattagaaatgcccttgaaaaacactatgcagatatactatctgcttttgtcttctgtaaacaaatcatgtcagtcactgagaatagataacagctcaatagttttgcatacctatgttcttcattgagggcataaggcaggcaacaacttaaatcacaattttttttttttttttgagatggagtctcgctctgttgcccaggttggagtgcagtggcgcaatgtcagctcactgcaacctccacgtctcgggttctagcgattctcctgcctcagcctcctgagggactataggcatgtgccaccatacctggttaagtttttttgtatttttagtagagacggggtttcactgtgttagccaggatggtctcgatctcctgtccttgtgatctgtccgcttaggcctcccaaagtgctgggattacaggcgtgagccactgctcccggctaaatcacaatttaaaacaagttatttactaaacag

SEQ ID NO: 184880 - DNA, 1307 bp, Homo sapiens
  Payload ID: 16403
  Gene Symbol: SRI
  Gene Name: sorcin
  ENST ID: ENST00000419179
  CDS Start-End: 11-487
agtctgcagcatggcgtacccggggcatcctggcgccggcggcgggtactacccaggcgggtatggaggggctcccggagggcctgcgtttcccggacaaactcaggatccgctgtatggttactttgctgctgtagctggacaggatgggcagatagatgctgatgaattgcagagatgtctgacacagtctggcattgctggaggatacaaaccttttaacctggagacttgccggcttatggtttcaatgctggatagagatatgtctggcacaatgggtttcaatgaatttaaagaactctgggctgtgaattcaattgcaaaacgatacagcaccaatggaaagatcaccttcgacgactacatcgcctgctgcgtcaaactgagggctcttacagacagctttcgaagacgggatactgctcagcaaggtgttgtgaatttcccatatgatgatttcattcaatgtgtcatgagtgtttaaatcaagaggaagctgcatgaatgtaatcaacattccaactggagctctcctttgcttgtcctctttgccttcggtaatatgtataaacttacatcacgactttctcttaacagctgttgtaaagtttattactttatgtacaactgaagttttgttttagttttgataataaattctttggaactttaataagatctagtctgttacaccatttagaactttcctgagccattatcagtcatgccttattttcttgctaaaactctatgtaaatttaagtatgcaaaatgtttaagtcacattatttatttttcattgtgagacactaaaaactgttaatcagactacagctgttatctttcctctcctacaaagaatactccacacataaaaacttaggtaaatgacatagacgcacttgggtgaaataaaacaacaaaaaaggtaatccagtaatccacgtcaggattcaccttagaagtttagcacacgcccttcaaaacctgttgaataatttgattggcaaatactatctgtcaccaagtccctttttgtcatctatttaaacctttgttaactctccttaaaaatcttgtacattataagcttaactatataaaaagaaaattgatagaaaaagactaagggaatatatggaaatattaacaatgtttattttggatgaatggaattctagatgactttaattttctttatatcagtatttttcagattttctatatgctttccttttaaaatcagattttagtttttaaaatactgatacatccattttgatataccatgtattcacacttta

SEQ ID NO: 184881 - DNA, 769 bp, Homo sapiens
  Payload ID: 16403
  Gene Symbol: SRI
  Gene Name: sorcin
  ENST ID: ENST00000457606
  CDS Start-End: 40-258
ggcgcacagggcgagggcggctgcggcgcagtctgcagcatggcgtacccggggcatcctggcgccggcggcgggtactacccaggcgggtatggaggggctcccggagggcctgcgtttcccggacaaactcaggatccgctgtatggttactttgctgctgtagctggacaggatgggcagatagatgctgatgaattgcagagatgtctgacacagtctggcattgctggaggatacaaacttgttcgtctgtgataaggttgagagaaacagctggaggtagggctttccttctaggtccattatattgtatgtttctgtgagaagaaaagatgtttgaggcattctagtagaatgaacagaagagaagaaaaagagtaaagcttttaacctggagacttgccggcttatggtttcaatgctggatagagatatgtctggcacaatgggtttcaatgaatttaaagaactctgggctgtactgaatggctggagacaacactttatcagttttgacactgacaggagtggaacagtagacccacaagaattgcagaaggccctgacaacaatgggatttaggttgagtccccaggctgtgaattcaattgcaaaacgatacagcaccaatggaaagatcaccttcgacgactacatcgcctgctgcgtcaaactgagggctcttacagacagctttcgaagacgggatactgctcagcaaggtgttgtgaatttcccatatgatgatgtaagtcttagaaattaa

SEQ ID NO: 184882 - DNA, 570 bp, Homo sapiens
  Payload ID: 16403
  Gene Symbol: SRI
  Gene Name: sorcin
  ENST ID: ENST00000490437
  CDS Start-End: 63-530
actctgcaagaaggcaatcctctaaggatcaccagcttctacctataagacttcaactcaagatgcaggatgggcagatagatgctgatgaattgcagagatgtctgacacagtctggcattgctggaggatacaaaccttttaacctggagacttgccggcttatggtttcaatgctggatagagatatgtctggcacaatgggtttcaatgaatttaaagaactctgggctgtactgaatggctggagacaacactttatcagttttgacactgacaggagtggaacagtagacccacaagaattgcagaaggccctgacaacaatgggatttaggttgagtccccaggctgtgaattcaattgcaaaacgatacagcaccaatggaaagatcaccttcgacgactacatcgcctgctgcgtcaaactgagggctcttacagacagctttcgaagacgggatactgctcagcaaggtgttgtgaatttcccatatgatgatttcattcaatgtgtcatgagtgtttaaatcaagaggaagctgcatgaatgtaatcaacattccaact

SEQ ID NO: 184883 - DNA, 7028 bp, Homo sapiens
  Payload ID: 16404
  Gene Symbol: SORT1
  Gene Name: sortilin 1
  Uniprot ID: Q99523
  ENST ID: ENST00000256637
  CDS Start-End: 60-2555
ggcgggggtgggcgggcgcgccgggcggcaggtgtcggcgtcggcggcattcggcggcgatggagcggccctggggagctgcggacggcctctcgcgctggccccatggcctcggcctcctcctcctcctgcagctgctgccgccgtcgaccctcagccaggaccggctggacgcgccgccgccgcccgctgcgccgctgccgcgctggtctggccccatcggggtgagctgggggctgcgggcggccgcagccgggggcgcgtttccccgcggcggccgttggcgtcgcagcgcgccgggcgaggacgaggagtgcggccgggtccgggacttcgtcgccaagctggccaacaacacgcaccagcatgtgtttgatgatctcagaggctcagtatccttgtcctgggttggagatagcactggggtcattctagtcttgactaccttccatgtaccactggtaattatgacttttggacagtccaagctatatcgaagtgaggattatgggaagaactttaaggatattacagatctcatcaataacacctttattcggactgaatttggcatggctattggtcctgagaactctggaaaggtggtgttaacagcagaggtgtctggaggaagtcgtggaggaagaatctttagatcatcagattttgcgaagaattttgtgcaaacagatctcccttttcatcctctcactcagatgatgtatagccctcagaattctgattatcttttagctctcagcactgaaaatggcctgtgggtgtccaagaattttgggggaaaatgggaagaaatccacaaagcagtatgtttggccaaatggggatcagacaacaccatcttctttacaacctatgcaaatggctcctgcaaagctgaccttggggctctggaattatggagaacttcagacttgggaaaaagcttcaaaactattggtgtgaaaatctactcatttggtcttgggggacgtttcctttttgcctctgtgatggctgataaggatacaacaagaaggatccacgtttcaacagatcaaggggacacatggagcatggcccagctcccctccgtgggacaggaacagttctattctattctggcagcaaatgatgacatggtattcatgcatgtagatgaacctggagacactgggtttggcacaatctttacctcagatgatcgaggcattgtctattccaagtctttggaccgacatctctacactaccacaggcggagagacggactttaccaacgtgacctccctccgcggcgtctacataacaagcgtgctctccgaagataattctatccagaccatgatcacttttgaccaaggaggaaggtggacgcacctgaggaagcctgaaaacagtgaatgtgatgctacagcaaaaaacaagaatgagtgcagccttcatattcatgcttcctacagcatctcccagaaactgaatgttccaatggccccactctcagagccgaatgccgtaggcattgtcattgctcatggtagcgtgggggatgccatctcagtgatggttccagatgtgtacatctcagatgatgggggttactcctggacaaagatgctggaaggaccccactattacaccatcctggattctggaggcatcattgtggccattgagcacagcagccgtcctatcaatgtgattaagttctccacagacgaaggtcaatgctggcaaacctacacgttcaccagggaccccatctatttcactggcctagcttcagaacctggagctaggtccatgaatatcagcatttggggcttcacagaatctttcctgaccagccagtgggtctcctacaccattgattttaaagatatccttgaaaggaactgtgaagagaaggactataccatatggctggcacactccacagaccctgaagattatgaagatggctgcattttgggctacaaagaacagtttctgcggctacgcaagtcatccgtgtgtcagaatggtcgagactatgttgtgaccaagcagccctccatctgcctctgttccctggaggactttctctgtgattttggctactaccgtccagaaaatgactccaagtgtgtggaacagccagaactgaagggccacgacctggagttttgtctgtacggaagagaagaacacctaacaacaaatgggtaccggaaaattccaggggacaaatgccagggtggggtaaatccagttcgagaagtaaaagacttgaaaaagaaatgcacaagcaactttttgagtccggaaaaacagaattccaagtcaaattctgttccaattatcctggccatcgtgggattgatgctggtcacagtcgtagcaggagtgctcattgtgaagaaatatgtctgtgggggaaggttcctggtgcatcgatactctgtgctgcagcagcatgcagaggccaatggtgtggatggtgtggatgctttggacacagcctcccacactaataaaagtggttatcatgatgactcagatgaggacctcttggaatagctcttcagaggagctggacccagcatggatggtggaaccacagtacctcttacactccctgtggctccaacttcaggaaataaatttcccattgcgagggacccagctctgtttctgctgcttccatcaaagccaaaaggacctacactaaagaaatgcagggtgggggtggggaaccctgagcacttttttacaattggctctgagaaaaagggagacattttaaattctttaacttcttatttctcgtcctgtctctttgcaaagtatgggcttttttgtttttgttttttaagggaaacgaaatggaattcgaagggaccttttcactaaccccacttctgtgtgttctgcatggcgcctgccccagggcatctgccaactccagtatcagctctcacagtgtacttggtaccatccctgggctctgctggcgagacgaaacagctgtagagatgaaaacaggctgcagaggctggcacagcctggccggcttttctccatctggggacagtcctactccaagaacactgcacaccagctcctcacacagatcccacttactctttttttttttttcagagaccacagaccacagtgatttttcttttcccttgtttaattaggcaatacccttgttaattgccctttggcaactaacttaaccatgtgcttcccacacagtacatcaggaaaacttacagggcaatatttttaacttggggcaggaagaagggagcagcagagaattgactagatatagcacctattaaaagagaactcttgcttcttctgagatttttcaagctgtgctttgtgtgtgtgccagtagacttacgcaaggacagggtacaaacttagctggaagtctgcccaggctgaatgatctcttccctagagttgattgtcgggtacacagtgtgaacccccgaagacggaacctcacagtcttccatgttcccttcttaactgtcgtgtggctcgttgctaaatcatgacaatggctgcctatctgctgcttcttaggttgctgttgtacatggaaccaggactagagattttttcagatttatagacttaaaaaattagaattttattaccaggctttccttctcaccccttttttctgactttgccaagtaatttgttgacacgaaaattttggaggaaccaattgaaaacacacttccagtctagatgatgctttgtgtgatacattaagttcttattttggattaaaagaagttttccatttgatacctctctaaattaaataaattatagaatgtagttgggtggattttggggtggccatatagtaatggaaagctgcaataattagttttaatacagcttgaatatttgctatatagaaatatagtatggaaagtttttggtcttaatgtagctactgtgcgggtcacagtttctcccaatgattatgactgggacattctttggtagataccatttgctactagtttattttgtggctagaaagtcagttttgtgtgtttttttttttttttatttgaagtgccaaattaactttagtcagaatgtgagcagatggctaagttctctcctccccagaatggattaacagctgcgtggaaagtgggggagagagtggatggagacttttagagatgttaaaactgcagtagaatgaaatgagtcagggagcttcagttagaaaataaagttgaggcagtttttgtgaagataatatggttagggctggagtgcactagtctttttgcttattcattttgcatggttttaaaattaaaaataattccgaagatacaccagctcacaaatgaaaacgtcagcctctgccccaccctccctcctgcccaaagtgaatttggtactcagaaaagaactgtttataccactcacctttctcccagcatgtactcactgtgggcagatgcaccaatacatggtaatcctcttactcattttaagacgtaggaaactcaatattcttctctaaccatatacgatagggctcttcgcttttaatgatatctgggatttctgtggaacttggcaaattttcagagcaccttcactcacataatgtcatttgaacctcacaatgttcttgggatggagtcagttgttcagggtccccgtgtgtgtgataagcagtgctggctggctgtcttcagaactcttggaaatctttacacatgcgagtgctaaccactttgagcaaggctgccttcttgtagatgacttgctgttctttatgacagggatcagtggcatttgtttcctagcagtatttagcacctttttgccaccttggtgaacagaaaattgtattttcctgtctttcatggctgaaaacaaaagtaatgggaattttaaatacgtttgcagaaactgcccctcccctcattgagggtcactgctcaagagtgcaggagtggactctccactgatgggtctccctccccatcctggtttccaccccgggctggctagctctgttggtttgaagactgacagccagcctggctcattctcattattggctagttagctttctttatcaacctgctcactcacaaatgtgtgccctcagccagagagtaagaaagcccaaatctgttacagcttctaaaaaaatagatttctaatttgtcctactcatgttaggagcattatctttgaaggtaaaacatagtgtatcattgtgtaaactcccaggcttgatgtagcagaagagatcatttctggaggcttcagcaatggaatttagcattataagagagattggacaaaccagtccaaagtggtccgagttcttaaatccaggtagggaactcactcttctttcttctctggacctaattgggcattgggctttagtgagaccacagaccaggcccgtctctcctgtaggcttttaattcaatggcaactctatttcaaagaataaaagcctttggagagttgcggcagttctgggggcgggctcaggagagtccatagatcagccgtaactggaacgtagaatctacgtctgcctctgaatggacttcccacctcctctctcttgctctgatgcttgcctctgggcctctccatgcccaaggtggtctttcatccttgacaggctggtaatgtgctggccacctccagctcctgcatcgagtctgtaaaccagagctggttctcatggccttcgtcacgataccaggatacggaggggagcccagggccatccatacccaccccagggtaacggggctggcctggcattagtcattatttagtttccaggccaaccatccagatagagattccctctttcctttgagcagtgctctcaagagctccgtgcctgtccacaatgacctagagtgcatcctgctcattgtcagtgtagcccctcgcccctatattcatccaggatacttggaagtgctaaaataggaagggattcggctttcaactttgctaccatcttccctgaagcaggaaaatgaacatggacttaaatgttctttgaaaaaaccaaagttttaagatttgctgtgtgatgaagtgacagggagggccggagtcagcaggtgccagactttctgttctgtctgccatgggtttgtccagctcaggtagctctaggagcaccatcctgccctagcagagcccaggccttgccctcatgaagcatcattgaaatagcaggagcatgttgatttcttggttaggttgcattataataacaagagtcagaacattaattcgaaacaacttgcagtatgcatttcttcacaccagtacattcttaagtgtacttgtttataaggaataacataaactaatctgtacctttatatatatgtgtgtgtacatatatacatatataaactgtatagtgtacatggtaatgatttattgctatgccccagatccttaatgtagttctcatcctccgcatgccctcagccacaagcgggtgactgactgttccctgatgatttggcccacctcctgtgtttggacctctagggaggagggttttggtcatactctccttatcctcgtgcacagaaatgctcagggtccccatgtgcctgttgttcagccctctctcttgttccctttctgagcatgtggtccttccccaggctgtgggacagctgccttcccacgaaagtgtaaagcagtattaagatcattactgcatgtgccctaaaaacccaagttttctattcccttaggacagaaaattgcatgtgaggtgggataatcgagtttcagtgacccacgtcagttacacattaaagccagaccccatgataaaattccacaaaatggaaataaaactcaaatttctttagcattgtgtaaataaatctgaatgtgtttaactttgtactggtaattttctgtatatttggaatatttgggttaaaaataaaacagactggactttgttacctgacctac

SEQ ID NO: 184884 - DNA, 6993 bp, Homo sapiens
  Payload ID: 16404
  Gene Symbol: SORT1
  Gene Name: sortilin 1
  Uniprot ID: Q99523
  ENST ID: ENST00000538502
  CDS Start-End: 434-2518
aaacttatgatgaataaagccaggaactcttgcttattttctgtcctccctctgctcctgtcactaactacttctgtaaacataacttcccaacttctactccaactttaaagcatctggttccttaaataaacaggccctgtagagaggccgtgttgtatggggtgtcagctctgggaagaatgcgtgtgtttgtttgctggctctggcagggttgagtccaagctgacaggactgagtgtgcctgtcagaggcttcagggagctgccgctgaagacctcggcctgttgttgtgaatcgccagacctttgtaacacccggaagtctgaagcatgtgtttgatgatctcagaggctcagtatccttgtcctgggttggagatagcactggggtcattctagtcttgactaccttccatgtaccactggtaattatgacttttggacagtccaagctatatcgaagtgaggattatgggaagaactttaaggatattacagatctcatcaataacacctttattcggactgaatttggcatggctattggtcctgagaactctggaaaggtggtgttaacagcagaggtgtctggaggaagtcgtggaggaagaatctttagatcatcagattttgcgaagaattttgtgcaaacagatctcccttttcatcctctcactcagatgatgtatagccctcagaattctgattatcttttagctctcagcactgaaaatggcctgtgggtgtccaagaattttgggggaaaatgggaagaaatccacaaagcagtatgtttggccaaatggggatcagacaacaccatcttctttacaacctatgcaaatggctcctgcactgaccttggggctctggaattatggagaacttcagacttgggaaaaagcttcaaaactattggtgtgaaaatctactcatttggtcttgggggacgtttcctttttgcctctgtgatggctgataaggatacaacaagaaggatccacgtttcaacagatcaaggggacacatggagcatggcccagctcccctccgtgggacaggaacagttctattctattctggcagcaaatgatgacatggtattcatgcatgtagatgaacctggagacactgggtttggcacaatctttacctcagatgatcgaggcattgtctattccaagtctttggaccgacatctctacactaccacaggcggagagacggactttaccaacgtgacctccctccgcggcgtctacataacaagcgtgctctccgaagataattctatccagaccatgatcacttttgaccaaggaggaaggtggacgcacctgaggaagcctgaaaacagtgaatgtgatgctacagcaaaaaacaagaatgagtgcagccttcatattcatgcttcctacagcatctcccagaaactgaatgttccaatggccccactctcagagccgaatgccgtaggcattgtcattgctcatggtagcgtgggggatgccatctcagtgatggttccagatgtgtacatctcagatgatgggggttactcctggacaaagatgctggaaggaccccactattacaccatcctggattctggaggcatcattgtggccattgagcacagcagccgtcctatcaatgtgattaagttctccacagacgaaggtcaatgctggcaaacctacacgttcaccagggaccccatctatttcactggcctagcttcagaacctggagctaggtccatgaatatcagcatttggggcttcacagaatctttcctgaccagccagtgggtctcctacaccattgattttaaagatatccttgaaaggaactgtgaagagaaggactataccatatggctggcacactccacagaccctgaagattatgaagatggctgcattttgggctacaaagaacagtttctgcggctacgcaagtcatccgtgtgtcagaatggtcgagactatgttgtgaccaagcagccctccatctgcctctgttccctggaggactttctctgtgattttggctactaccgtccagaaaatgactccaagtgtgtggaacagccagaactgaagggccacgacctggagttttgtctgtacggaagagaagaacacctaacaacaaatgggtaccggaaaattccaggggacaaatgccagggtggggtaaatccagttcgagaagtaaaagacttgaaaaagaaatgcacaagcaactttttgagtccggaaaaacagaattccaagtcaaattctgttccaattatcctggccatcgtgggattgatgctggtcacagtcgtagcaggagtgctcattgtgaagaaatatgtctgtgggggaaggttcctggtgcatcgatactctgtgctgcagcagcatgcagaggccaatggtgtggatggtgtggatgctttggacacagcctcccacactaataaaagtggttatcatgatgactcagatgaggacctcttggaatagctcttcagaggagctggacccagcatggatggtggaaccacagtacctcttacactccctgtggctccaacttcaggaaataaatttcccattgcgagggacccagctctgtttctgctgcttccatcaaagccaaaaggacctacactaaagaaatgcagggtgggggtggggaaccctgagcacttttttacaattggctctgagaaaaagggagacattttaaattctttaacttcttatttctcgtcctgtctctttgcaaagtatgggcttttttgtttttgttttttaagggaaacgaaatggaattcgaagggaccttttcactaaccccacttctgtgtgttctgcatggcgcctgccccagggcatctgccaactccagtatcagctctcacagtgtacttggtaccatccctgggctctgctggcgagacgaaacagctgtagagatgaaaacaggctgcagaggctggcacagcctggccggcttttctccatctggggacagtcctactccaagaacactgcacaccagctcctcacacagatcccacttactctttttttttttttcagagaccacagaccacagtgatttttcttttcccttgtttaattaggcaatacccttgttaattgccctttggcaactaacttaaccatgtgcttcccacacagtacatcaggaaaacttacagggcaatatttttaacttggggcaggaagaagggagcagcagagaattgactagatatagcacctattaaaagagaactcttgcttcttctgagatttttcaagctgtgctttgtgtgtgtgccagtagacttacgcaaggacagggtacaaacttagctggaagtctgcccaggctgaatgatctcttccctagagttgattgtcgggtacacagtgtgaacccccgaagacggaacctcacagtcttccatgttcccttcttaactgtcgtgtggctcgttgctaaatcatgacaatggctgcctatctgctgcttcttaggttgctgttgtacatggaaccaggactagagattttttcagatttatagacttaaaaaattagaattttattaccaggctttccttctcaccccttttttctgactttgccaagtaatttgttgacacgaaaattttggaggaaccaattgaaaacacacttccagtctagatgatgctttgtgtgatacattaagttcttattttggattaaaagaagttttccatttgatacctctctaaattaaataaattatagaatgtagttgggtggattttggggtggccatatagtaatggaaagctgcaataattagttttaatacagcttgaatatttgctatatagaaatatagtatggaaagtttttggtcttaatgtagctactgtgcgggtcacagtttctcccaatgattatgactgggacattctttggtagataccatttgctactagtttattttgtggctagaaagtcagttttgtgtgtttttttttttttttatttgaagtgccaaattaactttagtcagaatgtgagcagatggctaagttctctcctccccagaatggattaacagctgcgtggaaagtgggggagagagtggatggagacttttagagatgttaaaactgcagtagaatgaaatgagtcagggagcttcagttagaaaataaagttgaggcagtttttgtgaagataatatggttagggctggagtgcactagtctttttgcttattcattttgcatggttttaaaattaaaaataattccgaagatacaccagctcacaaatgaaaacgtcagcctctgccccaccctccctcctgcccaaagtgaatttggtactcagaaaagaactgtttataccactcacctttctcccagcatgtactcactgtgggcagatgcaccaatacatggtaatcctcttactcattttaagacgtaggaaactcaatattcttctctaaccatatacgatagggctcttcgcttttaatgatatctgggatttctgtggaacttggcaaattttcagagcaccttcactcacataatgtcatttgaacctcacaatgttcttgggatggagtcagttgttcagggtccccgtgtgtgtgataagcagtgctggctggctgtcttcagaactcttggaaatctttacacatgcgagtgctaaccactttgagcaaggctgccttcttgtagatgacttgctgttctttatgacagggatcagtggcatttgtttcctagcagtatttagcacctttttgccaccttggtgaacagaaaattgtattttcctgtctttcatggctgaaaacaaaagtaatgggaattttaaatacgtttgcagaaactgcccctcccctcattgagggtcactgctcaagagtgcaggagtggactctccactgatgggtctccctccccatcctggtttccaccccgggctggctagctctgttggtttgaagactgacagccagcctggctcattctcattattggctagttagctttctttatcaacctgctcactcacaaatgtgtgccctcagccagagagtaagaaagcccaaatctgttacagcttctaaaaaaatagatttctaatttgtcctactcatgttaggagcattatctttgaaggtaaaacatagtgtatcattgtgtaaactcccaggcttgatgtagcagaagagatcatttctggaggcttcagcaatggaatttagcattataagagagattggacaaaccagtccaaagtggtccgagttcttaaatccaggtagggaactcactcttctttcttctctggacctaattgggcattgggctttagtgagaccacagaccaggcccgtctctcctgtaggcttttaattcaatggcaactctatttcaaagaataaaagcctttggagagttgcggcagttctgggggcgggctcaggagagtccatagatcagccgtaactggaacgtagaatctacgtctgcctctgaatggacttcccacctcctctctcttgctctgatgcttgcctctgggcctctccatgcccaaggtggtctttcatccttgacaggctggtaatgtgctggccacctccagctcctgcatcgagtctgtaaaccagagctggttctcatggccttcgtcacgataccaggatacggaggggagcccagggccatccatacccaccccagggtaacggggctggcctggcattagtcattatttagtttccaggccaaccatccagatagagattccctctttcctttgagcagtgctctcaagagctccgtgcctgtccacaatgacctagagtgcatcctgctcattgtcagtgtagcccctcgcccctatattcatccaggatacttggaagtgctaaaataggaagggattcggctttcaactttgctaccatcttccctgaagcaggaaaatgaacatggacttaaatgttctttgaaaaaaccaaagttttaagatttgctgtgtgatgaagtgacagggagggccggagtcagcaggtgccagactttctgttctgtctgccatgggtttgtccagctcaggtagctctaggagcaccatcctgccctagcagagcccaggccttgccctcatgaagcatcattgaaatagcaggagcatgttgatttcttggttaggttgcattataataacaagagtcagaacattaattcgaaacaacttgcagtatgcatttcttcacaccagtacattcttaagtgtacttgtttataaggaataacataaactaatctgtacctttatatatatgtgtgtgtacatatatacatatataaactgtatagtgtacatggtaatgatttattgctatgccccagatccttaatgtagttctcatcctccgcatgccctcagccacaagcgggtgactgactgttccctgatgatttggcccacctcctgtgtttggacctctagggaggagggttttggtcatactctccttatcctcgtgcacagaaatgctcagggtccccatgtgcctgttgttcagccctctctcttgttccctttctgagcatgtggtccttccccaggctgtgggacagctgccttcccacgaaagtgtaaagcagtattaagatcattactgcatgtgccctaaaaacccaagttttctattcccttaggacagaaaattgcatgtgaggtgggataatcgagtttcagtgacccacgtcagttacacattaaagccagaccccatgataaaattccacaaaatggaaataaaactcaaatttctttagcattgtgtaaataaatctgaatgtgtttaactttgtactggtaattttctgtatatttggaatatttgggttaaaaataaaacagactggactttgttacctgacctactg

SEQ ID NO: 184885 - DNA, 469 bp, Homo sapiens
  Payload ID: 16404
  Gene Symbol: SORT1
  Gene Name: sortilin 1
  ENST ID: ENST00000471996
  CDS Start-End: 1-314
tctcgcgctggccccatggcctcggcctcctcctcctcctgcagctgctgccgccgtcgaccctcagccaggaccggctggacgcgccgccgccgcccgctgcgccgctgccgcgctggtctggccccatcggggtgagctgggggctgcgggcggccgcagccgggggcgcgtttccccgcggcggccgttggcgtcgcagcgcgccgggcgaggacgaggagtgcggccgggtccgggacttcgtcgccaagctggccaacaacacgcaccagttgtcaaaatctcttgaacatcgtttttcgtctgtataaataatcaggacccagtaacgctgttaggccccaggaaggtgaaggagtaattaactcttgagcgcttgcagaagttgggctgcgcagaagcaaagcatgtgtttgatgatctcagaggctcagtatccttgtcctgggttggagatagcactggg

SEQ ID NO: 184886 - DNA, 615 bp, Homo sapiens
  Payload ID: 16404
  Gene Symbol: SORT1
  Gene Name: sortilin 1
  ENST ID: ENST00000482236
  CDS Start-End: 434-615
aaacttatgatgaataaagccaggaactcttgcttattttctgtcctccctctgctcctgtcactaactacttctgtaaacataacttcccaacttctactccaactttaaagcatctggttccttaaataaacaggccctgtagagaggccgtgttgtatggggtgtcagctctgggaagaatgcgtgtgtttgtttgctggctctggcagggttgagtccaagctgacaggactgagtgtgcctgtcagaggcttcagggagctgccgctgaagacctcggcctgttgttgtgaatcgccagacctttgtaacacccggaagtctgaagcatgtgtttgatgatctcagaggctcagtatccttgtcctgggttggagatagcactggggtcattctagtcttgactaccttccatgtaccactggtaattatgacttttggacagtccaagctatatcgaagtgaggattatgggaagaactttaaggatattacagatctcatcaataacacctttattcggactgaatttggcatggctattggtcctgagaactctggaaaggtggtgttaacagcagaggtgtctggaggaagtcgtggaggaagaat

SEQ ID NO: 184887 - DNA, 583 bp, Homo sapiens
  Payload ID: 16404
  Gene Symbol: SORT1
  Gene Name: sortilin 1
  ENST ID: ENST00000493736
  CDS Start-End: 228-583
agacatgaggctagagctggaggaaccagaggtagaaatggggagccaagaagagttcccctttcagaggccggccattgctttggtcttggatgtgaaggtcccagaggaaagcagaacagaagcatgtgtttgatgatctcagaggctcagtatccttgtcctgggttggagatagcactggggtcattctagtcttgactaccttccatgtaccactggtaattatgacttttggacagtccaagctatatcgaagtgaggattatgggaagaactttaaggatattacagatctcatcaataacacctttattcggactgaatttggcatggctattggtcctgagaactctggaaaggtggtgttaacagcagaggtgtctggaggaagtcgtggaggaagaatctttagatcatcagattttgcgaagaattttgtgcaaacagatctcccttttcatcctctcactcagatgatgtatagccctcagaattctgattatcttttagctctcagcactgaaaatggcctgtgggtgtccaagaattttgggggaaaatgggaagaaatccacaaagc

SEQ ID NO: 184888 - DNA, 561 bp, Homo sapiens
  Payload ID: 16404
  Gene Symbol: SORT1
  Gene Name: sortilin 1
  ENST ID: ENST00000633956
  CDS Start-End: 501-561
atttcttccaatacttggcctctcttcatcctaccttccctagcacccccagccgtctagcttatttaatagtctcttgagttctgtttcttccattcagctttggatcaaggagtaggaactctgtaggatctccttcttggtcctggttgagcagagtgagcgaaaccttcatgaagagtcttctctcatgcaatgtatagtcagacctttagcccctagagggatgttaaaatgacttatgcattggatatttcagtaagaagtatcagcagatttgatgaagtgtaatttatctggggaaaggttagtcttcatctgaagtttggttgggatgagagtagaaagctagccaggtatgacagatggctccaagggaatgcagtgttaacaattagcatgtgtttgatgatctcagaggctcagtatccttgtcctgggttggagatagcactggggtcattctagtcttgactaccttccatgtaccactggtaattatgacttttggacagtccaagctatatcgaagtgaggattatgggaagaactttaaggata

SEQ ID NO: 184889 - DNA, 10904 bp, Homo sapiens
  Payload ID: 16405
  Gene Symbol: SORL1
  Gene Name: sortilin-related receptor, L(DLR class) A repeats containing
  Uniprot ID: Q92673
  ENST ID: ENST00000260197
  CDS Start-End: 130-6774
cccggagcggcgcgggcggcctggagccccgggagcggcgcgcgcggtcccggcccagcggctctcctggcctcgcgctgcacattctctcctggcggcggcgccacctgcagtagcgttcgcccgaacatggcgacacggagcagcaggagggagtcgcgactcccgttcctattcaccctggtcgcactgctgccgcccggagctctctgcgaagtctggacgcagaggctgcacggcggcagcgcgcccttgccccaggaccggggcttcctcgtggtgcagggcgacccgcgcgagctgcggctgtgggcgcgcggggatgccaggggggcgagccgcgcggacgagaagccgctccggaggaaacggagcgctgccctgcagcccgagcccatcaaggtgtacggacaggttagtctgaatgattcccacaatcagatggtggtgcactgggctggagagaaaagcaacgtgatcgtggccttggcccgagatagcctggcattggcgaggcccaagagcagtgatgtgtacgtgtcttacgactatggaaaatcattcaagaaaatttcagacaagttaaactttggcttgggaaataggagtgaagctgttatcgcccagttctaccacagccctgcggacaacaagcggtacatctttgcagacgcttatgcccagtacctctggatcacgtttgacttctgcaacactcttcaaggcttttccatcccatttcgggcagctgatctcctcctacacagtaaggcctccaaccttctcttgggctttgacaggtcccaccccaacaagcagctgtggaagtcagatgactttggccagacctggatcatgattcaggaacatgtcaagtccttttcttggggaattgatccctatgacaaaccaaataccatctacattgaacgacatgaaccctctggctactccactgtcttccgaagtacagatttcttccagtcccgggaaaaccaggaagtgatccttgaggaagtgagagattttcagcttcgggacaagtacatgtttgctacaaaggtggtgcatctcttgggcagtgaacagcagtcttctgtccagctctgggtctcctttggccggaagcccatgagagcagcccagtttgtcacaagacatcctattaatgaatattacatcgcagatgcctccgaggaccaggtgtttgtgtgtgtcagccacagtaacaaccgcaccaatttatacatctcagaggcagaggggctgaagttctccctgtccttggagaacgtgctctattacagcccaggaggggccggcagtgacaccttggtgaggtattttgcaaatgaaccatttgctgacttccaccgagtggaaggattgcaaggagtctacattgctactctgattaatggttctatgaatgaggagaacatgagatcggtcatcacctttgacaaagggggaacctgggagtttcttcaggctccagccttcacgggatatggagagaaaatcaattgtgagctttcccagggctgttcccttcatctggctcagcgcctcagtcagctcctcaacctccagctccggagaatgcccatcctgtccaaggagtcggctccaggcctcatcatcgccactggctcagtgggaaagaacttggctagcaagacaaacgtgtacatctctagcagtgctggagccaggtggcgagaggcacttcctggacctcactactacacatggggagaccacggcggaatcatcacggccattgcccagggcatggaaaccaacgagctaaaatacagtaccaatgaaggggagacctggaaaacattcatcttctctgagaagccagtgtttgtgtatggcctcctcacagaacctggggagaagagcactgtcttcaccatctttggctcgaacaaagagaatgtccacagctggctgatcctccaggtcaatgccacggatgccttgggagttccctgcacagagaatgactacaagctgtggtcaccatctgatgagcgggggaatgagtgtttgctgggacacaagactgttttcaaacggcggaccccccatgccacatgcttcaatggagaggactttgacaggccggtggtcgtgtccaactgctcctgcacccgggaggactatgagtgtgacttcggtttcaagatgagtgaagatttgtcattagaggtttgtgttccagatccggaattttctggaaagtcatactcccctcctgtgccttgccctgtgggttctacttacaggagaacgagaggctaccggaagatttctggggacacttgtagcggaggagatgttgaagcgcgactggaaggagagctggtcccctgtcccctggcagaagagaacgagttcattctgtatgctgtgaggaaatccatctaccgctatgacctggcctcgggagccaccgagcagttgcctctcaccgggctacgggcagcagtggccctggactttgactatgagcacaactgtttgtattggtccgacctggccttggacgtcatccagcgcctctgtttgaatggaagcacagggcaagaggtgatcatcaattctggcctggagacagtagaagctttggcttttgaacccctcagccagctgctttactgggtagatgcaggcttcaaaaagattgaggtagctaatccagatggcgacttccgactcacaatcgtcaattcctctgtgcttgatcgtcccagggctctggtcctcgtgccccaagagggggtgatgttctggacagactggggagacctgaagcctgggatttatcggagcaatatggatggttctgctgcctatcacctggtgtctgaggatgtgaagtggcccaatggcatctctgtggacgaccagtggatttactggacggatgcctacctggagtgcatagagcggatcacgttcagtggccagcagcgctctgtcattctggacaacctcccgcacccctatgccattgctgtctttaagaatgaaatctactgggatgactggtcacagctcagcatattccgagcttccaaatacagtgggtcccagatggagattctggcaaaccagctcacggggctcatggacatgaagattttctacaaggggaagaacactggaagcaatgcctgtgtgcccaggccatgcagcctgctgtgcctgcccaaggccaacaacagtagaagctgcaggtgtccagaggatgtgtccagcagtgtgcttccatcaggggacctgatgtgtgactgccctcagggctatcagctcaagaacaatacctgtgtcaaacaagagaacacctgtcttcgcaaccagtatcgctgcagcaacgggaactgtatcaacagcatttggtggtgtgactttgacaacgactgtggagacatgagcgatgagagaaactgccctaccaccatctgtgacctggacacccagtttcgttgccaggagtctgggacttgtatcccactgtcctataaatgtgaccttgaggatgactgtggagacaacagtgatgaaagtcattgtgaaatgcaccagtgccggagtgacgagtacaactgcagttccggcatgtgcatccgctcctcctgggtatgtgacggggacaacgactgcagggactggtctgatgaagccaactgtaccgccatctatcacacctgtgaggcctccaacttccagtgccgaaacgggcactgcatcccccagcggtgggcgtgtgacggggatacggactgccaggatggttccgatgaggatccagtcaactgtgagaagaagtgcaatggattccgctgcccaaacggcacttgcatcccatccagcaaacattgtgatggtctgcgtgattgctctgatggctccgatgaacagcactgcgagcccctctgtacgcacttcatggactttgtgtgtaagaaccgccagcagtgcctgttccactccatggtctgtgacggaatcatccagtgccgcgacgggtccgatgaggatgcggcgtttgcaggatgctcccaagatcctgagttccacaaggtatgtgatgagttcggtttccagtgtcagaatggagtgtgcatcagtttgatttggaagtgcgacgggatggatgattgcggcgattattctgatgaagccaactgcgaaaaccccacagaagccccaaactgctcccgctacttccagtttcggtgtgagaatggccactgcatccccaacagatggaaatgtgacagggagaacgactgtggggactggtctgatgagaaggattgtggagattcacatattcttcccttctcgactcctgggccctccacgtgtctgcccaattactaccgctgcagcagtgggacctgcgtgatggacacctgggtgtgcgacgggtaccgagattgtgcagatggctctgacgaggaagcctgccccttgcttgcaaacgtcactgctgcctccactcccacccaacttgggcgatgtgaccgatttgagttcgaatgccaccaaccgaagacgtgtattcccaactggaagcgctgtgacggccaccaagattgccaggatggccgggacgaggccaattgccccacacacagcaccttgacttgcatgagcagggagttccagtgcgaggacggggaggcctgcattgtgctctcggagcgctgcgacggcttcctggactgctcggacgagagcgatgaaaaggcctgcagtgatgagttgactgtgtacaaagtacagaatcttcagtggacagctgacttctctggggatgtgactttgacctggatgaggcccaaaaaaatgccctctgcttcttgtgtatataatgtctactacagggtggttggagagagcatatggaagactctggagacccacagcaataagacaaacactgtattaaaagtcttgaaaccagataccacgtatcaggttaaagtacaggttcagtgtctcagcaaggcacacaacaccaatgactttgtgaccctgaggaccccagagggattgccagatgcccctcgaaatctccagctgtcactccccagggaagcagaaggtgtgattgtaggccactgggctcctcccatccacacccatggcctcatccgtgagtacattgtagaatacagcaggagtggttccaagatgtgggcctcccagagggctgctagtaactttacagaaatcaagaacttattggtcaacactctatacaccgtcagagtggctgcggtgactagtcgtggaataggaaactggagcgattctaaatccattaccaccataaaaggaaaagtgatcccaccaccagatatccacattgacagctatggtgaaaattatctaagcttcaccctgaccatggagagtgatatcaaggtgaatggctatgtggtgaaccttttctgggcatttgacacccacaagcaagagaggagaactttgaacttccgaggaagcatattgtcacacaaagttggcaatctgacagctcatacatcctatgagatttctgcctgggccaagactgacttgggggatagccctctggcatttgagcatgttatgaccagaggggttcgcccacctgcacctagcctcaaggccaaagccatcaaccagactgcagtggaatgtacctggaccggcccccggaatgtggtttatggtattttctatgccacgtcctttcttgacctctatcgcaacccgaagagcttgactacttcactccacaacaagacggtcattgtcagtaaggatgagcagtatttgtttctggtccgtgtagtggtaccctaccaggggccatcctctgactacgttgtagtgaagatgatcccggacagcaggcttccaccccgtcacctgcatgtggttcatacgggcaaaacctccgtggtcatcaagtgggaatcaccgtatgactctcctgaccaggacttgttgtatgcagttgcagtcaaagatctcataagaaagactgacaggagctacaaagtaaaatcccgtaacagcactgtggaatacacccttaacaagttggagcctggcgggaaataccacatcattgtccaactggggaacatgagcaaagattccagcataaaaattaccacagtttcattatcagcacctgatgccttaaaaatcataacagaaaatgatcatgttcttctgttttggaaaagcctggctttaaaggaaaagcattttaatgaaagcaggggctatgagatacacatgtttgatagtgccatgaatatcacagcttaccttgggaatactactgacaatttctttaaaatttccaacctgaagatgggtcataattacacgttcaccgtccaagcaagatgcctttttggcaaccagatctgtggggagcctgccatcctgctgtacgatgagctggggtctggtgcagatgcatctgcaacgcaggctgccagatctacggatgttgctgctgtggtggtgcccatcttattcctgatactgctgagcctgggggtggggtttgccatcctgtacacgaagcaccggaggctgcagagcagcttcaccgccttcgccaacagccactacagctccaggctggggtccgcaatcttctcctctggggatgacctgggggaagatgatgaagatgcccctatgataactggattttcagatgacgtccccatggtgatagcctgaaagagctttcctcactagaaaccaaatggtgtaaatattttatttgataaagatagttgatggtttattttaaaagatgcactttgagttgcaatatgttatttttatatgggccaaaaacaaaaaacaaaaaaaaaaaaaaggaaagaaaggaatgaataaactttgtagtaatcaactgtgaacttcaaaccaggttgattttagtaacccaattgctttgatttgacattaatgtagtcttacagggctgtgcttgctgggcatgcttttacgtctgtgagataatttcggttcagtaaattggccaatctttttatttttctaagacacagaaatgtatttaataaaaacctcgagagagtgatgggtggaaccccttctccttgaaagtgtgtacagatattccattttgtttggatatagtttataggaaagtgtgtggatgtattatggcggaaggtttctttatgttattttgttaatttattgggactctgtgtaaggccaggctttagtggtcattagacaccacatgtgttatgagccccttacccatagggttgggggtgggaagagaagcatatttttttgccattccggaagcaatccatttttattcacttgtgtgtcatgtaatggtctttggcaggagagagcactgagtcattgctggagttcagttcaacagagctgcagcttgggaagccctgtaagcccacagcttcctctcttatattaattgatggaattttactgtatgtgcctctgtacaagatgtagctttgagagctacaaaatgataacactgctttattacacactggtttcattgtcattgcaaaaacttaccctggttgtgggggagagttctagatctgtgccatgatccatacactggctaatagagtacataatttttccattttccattttttgtttttacttactactgaaggatctcagatgtaaaattatgtatttggtttgagatggccacttattgtccttaaaaatccatactgatatatgcagtcattttgaattggacagtgccttctctttttttttctcctcttcttccatctccctcacccatgcccccacccaatctaaagagacagtgctgtacattctcatagagatagagaagatctaaaaagttgagactactcaatccagttaacaacagcaggagcactagagtttgttcatttattctctctgtaaaacaagctgtgctttttttcttctgcctttaaaatgccacccgtgtattcaaaccatggccacttgatacttatgtagaatccatcgtgggctgatgcaagccctttatttaggcttagtgttgtgggcaccaatgtcgagcatcgttgtgacttgtgctgtatgattctcactgaagaatttcctttcagccaagaagcagtgaggtctgggaatattccaaagtcatgtctctgaatatgtgtccttgacgtgcaagctttgtaaaaccccatccccgcttaggtgcgaggcatcaccttctcacaagtgtttagtttcttttaaccacaagtatcattcttgggtgataatatagtttcattctacttagggattgtttagaaaacaaagaaagagccaattaaattttttagtttttgaaatttttatttatatgtatacttagatgagtattttaagctgtcgacctttagtttgccatacgggtaggactgtatttcatgttaacaactggtggtaatgataagccttcttctagcgtattttctcttctttcctgtcactttcctaagtttttttttttaaagactggaattttttttggctttatcttgtcttaccgtagagatttgttcaaaactctaagccctaccacctcccctttaataagctctttaaatagttgaatcattaacaacctggtgggaggcaagtcatttaattgaaccactaggaagtgtattttcttttctttttctgccaactttttggtggcatttgtaaaagctgatataaaaggctctgagatgttattttcagttattccataggcaagcctttttacagagcatatgtctccagttggcagcttgagatatttccgagcatccggttctagctaccagtgcctcccaatgcttagtgcacagtactgtagactggccatcacccctctccttggaaaatgccactgtgctgtttgaaaaaaagcagccttttagggctagagtattttatataaacagaagagctaagttcctgaagactaagctagatagctgcagctatatgtaaattgtatatttttatgaacttttgaagcacacactcctgtttccctctgtgtagctttgtggggatttcatgtatatatgctgtctgaaagaatccagaggttggagtgccaatagaaaatgaaaacaaatgccttgtactacaggcagcctctgaaggtgaccacataactgtcttcactgtgaccaatcggagtccctgcttgcttgtgaagaaggggcttttgtaccttgttggagatgccacctcagaagttcacactgtgcaggaaaaaggttttattctctcctggcatacattagaatgtcagatgcttgcatccatgtggaccacgatgggcctctaaaaattggtgggcagggggtttgcttatgagttttctctggaaaccgattttactcctggatgtattgaatgccccttgagctttatgagatacgagtccacatggataaaatgttagagagtggagttctacagaggattccaggaagaggccatgtctgtgcagtcctagttccagacaggtgagaagctccaggaactactggctaccttgacaagctgggtaaatagttatcattctgggtaactggttgaaactctgacttttggacaagtaattcctggggttctgtctttggtagcatcaccagggatatttgggtgggacagacagaagacacacagctgcctgttctctcctgcccatcatgtttggcccactagatgaagctgtactcagcaatttagggaatgtaacccttctcagaactggccattttcaggggaagcttgggagagcaatagtatggtgagccccttagagatgagcgcctactccttcttggcgaatgctgccttcagatgcttaccaagtggtcactgcatctagtaagattatatttccagtacacttccttagggcagaaacaccatcctatcaggtttggtcagtcccttcttcatgaagggagtcatggggaattcctgaaaattttcttccttctgcagacagttggatgagtcccttagagaaggcatccagagacataactaaactgaatatcatcccatattgattttaggaattgactctaaaactctgtgcagaatcttgtgttgggattgtatcttgacattcctgttgtgttatttttcttaactggagtgtgtgctgcctttcaggtacaatttttgtgtaataaaagccagtgcattaagtttatatagactactttctatgcaagactgagatatggaatagataggaagagatatgtactgctgggtacatggacagtaagtgtgttttcagatggagtaccagcaccgaaaatgggttgagggaggatgggttgtatgtatgtttctgcccactaattttgagcagccatattatgaattaaatcgtcacagccaagtaataacccaagaatggtatgagtttcatgtgtaatagctcaaatggaataagcatgaatgctggagtggaccattatcctcaaatattctatgtcacttctcatttaaagactcttgttatgaactattagaaactttaggcaaaatcaaaagtatttgcggcaaaataaaggcctattctactcttatttaaagtgaaacactgtatacttgtttctctccaaagcgaaattaagtatttataatttcaattgcctcgataagtttccaagtcactgaaatctgctgaaggttttactgtattgttgcacaactttaagataatttttgtctcaatgtcaacttttttcactgaataaaaatttaactgggtcaagaaaacacctctttgaaaatcc

SEQ ID NO: 184890 - DNA, 3692 bp, Homo sapiens
  Payload ID: 16405
  Gene Symbol: SORL1
  Gene Name: sortilin-related receptor, L(DLR class) A repeats containing
  ENST ID: ENST00000532694
  CDS Start-End: 382-3564
acagaaagtcccgagttatgtttcctccgttttgggagctcagcactgattttactctctctgactgagcatctcacggtgatcagctcatgcagacctctcggcactccttttctcaaaccacaggctgtgtctgtaggagtcctctgtttcttgaaagttctacttcctggcctcctctatcactgcttcctaaccttcttcccatcatagcaagcatagaaaataatatatgtggagagcactgggatgaatggacaaggatgctgttgtcaagaggcaagcagctctaagggtctgagggtctcagaatctcagcccacctgtaacccatttgcagcacactgactggaagctgttaaatgaccttttgtccctgaaatgcaccagtgccggagtgacgagtacaactgcagttccggcatgtgcatccgctcctcctgggtatgtgacggggacaacgactgcagggactggtctgatgaagccaactgtaccgccatctatcacacctgtgaggcctccaacttccagtgccgaaacgggcactgcatcccccagcggtgggcgtgtgacggggatacggactgccaggatggttccgatgaggatccagtcaactgtgagaagaagtgcaatggattccgctgcccaaacggcacttgcatcccatccagcaaacattgtgatggtctgcgtgattgctctgatggctccgatgaacagcactgcgagcccctctgtacgcacttcatggactttgtgtgtaagaaccgccagcagtgcctgttccactccatggtctgtgacggaatcatccagtgccgcgacgggtccgatgaggatgcggcgtttgcaggatgctcccaagatcctgagttccacaaggtatgtgatgagttcggtttccagtgtcagaatggagtgtgcatcagtttgatttggaagtgcgacgggatggatgattgcggcgattattctgatgaagccaactgcgaaaaccccacagaagccccaaactgctcccgctacttccagtttcggtgtgagaatggccactgcatccccaacagatggaaatgtgacagggagaacgactgtggggactggtctgatgagaaggattgtggagattcacatattcttcccttctcgactcctgggccctccacgtgtctgcccaattactaccgctgcagcagtgggacctgcgtgatggacacctgggtgtgcgacgggtaccgagattgtgcagatggctctgacgaggaagcctgccccttgcttgcaaacgtcactgctgcctccactcccacccaacttgggcgatgtgaccgatttgagttcgaatgccaccaaccgaagacgtgtattcccaactggaagcgctgtgacggccaccaagattgccaggatggccgggacgaggccaattgccccacacacagcaccttgacttgcatgagcagggagttccagtgcgaggacggggaggcctgcattgtgctctcggagcgctgcgacggcttcctggactgctcggacgagagcgatgaaaaggcctgcagtgatgagttgactgtgtacaaagtacagaatcttcagtggacagctgacttctctggggatgtgactttgacctggatgaggcccaaaaaaatgccctctgcttcttgtgtatataatgtctactacagggtggttggagagagcatatggaagactctggagacccacagcaataagacaaacactgtattaaaagtcttgaaaccagataccacgtatcaggttaaagtacaggttcagtgtctcagcaaggcacacaacaccaatgactttgtgaccctgaggaccccagagggattgccagatgcccctcgaaatctccagctgtcactccccagggaagcagaaggtgtgattgtaggccactgggctcctcccatccacacccatggcctcatccgtgagtacattgtagaatacagcaggagtggttccaagatgtgggcctcccagagggctgctagtaactttacagaaatcaagaacttattggtcaacactctatacaccgtcagagtggctgcggtgactagtcgtggaataggaaactggagcgattctaaatccattaccaccataaaaggaaaagtgatcccaccaccagatatccacattgacagctatggtgaaaattatctaagcttcaccctgaccatggagagtgatatcaaggtgaatggctatgtggtgaaccttttctgggcatttgacacccacaagcaagagaggagaactttgaacttccgaggaagcatattgtcacacaaagttggcaatctgacagctcatacatcctatgagatttctgcctgggccaagactgacttgggggatagccctctggcatttgagcatgttatgaccagaggggttcgcccacctgcacctagcctcaaggccaaagccatcaaccagactgcagtggaatgtacctggaccggcccccggaatgtggtttatggtattttctatgccacgtcctttcttgacctctatcgcaacccgaagagcttgactacttcactccacaacaagacggtcattgtcagtaaggatgagcagtatttgtttctggtccgtgtagtggtaccctaccaggggccatcctctgactacgttgtagtgaagatgatcccggacagcaggcttccaccccgtcacctgcatgtggttcatacgggcaaaacctccgtggtcatcaagtgggaatcaccgtatgactctcctgaccaggacttgttgtatgcagttgcagtcaaagatctcataagaaagactgacaggagctacaaagtaaaatcccgtaacagcactgtggaatacacccttaacaagttggagcctggcgggaaataccacatcattgtccaactggggaacatgagcaaagattccagcataaaaattaccacagtttcattatcagcacctgatgccttaaaaatcataacagaaaatgatcatgttcttctgttttggaaaagcctggctttaaaggaaaagcattttaatgaaagcaggggctatgagatacacatgtttgatagtgccatgaatatcacagcttaccttgggaatactactgacaatttctttaaaatttccaacctgaagatgggtcataattacacgttcaccgtccaagcaagatgcctttttggcaaccagatctgtggggagcctgccatcctgctgtacgatgagctggggtctggtgcagatgcatctgcaacgcaggctgccagatctacggatgttgctgctgtggtggtgcccatcttattcctgatactgctgagcctgggggtggggtttgccatcctgtacacgaagcaccggaggctgcagagcagcttcaccgccttcgccaacagccactacagctccaggctggggtccgcaatcttctcctctggggatgacctgggggaagatgatgaagatgcccctatgataactggattttcagatgacgtccccatggtgatagcctgaaagagctttcctcactagaaaccaaatggtgtaaatattttatttgataaagatagttgatggtttattttaaaagatgcactttgagttgcaatatgttatttttatatgggccaaaaacaaaaaac

SEQ ID NO: 184891 - DNA, 3836 bp, Homo sapiens
  Payload ID: 16405
  Gene Symbol: SORL1
  Gene Name: sortilin-related receptor, L(DLR class) A repeats containing
  ENST ID: ENST00000525532
  CDS Start-End: 239-3715
agtctgatctggctgaagacaggatgcaagtcactggttatactgagcagaagttttcagcacagtaggcgccccaaagcttgccacttgacccttgagagcttctcgctgtcctttccgaagcaatgcctgtgtgcccaggccatgcagcctgctgtgcctgcccaaggccaacaacagtagaagctgcaggtgtccagaggatgtgtccagcagtgtgcttccatcaggggacctgatgtgtgactgccctcagggctatcagctcaagaacaatacctgtgtcaaacaagagaacacctgtcttcgcaaccagtatcgctgcagcaacgggaactgtatcaacagcatttggtggtgtgactttgacaacgactgtggagacatgagcgatgagagaaactgccctaccaccatctgtgacctggacacccagtttcgttgccaggagtctgggacttgtatcccactgtcctataaatgtgaccttgaggatgactgtggagacaacagtgatgaaagtcattgtgaaatgcaccagtgccggagtgacgagtacaactgcagttccggcatgtgcatccgctcctcctgggtatgtgacggggacaacgactgcagggactggtctgatgaagccaactgtaccgccatctatcacacctgtgaggcctccaacttccagtgccgaaacgggcactgcatcccccagcggtgggcgtgtgacggggatacggactgccaggatggttccgatgaggatccagtcaactgtgagaagaagtgcaatggattccgctgcccaaacggcacttgcatcccatccagcaaacattgtgatggtctgcgtgattgctctgatggctccgatgaacagcactgcgagcccctctgtacgcacttcatggactttgtgtgtaagaaccgccagcagtgcctgttccactccatggtctgtgacggaatcatccagtgccgcgacgggtccgatgaggatgcggcgtttgcaggatgctcccaagatcctgagttccacaaggtatgtgatgagttcggtttccagtgtcagaatggagtgtgcatcagtttgatttggaagtgcgacgggatggatgattgcggcgattattctgatgaagccaactgcgaaaaccccacagaagccccaaactgctcccgctacttccagtttcggtgtgagaatggccactgcatccccaacagatggaaatgtgacagggagaacgactgtggggactggtctgatgagaaggattgtggagattcacatattcttcccttctcgactcctgggccctccacgtgtctgcccaattactaccgctgcagcagtgggacctgcgtgatggacacctgggtgtgcgacgggtaccgagattgtgcagatggctctgacgaggaagcctgccccttgcttgcaaacgtcactgctgcctccactcccacccaacttgggcgatgtgaccgatttgagttcgaatgccaccaaccgaagacgtgtattcccaactggaagcgctgtgacggccaccaagattgccaggatggccgggacgaggccaattgccccacacacagcaccttgacttgcatgagcagggagttccagtgcgaggacggggaggcctgcattgtgctctcggagcgctgcgacggcttcctggactgctcggacgagagcgatgaaaaggcctgcagtgatgagttgactgtgtacaaagtacagaatcttcagtggacagctgacttctctggggatgtgactttgacctggatgaggcccaaaaaaatgccctctgcttcttgtgtatataatgtctactacagggtggttggagagagcatatggaagactctggagacccacagcaataagacaaacactgtattaaaagtcttgaaaccagataccacgtatcaggttaaagtacaggttcagtgtctcagcaaggcacacaacaccaatgactttgtgaccctgaggaccccagagggattgccagatgcccctcgaaatctccagctgtcactccccagggaagcagaaggtgtgattgtaggccactgggctcctcccatccacacccatggcctcatccgtgagtacattgtagaatacagcaggagtggttccaagatgtgggcctcccagagggctgctagtaactttacagaaatcaagaacttattggtcaacactctatacaccgtcagagtggctgcggtgactagtcgtggaataggaaactggagcgattctaaatccattaccaccataaaaggaaaagtgatcccaccaccagatatccacattgacagctatggtgaaaattatctaagcttcaccctgaccatggagagtgatatcaaggtgaatggctatgtggtgaaccttttctgggcatttgacacccacaagcaagagaggagaactttgaacttccgaggaagcatattgtcacacaaagttggcaatctgacagctcatacatcctatgagatttctgcctgggccaagactgacttgggggatagccctctggcatttgagcatgttatgaccagaggggttcgcccacctgcacctagcctcaaggccaaagccatcaaccagactgcagtggaatgtacctggaccggcccccggaatgtggtttatggtattttctatgccacgtcctttcttgacctctatcgcaacccgaagagcttgactacttcactccacaacaagacggtcattgtcagtaaggatgagcagtatttgtttctggtccgtgtagtggtaccctaccaggggccatcctctgactacgttgtagtgaagatgatcccggacagcaggcttccaccccgtcacctgcatgtggttcatacgggcaaaacctccgtggtcatcaagtgggaatcaccgtatgactctcctgaccaggacttgttgtatgcagttgcagtcaaagatctcataagaaagactgacaggagctacaaagtaaaatcccgtaacagcactgtggaatacacccttaacaagttggagcctggcgggaaataccacatcattgtccaactggggaacatgagcaaagattccagcataaaaattaccacagtttcattatcagcacctgatgccttaaaaatcataacagaaaatgatcatgttcttctgttttggaaaagcctggctttaaaggaaaagcattttaatgaaagcaggggctatgagatacacatgtttgatagtgccatgaatatcacagcttaccttgggaatactactgacaatttctttaaaatttccaacctgaagatgggtcataattacacgttcaccgtccaagcaagatgcctttttggcaaccagatctgtggggagcctgccatcctgctgtacgatgagctggggtctggtgcagatgcatctgcaacgcaggctgccagatctacggatgttgctgctgtggtggtgcccatcttattcctgatactgctgagcctgggggtggggtttgccatcctgtacacgaagcaccggaggctgcagagcagcttcaccgccttcgccaacagccactacagctccaggctggggtccgcaatcttctcctctggggatgacctgggggaagatgatgaagatgcccctatgataactggattttcagatgacgtccccatggtgatagcctgaaagagctttcctcactagaaaccaaatggtgtaaatattttatttgataaagatagttgatggtttattttaaaagatgcactttgagttgcaatatgttatttttatatgggccaaaaac

SEQ ID NO: 184892 - DNA, 3032 bp, Homo sapiens
  Payload ID: 16405
  Gene Symbol: SORL1
  Gene Name: sortilin-related receptor, L(DLR class) A repeats containing
  ENST ID: ENST00000527934
  CDS Start-End: 422-2911
aaagtatggtttgcaaccagtagcatctgcatctccttggaacttgttagaaatgtagaatctctgacctcaccccagacctacagagtcagaatctgcatgctaataagcccccaggtcctgtgtgctccacaatgcatttgaggagcactcatgtggaatgcagacttgcccctttcctttctggcattctcatctctgaaccaggtcgtggagtagttgcggttgaattaactagaacacaatgctttgcctcagtaggaattctcttagccaccctgtgcctcctcagccacctgtttctttcaccagcccctgcaaaagcaaacttatctgaatattaaccgaaatcaaatatagtaagggaaatctactccccaaaagggaaaagaatattgcctcttctgacaacccattatacatgatttctagattagccgctgctcagagctgtgccagtcactggcctccctcagcagattcacatattcttcccttctcgactcctgggccctccacgtgtctgcccaattactaccgctgcagcagtgggacctgcgtgatggacacctgggtgtgcgacgggtaccgagattgtgcagatggctctgacgaggaagcctgccccttgcttgcaaacgtcactgctgcctccactcccacccaacttgggcgatgtgaccgatttgagttcgaatgccaccaaccgaagacgtgtattcccaactggaagcgctgtgacggccaccaagattgccaggatggccgggacgaggccaattgccccacacacagcaccttgacttgcatgagcagggagttccagtgcgaggacggggaggcctgcattgtgctctcggagcgctgcgacggcttcctggactgctcggacgagagcgatgaaaaggcctgcagtgatgagttgactgtgtacaaagtacagaatcttcagtggacagctgacttctctggggatgtgactttgacctggatgaggcccaaaaaaatgccctctgcttcttgtgtatataatgtctactacagggtggttggagagagcatatggaagactctggagacccacagcaataagacaaacactgtattaaaagtcttgaaaccagataccacgtatcaggttaaagtacaggttcagtgtctcagcaaggcacacaacaccaatgactttgtgaccctgaggaccccagagggattgccagatgcccctcgaaatctccagctgtcactccccagggaagcagaaggtgtgattgtaggccactgggctcctcccatccacacccatggcctcatccgtgagtacattgtagaatacagcaggagtggttccaagatgtgggcctcccagagggctgctagtaactttacagaaatcaagaacttattggtcaacactctatacaccgtcagagtggctgcggtgactagtcgtggaataggaaactggagcgattctaaatccattaccaccataaaaggaaaagtgatcccaccaccagatatccacattgacagctatggtgaaaattatctaagcttcaccctgaccatggagagtgatatcaaggtgaatggctatgtggtgaaccttttctgggcatttgacacccacaagcaagagaggagaactttgaacttccgaggaagcatattgtcacacaaagttggcaatctgacagctcatacatcctatgagatttctgcctgggccaagactgacttgggggatagccctctggcatttgagcatgttatgaccagaggggttcgcccacctgcacctagcctcaaggccaaagccatcaaccagactgcagtggaatgtacctggaccggcccccggaatgtggtttatggtattttctatgccacgtcctttcttgacctctatcgcaacccgaagagcttgactacttcactccacaacaagacggtcattgtcagtaaggatgagcagtatttgtttctggtccgtgtagtggtaccctaccaggggccatcctctgactacgttgtagtgaagatgatcccggacagcaggcttccaccccgtcacctgcatgtggttcatacgggcaaaacctccgtggtcatcaagtgggaatcaccgtatgactctcctgaccaggacttgttgtatgcagttgcagtcaaagatctcataagaaagactgacaggagctacaaagtaaaatcccgtaacagcactgtggaatacacccttaacaagttggagcctggcgggaaataccacatcattgtccaactggggaacatgagcaaagattccagcataaaaattaccacagtttcattatcagcacctgatgccttaaaaatcataacagaaaatgatcatgttcttctgttttggaaaagcctggctttaaaggaaaagcattttaatgaaagcaggggctatgagatacacatgtttgatagtgccatgaatatcacagcttaccttgggaatactactgacaatttctttaaaatttccaacctgaagatgggtcataattacacgttcaccgtccaagcaagatgcctttttggcaaccagatctgtggggagcctgccatcctgctgtacgatgagctggggtctggtgcagatgcatctgcaacgcaggctgccagatctacggatgttgctgctgtggtggtgcccatcttattcctgatactgctgagcctgggggtggggtttgccatcctgtacacgaagcaccggaggctgcagagcagcttcaccgccttcgccaacagccactacagctccaggctggggtccgcaatcttctcctctggggatgacctgggggaagatgatgaagatgcccctatgataactggattttcagatgacgtccccatggtgatagcctgaaagagctttcctcactagaaaccaaatggtgtaaatattttatttgataaagatagttgatggtttattttaaaagatgcactttgagttgcaatatgttatttttatatgggccaaaaac

SEQ ID NO: 184893 - DNA, 3501 bp, Homo sapiens
  Payload ID: 16405
  Gene Symbol: SORL1
  Gene Name: sortilin-related receptor, L(DLR class) A repeats containing
  ENST ID: ENST00000534286
  CDS Start-End: 12-3386
gtgatcagctcatgcagacctctcggcactccttttctcaaaccacaggctgtgtctgtaggagtcctctgtttcttgaaagttctacttcctggcctcctctatcactgcttcctaaccttcttcccatcatagcaagcatagaaaataatatatgtggagagcactgggatgaatggacaaggatgctgttgtcaagagaaatgcaccagtgccggagtgacgagtacaactgcagttccggcatgtgcatccgctcctcctgggtatgtgacggggacaacgactgcagggactggtctgatgaagccaactgtaccgccatctatcacacctgtgaggcctccaacttccagtgccgaaacgggcactgcatcccccagcggtgggcgtgtgacggggatacggactgccaggatggttccgatgaggatccagtcaactgtgagaagaagtgcaatggattccgctgcccaaacggcacttgcatcccatccagcaaacattgtgatggtctgcgtgattgctctgatggctccgatgaacagcactgcgagcccctctgtacgcacttcatggactttgtgtgtaagaaccgccagcagtgcctgttccactccatggtctgtgacggaatcatccagtgccgcgacgggtccgatgaggatgcggcgtttgcaggatgctcccaagatcctgagttccacaaggtatgtgatgagttcggtttccagtgtcagaatggagtgtgcatcagtttgatttggaagtgcgacgggatggatgattgcggcgattattctgatgaagccaactgcgaaaaccccacagaagccccaaactgctcccgctacttccagtttcggtgtgagaatggccactgcatccccaacagatggaaatgtgacagggagaacgactgtggggactggtctgatgagaaggattgtggagattcacatattcttcccttctcgactcctgggccctccacgtgtctgcccaattactaccgctgcagcagtgggacctgcgtgatggacacctgggtgtgcgacgggtaccgagattgtgcagatggctctgacgaggaagcctgccccttgcttgcaaacgtcactgctgcctccactcccacccaacttgggcgatgtgaccgatttgagttcgaatgccaccaaccgaagacgtgtattcccaactggaagcgctgtgacggccaccaagattgccaggatggccgggacgaggccaattgccccacacacagcaccttgacttgcatgagcagggagttccagtgcgaggacggggaggcctgcattgtgctctcggagcgctgcgacggcttcctggactgctcggacgagagcgatgaaaaggcctgcagtgatgagttgactgtgtacaaagtacagaatcttcagtggacagctgacttctctggggatgtgactttgacctggatgaggcccaaaaaaatgccctctgcttcttgtgtatataatgtctactacagggtggttggagagagcatatggaagactctggagacccacagcaataagacaaacactgtattaaaagtcttgaaaccagataccacgtatcaggttaaagtacaggttcagtgtctcagcaaggcacacaacaccaatgactttgtgaccctgaggaccccagagggattgccagatgcccctcgaaatctccagctgtcactccccagggaagcagaaggtgtgattgtaggccactgggctcctcccatccacacccatggcctcatccgtgagtacattgtagaatacagcaggagtggttccaagatgtgggcctcccagagggctgctagtaactttacagaaatcaagaacttattggtcaacactctatacaccgtcagagtggctgcggtgactagtcgtggaataggaaactggagcgattctaaatccattaccaccataaaaggaaaagtgatcccaccaccagatatccacattgacagctatggtgaaaattatctaagcttcaccctgaccatggagagtgatatcaaggtgaatggctatgtggtgaaccttttctgggcatttgacacccacaagcaagagaggagaactttgaacttccgaggaagcatattgtcacacaaagttggcaatctgacagctcatacatcctatgagatttctgcctgggccaagactgacttgggggatagccctctggcatttgagcatgttatgaccagaggggttcgcccacctgcacctagcctcaaggccaaagccatcaaccagactgcagtggaatgtacctggaccggcccccggaatgtggtttatggtattttctatgccacgtcctttcttgacctctatcgcaacccgaagagcttgactacttcactccacaacaagacggtcattgtcagtaaggatgagcagtatttgtttctggtccgtgtagtggtaccctaccaggggccatcctctgactacgttgtagtgaagatgatcccggacagcaggcttccaccccgtcacctgcatgtggttcatacgggcaaaacctccgtggtcatcaagtgggaatcaccgtatgactctcctgaccaggacttgttgtatgcagttgcagtcaaagatctcataagaaagactgacaggagctacaaagtaaaatcccgtaacagcactgtggaatacacccttaacaagttggagcctggcgggaaataccacatcattgtccaactggggaacatgagcaaagattccagcataaaaattaccacagtttcattatcagcacctgatgccttaaaaatcataacagaaaatgatcatgttcttctgttttggaaaagcctggctttaaaggaaaagcattttaatgaaagcaggggctatgagatacacatgtttgatagtgccatgaatatcacagcttaccttgggaatactactgacaatttctttaaaatttccaacctgaagatgggtcataattacacgttcaccgtccaagcaagatgcctttttggcaaccagatctgtggggagcctgccatcctgctgtacgatgagctggggtctggtgcagatgcatctgcaacgcaggctgccagatctacggatgttgctgctgtggtggtgcccatcttattcctgatactgctgagcctgggggtggggtttgccatcctgtacacgaagcaccggaggctgcagagcagcttcaccgccttcgccaacagccactacagctccaggctggggtccgcaatcttctcctctggggatgacctgggggaagatgatgaagatgcccctatgataactggattttcagatgacgtccccatggtgatagcctgaaagagctttcctcactagaaaccaaatggtgtaaatattttatttgataaagatagttgatggtttattttaaaagatgcactttgagttgcaatatgttatttttatatgggcc

SEQ ID NO: 184894 - DNA, 7272 bp, Homo sapiens
  Payload ID: 16406
  Gene Symbol: SORCS1
  Gene Name: sortilin-related VPS10 domain containing receptor 1
  Uniprot ID: Q8WY21
  ENST ID: ENST00000263054
  CDS Start-End: 9-3515
ctcccgcgatgggaaaagttggcgccggcggcggctcccaagcccggctgagcgcgctcctcgccggcgcggggctcttgatcctctgcgccccgggcgtctgcggcggcggctcctgctgcccctcgccgcaccccagctccgctccacgctcggcctcgacccctaggggcttttcccaccaggggcggccaggcagggctcctgccacgcccctgcccctcgtagtgcgtcccctgttctcagtggcccccggggaccgagcgctatccctggagcgggctcggggcactggggcatccatggcggttgctgcacgctccggccggaggagacggagcggagcggatcaggagaaggcagaacggggagagggcgcgagtcggagcccccggggagtgctaagagatggagggcagcaggagcctgggactcgggagcgggacccggacaaagccacccgcttccggatggaggagctgagactgaccagcaccacgtttgcgctgacgggagactcagcacacaaccaagccatggtccactggtctggccacaacagcagcgtgattctcattttgacaaagctctatgactataacctggggagcatcacagagagctcgctttggaggtcaaccgattatggaacaacctatgagaagctgaatgataaagttggtttgaaaaccattttgagctatctctatgtgtgtcctaccaacaagcgtaagataatgttactcacagacccggagattgagagcagtttattgatcagctcagatgaaggggcaacttatcaaaagtaccggctgaacttctacattcaaagcttgctttttcaccccaaacaagaagactggattctggcatacagtcaagaccaaaagttatacagctctgctgaatttgggagaagatggcagcttatccaagaaggggttgtaccaaacaggttctactggtctgtgatggggtcaaataaagaaccagaccttgtgcatcttgaggccagaactgtggatggtcattcacattatctaacttgccgaatgcagaactgtacagaggccaacaggaatcagccttttccaggctacattgacccagactctttgattgttcaggatcattatgtgtttgttcagctgacatcaggagggcggccacattactacgtgtcctaccgaaggaatgcatttgcccaaatgaagcttccgaaatatgctttgcccaaggacatgcatgttatcagcaccgatgagaatcaggtgttcgcagcggtccaagaatggaaccagaatgacacgtacaacctctacatctcagacacacgtggtgtctacttcaccctggccttggagaatgtccagagcagcagaggccctgagggcaacatcatgatcgacctctatgaggtagcagggataaagggaatgttcttggctaacaagaagattgacaaccaagtgaagactttcatcacatataacaaaggcagagactggcgtttgctgcaggcgccggacacggatctaaggggggaccccgtgcactgcttgctgccctattgctcactacaccttcacctgaaggtctctgagaatccctacacatcagggatcattgccagcaaagacacagctccaagcatcatagtggcatcaggtaatataggttctgaattgtcagacactgacatcagcatgtttgtctcttcagatgcagggaacacctggagacagatctttgaagaagagcacagtgttttgtacctggatcaaggtggagtcctggttgctatgaaacacacatctctcccaattcgacatctttggttgagttttgatgaagggagatcttggagcaaatacagtttcacatctattccactttttgtggatggggttctgggtgagcctggagaagagactctcatcatgacagtgtttggacacttcagccaccgctctgaatggcagctggtcaaagtagattacaagtccatttttgatagacggtgtgccgaagaggactacagaccttggcagctgcacagccagggggaagcatgtatcatgggagcaaaaaggatatataagaagcgaaaatcagagcggaagtgtatgcaaggaaaatatgcaggagctatggaatctgaaccctgtgtctgcactgaggctgattttgattgcgactatggttatgagcgacacagcaatggccagtgcctgccggcattttggttcaatccatcctctctgtcaaaggattgcagcttgggacagagttacctcaatagtactgggtacaggaaggtggtttccaataattgcactgatggcgtaagggaacagtacactgccaaaccgcagaagtgcccagggaaagccccgcgggggctgcggatagtcacggctgatggaaagctgacagcggaacaaggacacaacgtcactctcatggtgcaattagaagagggtgatgttcagcggacactcatccaagtggactttggcgatggtatcgcggtgtcttacgtcaatctcagctccatggaagatgggatcaaacacgtctatcagaacgtgggcattttccgtgtgaccgtgcaggtggacaacagtctgggttctgacagcgccgtcctgtacttacatgtaacttgtcccttggagcacgtgcacctgtctcttccctttgtcaccacaaagaacaaagaggtcaatgcgacggcagtgctgtggcccagccaagtgggcaccctcacttacgtgtggtggtacggaaacaacacggagcctttgatcaccttggagggaagcatatccttcagatttacttcagaaggaatgaataccatcacagtgcaggtctcagctgggaatgccatcctacaagacacaaagaccatcgcagtatatgaggaattccggtctcttcgcttgtccttttctccaaacctggatgactacaacccggacatccctgagtggaggagggacatcggtcgagtcatcaaaaaatccctggtggaagccacaggggttccaggccagcacatcctggtggcggtgctccctggcttacccaccactgctgaactctttgtcctaccctatcaggatccagctggagaaaacaaaaggtcaactgatgacctggagcagatatcagaattgctgatccacacgctcaaccaaaactcagtacacttcgagctgaagccaggagtccgagtccttgtccatgctgctcacttaacagcggcccccctggtggacctcactccaacccacagtggatctgccatgctgatgctgctctcagtggtgtttgtggggctggcagtgttcgtcatctacaagtttaaaaggagagtagctttaccctcccctccctccccttctactcaacctggtgactcatctctccgattgcaaagagcaagacacgccactccgccttcaacgccaaagcggggatctgctggggcacagtatgcaatttaaggaaaacccccaaaggctacaggcgacctgctgatcaggaaagaatttcgctcttgtcaagtacatcatccttcatgaccactaactttgtgttttttttctttcctttgttgttctgtttcctattttgccaggaagtatttccatagttgctgagaatcaaagcacaaaagaaatccctacctatgtaaatgtttgaatggaggacgccagtaaaaaaacaaaaacaaaaacaaaacaaaacataaaatataaacaatcaaaatccaaacaaacaaacaaacactcactgcatcgggactttttaattcttcagacacagacaacaagggtttttagctttaagcctgtgcatgtggacaatactctgagaacatgtctggaggggcagtgtacaggtgctctattttaatggaaaacactcccctctccctctttcttcttctctctcttttttctgatcggtcgtgtttgtagaaaattcataacatatataggccaaggaaatctgcatgtatttttggaaatattcttggctctagatttatcagctattttagcattaaaggctgatgggtggattagctaccccagctcctttcataagacacaaagacgtgcacaggagtttgaaaccctgagctgtttctctgttccactttccatactgtcatttcccttctaagttagctttggtagctctgttggtcagcagtggccacaaggctgctttctgcactctctgtggccacaggaacaaagatgcgagttgaagatccctttgtgccggtagaataaggaaggaagggaggcagggaggcaaagcatgtcagaaacggaccttggtttcctgttcacctctttccaccatgattgcctccccttgcagctttccctactcctgccccaactgcagtaggaaatggaatcccattagttacccattgtcctgtcttcacatttgtttgtcatccatgtgtgaccatgatctgttgatatctttgaatctcttccctccaaaccccaagtaagttgtccttcaactgttctcagtttttcttcccaaacatattgctagattctggacattaaccctgacgtttcctaaatactggcctggcctgtgccgcccctgcccccactactcacaagtttctgagccctttgtcagttttgtacattcccaagcatgccagcttctgtgcccatggaccttgctgcatcctgcacagcagggttcagtttcatgtatctttgtcttttcctctagaacctgcctttttcaaatatccctgccttttcccacctggaaacatatactgtatgcgaaagagttgatatatgcaaagtaattcaaacctggccatgtactttggaaaagaaagcatagagatgaattgtggtgttctcacaccttaacgaaaatctcgtgcgatctgattccagaagattcttgtgagaaatgttttgaatgtgtgacaatttcgcagggcaatttcctcctgtgacggttgctgttacctggtatttccactctcacagtagaatagaaatgtttgtgaaataaaactgattttaactggaaggagaaacaggttaatggactttgtgtttaagagtgtcaaacagtctgagagaataaatgggggtcttgtcttacattagggtgagagtttgattatttaggatgatcccagtgatttcatgtgtgctctctgacctctgagtatcatagtatcattaaagtaaagatttaagtctgtataaaggaggagagttactgattggcaaaaaagattggcacaaagcatgaagaaaccccatttttcccagggtaatcatgaaagaaggctcagagaaagagggaaacaaaagcctgttcagcagaggcccctttagtattatggactgggcaaagcccactataaactataggagaaagaagttctgataaacctcttagtatgctcagcctccttctttgctatgtccctaagccaacagggtataacacaggccctggtgataatgagggtgtcctaaagatcctgatgtccatgacttcatgtagttcaggcacagaaagaatagcaaagctgctgtcagaagtttgtcaggcagagatgtttatggttgaggataccccatatgaatctgggaaatgggctaggcctgaggcagtcacctatttgtagaactcaattgatccccaacctgccaggcttcctatctcataggaaacatcctcattgatcctcttcagttggagtctcccaaatttaatgtggaagacaaagtgttggaaaatcaaaagaggctcactcaaaccagcacagggagtcctcagagttgcagttcaattcattttaattagaaaagtatgaaagaggtataacactcttattctagcacagtgccttgcctagagtagtagtatgaaaactatttgttgaagaaataaatgaatggaaagacatagggaagaatgggctgtaaatcctaattaaaaatagaggtcgacatgagatacctggcattttgggaagtgaccaaagatggccagctagagattcagcatctccaggatcctcatgtgcctctcctcaaagctccctcccatctgtaggagattagtgaggcaaggtgctgctcagagaggaggacctcattgttcttaggaccttggccagttgttctcaaagtgtggtacctggatcagcagtatcactatcacttgggctagttagagatccagattctggatccataccccatacctactgaattagaaactctaggggatgaatagtggtgttctctgttgctaagtgacagtgggcccagccacctattttaacaagccctcccagtgattgtgatacatactaaagtttgagaaccattgtactaggccattccagctgaatctcaaacagaaggcagtaatgagagcctacaaatgggagggacctaagtgcctacctactcgctaatcgcaggtgcaaacacacaaggagtttggtgggcttaaggtcagaggagtgtgtagggagggatgtatgtggaaggtaagattcagggcaagctaaaaatccgatactgcaacgttttccaaaatcccagaaggcaaactgtgcatgttctaccctgaaccacccaagcaacactttctaccttgccttatttttaattggattcactgtccaaaatgcagaggtttgctttgcttttttttcagaagttccaaacagcaactttgagagcagtggggtgcttggcagctgttctgtgttttccaggaatccaactgagcattgaaatctctcatttgccgacttatttttataggaagccaattaaaaaaaaaaaaagttttcttatagtattggaactacttctaattttaaaatgacttttttgatgtattttttgttaaatactatgtagtgtaatgtataattgctcttgtttattgcttttacaatcatatttattaaacagataatgtctctaaagtctttgcctcaggtatttttttttttaatcctaaacccttggtgttcattctaaatatagaagtgttgcatgtataggatttcataaaggctaattgcataagaaagagtaaacaccacaggcttgaggtttttggctgttttttactaacaaggcagaatgtatgtactacctgaattctacctgcatttcaattaactatacaatgtctgtttattaaattactttgatttaaaaatta

SEQ ID NO: 184895 - DNA, 3009 bp, Homo sapiens
  Payload ID: 16406
  Gene Symbol: SORCS1
  Gene Name: sortilin-related VPS10 domain containing receptor 1
  ENST ID: ENST00000344440
  CDS Start-End: 172-3009
caggtgattctcattttgacaaagctctatgactataacctggggagcatcacagagagctcgctttggaggtcaaccgattatggaacaacctatgagaagctgaatgataaagttggtttgaaaaccattttgagctatctctatgtgtgtcctaccaacaagcgtaagataatgttactcacagacccggagattgagagcagtttattgatcagctcagatgaaggggcaacttatcaaaagtaccggctgaacttctacattcaaagcttgctttttcaccccaaacaagaagactggattctggcatacagtcaagaccaaaagttatacagctctgctgaatttgggagaagatggcagcttatccaagaaggggttgtaccaaacaggttctactggtctgtgatggggtcaaataaagaaccagaccttgtgcatcttgaggccagaactgtggatggtcattcacattatctaacttgccgaatgcagaactgtacagaggccaacaggaatcagccttttccaggctacattgacccagactctttgattgttcaggatcattatgtgtttgttcagctgacatcaggagggcggccacattactacgtgtcctaccgaaggaatgcatttgcccaaatgaagcttccgaaatatgctttgcccaaggacatgcatgttatcagcaccgatgagaatcaggtgttcgcagcggtccaagaatggaaccagaatgacacgtacaacctctacatctcagacacacgtggtgtctacttcaccctggccttggagaatgtccagagcagcagaggccctgagggcaacatcatgatcgacctctatgaggtagcagggataaagggaatgttcttggctaacaagaagattgacaaccaagtgaagactttcatcacatataacaaaggcagagactggcgtttgctgcaggcgccggacacggatctaaggggggaccccgtgcactgcttgctgccctattgctcactacaccttcacctgaaggtctctgagaatccctacacatcagggatcattgccagcaaagacacagctccaagcatcatagtggcatcaggtaatataggttctgaattgtcagacactgacatcagcatgtttgtctcttcagatgcagggaacacctggagacagatctttgaagaagagcacagtgttttgtacctggatcaaggtggagtcctggttgctatgaaacacacatctctcccaattcgacatctttggttgagttttgatgaagggagatcttggagcaaatacagtttcacatctattccactttttgtggatggggttctgggtgagcctggagaagagactctcatcatgacagtgtttggacacttcagccaccgctctgaatggcagctggtcaaagtagattacaagtccatttttgatagacggtgtgccgaagaggactacagaccttggcagctgcacagccagggggaagcatgtatcatgggagcaaaaaggatatataagaagcgaaaatcagagcggaagtgtatgcaaggaaaatatgcaggagctatggaatctgaaccctgtgtctgcactgaggctgattttgattgcgactatggttatgagcgacacagcaatggccagtgcctgccggcattttggttcaatccatcctctctgtcaaaggattgcagcttgggacagagttacctcaatagtactgggtacaggaaggtggtttccaataattgcactgatggcgtaagggaacagtacactgccaaaccgcagaagtgcccagggaaagccccgcgggggctgcggatagtcacggctgatggaaagctgacagcggaacaaggacacaacgtcactctcatggtgcaattagaagagggtgatgttcagcggacactcatccaagtggactttggcgatggtatcgcggtgtcttacgtcaatctcagctccatggaagatgggatcaaacacgtctatcagaacgtgggcattttccgtgtgaccgtgcaggtggacaacagtctgggttctgacagcgccgtcctgtacttacatgtaacttgtcccttggagcacgtgcacctgtctcttccctttgtcaccacaaagaacaaagaggtcaatgcgacggcagtgctgtggcccagccaagtgggcaccctcacttacgtgtggtggtacggaaacaacacggagcctttgatcaccttggagggaagcatatccttcagatttacttcagaaggaatgaataccatcacagtgcaggtctcagctgggaatgccatcctacaagacacaaagaccatcgcagtatatgaggaattccggtctcttcgcttgtccttttctccaaacctggatgactacaacccggacatccctgagtggaggagggacatcggtcgagtcatcaaaaaatccctggtggaagccacaggggttccaggccagcacatcctggtggcggtgctccctggcttacccaccactgctgaactctttgtcctaccctatcaggatccagctggagaaaacaaaaggtcaactgatgacctggagcagatatcagaattgctgatccacacgctcaaccaaaactcagtacacttcgagctgaagccaggagtccgagtccttgtccatgctgctcacttaacagcggcccccctggtggacctcactccaacccacagtggatctgccatgctgatgctgctctcagtggtgtttgtggggctggcagtgttcgtcatctacaagtttaaaaggaagatcccggggattaatgtttatgcccagatgcagaatgagaaagaacaagagatgatcagtccagtcagtcactctgaaagcaggcccaatgtccctcagactgaactaaggaggcctggccagcttatagatgagaaggtggaatcccagctcataggaagatatcgcagcacattgcaaagtctctga

SEQ ID NO: 184896 - DNA, 2638 bp, Homo sapiens
  Payload ID: 16406
  Gene Symbol: SORCS1
  Gene Name: sortilin-related VPS10 domain containing receptor 1
  ENST ID: ENST00000369698
  CDS Start-End: 128-2272
gttcgcagcggtccaagaatggaaccagaatgacacgtacaacctctacatctcagacacacgtggtgtctacttcaccctggccttggagaatgtccagagcagcagaggccctgagggcaacatcatgatcgacctctatgaggtagcagggataaagggaatgttcttggctaacaagaagattgacaaccaagtgaagactttcatcacatataacaaaggcagagactggcgtttgctgcaggcgccggacacggatctaaggggggaccccgtgcactgcttgctgccctattgctcactacaccttcacctgaaggtctctgagaatccctacacatcagggatcattgccagcaaagacacagctccaagcatcatagtggcatcaggtaatataggttctgaattgtcagacactgacatcagcatgtttgtctcttcagatgcagggaacacctggagacagatctttgaagaagagcacagtgttttgtacctggatcaaggtggagtcctggttgctatgaaacacacatctctcccaattcgacatctttggttgagttttgatgaagggagatcttggagcaaatacagtttcacatctattccactttttgtggatggggttctgggtgagcctggagaagagactctcatcatgacagtgtttggacacttcagccaccgctctgaatggcagctggtcaaagtagattacaagtccatttttgatagacggtgtgccgaagaggactacagaccttggcagctgcacagccagggggaagcatgtatcatgggagcaaaaaggatatataagaagcgaaaatcagagcggaagtgtatgcaaggaaaatatgcaggagctatggaatctgaaccctgtgtctgcactgaggctgattttgattgcgactatggttatgagcgacacagcaatggccagtgcctgccggcattttggttcaatccatcctctctgtcaaaggattgcagcttgggacagagttacctcaatagtactgggtacaggaaggtggtttccaataattgcactgatggcgtaagggaacagtacactgccaaaccgcagaagtgcccagggaaagccccgcgggggctgcggatagtcacggctgatggaaagctgacagcggaacaaggacacaacgtcactctcatggtgcaattagaagagggtgatgttcagcggacactcatccaagtggactttggcgatggtatcgcggtgtcttacgtcaatctcagctccatggaagatgggatcaaacacgtctatcagaacgtgggcattttccgtgtgaccgtgcaggtggacaacagtctgggttctgacagcgccgtcctgtacttacatgtaacttgtcccttggagcacgtgcacctgtctcttccctttgtcaccacaaagaacaaagaggtcaatgcgacggcagtgctgtggcccagccaagtgggcaccctcacttacgtgtggtggtacggaaacaacacggagcctttgatcaccttggagggaagcatatccttcagatttacttcagaaggaatgaataccatcacagtgcaggtctcagctgggaatgccatcctacaagacacaaagaccatcgcagtatatgaggaattccggtctcttcgcttgtccttttctccaaacctggatgactacaacccggacatccctgagtggaggagggacatcggtcgagtcatcaaaaaatccctggtggaagccacaggggttccaggccagcacatcctggtggcggtgctccctggcttacccaccactgctgaactctttgtcctaccctatcaggatccagctggagaaaacaaaaggtcaactgatgacctggagcagatatcagaattgctgatccacacgctcaaccaaaactcagtacacttcgagctgaagccaggagtccgagtccttgtccatgctgctcacttaacagcggcccccctggtggacctcactccaacccacagtggatctgccatgctgatgctgctctcagtggtgtttgtggggctggcagtgttcgtcatctacaagtttaaaaggaagatcccggggattaatgtttatgcccagatgcagaatgagaaagaacaagagatgatcagtccagtcagtcactctgaaagcaggcccaatgtccctcagactgaactaaggaggcctggccagcttatagatgagaaggtggaatcccagctcataggagagtagctttaccctcccctccctccccttctactcaacctggtgactcatctctccgattgcaaagagcaagacacgccactccgccttcaacgccaaagcggggatctgctggggcacagtatgcaatttaaggaaaacccccaaaggctacaggcgacctgctgatcaggaaagaatttcgctcttgtcaagtacatcatccttcatgaccactaactttgtgttttttttctttcctttgttgttctgtttcctattttgccaggaagtatttccatagttgctgagaatcaaagcacaaaagaaatccctacctatgtaaatgtttgaatggaggacgccagtaaaaaaacaaaaacaaaaacaaaa

SEQ ID NO: 184897 - DNA, 663 bp, Homo sapiens
  Payload ID: 16406
  Gene Symbol: SORCS1
  Gene Name: sortilin-related VPS10 domain containing receptor 1
  ENST ID: ENST00000452214
  CDS Start-End: 1-641
acctggatgactacaacccggacatccctgagtggaggagggacatcggtcgagtcatcaaaaaatccctggtggaagccacaggggttccaggccagcacatcctggtggcggtgctccctggcttacccaccactgctgaactctttgtcctaccctatcaggatccagctggagaaaacaaaaggtcaactgatgacctggagcagatatcagaattgctgatccacacgctcaaccaaaactcagtacacttcgagctgaagccaggagtccgagtccttgtccatgctgctcacttaacagcggcccccctggtggacctcactccaacccacagtggatctgccatgctgatgctgctctcagtggtgtttgtggggctggcagtgttcgtcatctacaagtttaaaaggaagatcccggggattaatgtttatgcccagatgcagaatgagaaagaacaagagatgatcagtccagtcagtcactctgaaagcaggcccaatgtccctcagactgaactaaggaggcctggccagcttatagatgagaaggtggaatcccagctcataggaagtatttccatagttgctgagaatcaaagcacaaaagaaatccctacctatgtaaatgtttgaatggaggacgccagtaaaaaaa

SEQ ID NO: 184898 - DNA, 6701 bp, Homo sapiens
  Payload ID: 16406
  Gene Symbol: SORCS1
  Gene Name: sortilin-related VPS10 domain containing receptor 1
  ENST ID: ENST00000622431
  CDS Start-End: 172-2952
caggtgattctcattttgacaaagctctatgactataacctggggagcatcacagagagctcgctttggaggtcaaccgattatggaacaacctatgagaagctgaatgataaagttggtttgaaaaccattttgagctatctctatgtgtgtcctaccaacaagcgtaagataatgttactcacagacccggagattgagagcagtttattgatcagctcagatgaaggggcaacttatcaaaagtaccggctgaacttctacattcaaagcttgctttttcaccccaaacaagaagactggattctggcatacagtcaagaccaaaagttatacagctctgctgaatttgggagaagatggcagcttatccaagaaggggttgtaccaaacaggttctactggtctgtgatggggtcaaataaagaaccagaccttgtgcatcttgaggccagaactgtggatggtcattcacattatctaacttgccgaatgcagaactgtacagaggccaacaggaatcagccttttccaggctacattgacccagactctttgattgttcaggatcattatgtgtttgttcagctgacatcaggagggcggccacattactacgtgtcctaccgaaggaatgcatttgcccaaatgaagcttccgaaatatgctttgcccaaggacatgcatgttatcagcaccgatgagaatcaggtgttcgcagcggtccaagaatggaaccagaatgacacgtacaacctctacatctcagacacacgtggtgtctacttcaccctggccttggagaatgtccagagcagcagaggccctgagggcaacatcatgatcgacctctatgaggtagcagggataaagggaatgttcttggctaacaagaagattgacaaccaagtgaagactttcatcacatataacaaaggcagagactggcgtttgctgcaggcgccggacacggatctaaggggggaccccgtgcactgcttgctgccctattgctcactacaccttcacctgaaggtctctgagaatccctacacatcagggatcattgccagcaaagacacagctccaagcatcatagtggcatcaggtaatataggttctgaattgtcagacactgacatcagcatgtttgtctcttcagatgcagggaacacctggagacagatctttgaagaagagcacagtgttttgtacctggatcaaggtggagtcctggttgctatgaaacacacatctctcccaattcgacatctttggttgagttttgatgaagggagatcttggagcaaatacagtttcacatctattccactttttgtggatggggttctgggtgagcctggagaagagactctcatcatgacagtgtttggacacttcagccaccgctctgaatggcagctggtcaaagtagattacaagtccatttttgatagacggtgtgccgaagaggactacagaccttggcagctgcacagccagggggaagcatgtatcatgggagcaaaaaggatatataagaagcgaaaatcagagcggaagtgtatgcaaggaaaatatgcaggagctatggaatctgaaccctgtgtctgcactgaggctgattttgattgcgactatggttatgagcgacacagcaatggccagtgcctgccggcattttggttcaatccatcctctctgtcaaaggattgcagcttgggacagagttacctcaatagtactgggtacaggaaggtggtttccaataattgcactgatggcgtaagggaacagtacactgccaaaccgcagaagtgcccagggaaagccccgcgggggctgcggatagtcacggctgatggaaagctgacagcggaacaaggacacaacgtcactctcatggtgcaattagaagagggtgatgttcagcggacactcatccaagtggactttggcgatggtatcgcggtgtcttacgtcaatctcagctccatggaagatgggatcaaacacgtctatcagaacgtgggcattttccgtgtgaccgtgcaggtggacaacagtctgggttctgacagcgccgtcctgtacttacatgtaacttgtcccttggagcacgtgcacctgtctcttccctttgtcaccacaaagaacaaagaggtcaatgcgacggcagtgctgtggcccagccaagtgggcaccctcacttacgtgtggtggtacggaaacaacacggagcctttgatcaccttggagggaagcatatccttcagatttacttcagaaggaatgaataccatcacagtgcaggtctcagctgggaatgccatcctacaagacacaaagaccatcgcagtatatgaggaattccggtctcttcgcttgtccttttctccaaacctggatgactacaacccggacatccctgagtggaggagggacatcggtcgagtcatcaaaaaatccctggtggaagccacaggggttccaggccagcacatcctggtggcggtgctccctggcttacccaccactgctgaactctttgtcctaccctatcaggatccagctggagaaaacaaaaggtcaactgatgacctggagcagatatcagaattgctgatccacacgctcaaccaaaactcagtacacttcgagctgaagccaggagtccgagtccttgtccatgctgctcacttaacagcggcccccctggtggacctcactccaacccacagtggatctgccatgctgatgctgctctcagtggtgtttgtggggctggcagtgttcgtcatctacaagtttaaaaggagagtagctttaccctcccctccctccccttctactcaacctggtgactcatctctccgattgcaaagagcaagacacgccactccgccttcaacgccaaagcggggatctgctggggcacagtatgcaatttaaggaaaacccccaaaggctacaggcgacctgctgatcaggaaagaatttcgctcttgtcaagtacatcatccttcatgaccactaactttgtgttttttttctttcctttgttgttctgtttcctattttgccaggaagtatttccatagttgctgagaatcaaagcacaaaagaaatccctacctatgtaaatgtttgaatggaggacgccagtaaaaaaacaaaaacaaaaacaaaacaaaacataaaatataaacaatcaaaatccaaacaaacaaacaaacactcactgcatcgggactttttaattcttcagacacagacaacaagggtttttagctttaagcctgtgcatgtggacaatactctgagaacatgtctggaggggcagtgtacaggtgctctattttaatggaaaacactcccctctccctctttcttcttctctctcttttttctgatcggtcgtgtttgtagaaaattcataacatatataggccaaggaaatctgcatgtatttttggaaatattcttggctctagatttatcagctattttagcattaaaggctgatgggtggattagctaccccagctcctttcataagacacaaagacgtgcacaggagtttgaaaccctgagctgtttctctgttccactttccatactgtcatttcccttctaagttagctttggtagctctgttggtcagcagtggccacaaggctgctttctgcactctctgtggccacaggaacaaagatgcgagttgaagatccctttgtgccggtagaataaggaaggaagggaggcagggaggcaaagcatgtcagaaacggaccttggtttcctgttcacctctttccaccatgattgcctccccttgcagctttccctactcctgccccaactgcagtaggaaatggaatcccattagttacccattgtcctgtcttcacatttgtttgtcatccatgtgtgaccatgatctgttgatatctttgaatctcttccctccaaaccccaagtaagttgtccttcaactgttctcagtttttcttcccaaacatattgctagattctggacattaaccctgacgtttcctaaatactggcctggcctgtgccgcccctgcccccactactcacaagtttctgagccctttgtcagttttgtacattcccaagcatgccagcttctgtgcccatggaccttgctgcatcctgcacagcagggttcagtttcatgtatctttgtcttttcctctagaacctgcctttttcaaatatccctgccttttcccacctggaaacatatactgtatgcgaaagagttgatatatgcaaagtaattcaaacctggccatgtactttggaaaagaaagcatagagatgaattgtggtgttctcacaccttaacgaaaatctcgtgcgatctgattccagaagattcttgtgagaaatgttttgaatgtgtgacaatttcgcagggcaatttcctcctgtgacggttgctgttacctggtatttccactctcacagtagaatagaaatgtttgtgaaataaaactgattttaactggaaggagaaacaggttaatggactttgtgtttaagagtgtcaaacagtctgagagaataaatgggggtcttgtcttacattagggtgagagtttgattatttaggatgatcccagtgatttcatgtgtgctctctgacctctgagtatcatagtatcattaaagtaaagatttaagtctgtataaaggaggagagttactgattggcaaaaaagattggcacaaagcatgaagaaaccccatttttcccagggtaatcatgaaagaaggctcagagaaagagggaaacaaaagcctgttcagcagaggcccctttagtattatggactgggcaaagcccactataaactataggagaaagaagttctgataaacctcttagtatgctcagcctccttctttgctatgtccctaagccaacagggtataacacaggccctggtgataatgagggtgtcctaaagatcctgatgtccatgacttcatgtagttcaggcacagaaagaatagcaaagctgctgtcagaagtttgtcaggcagagatgtttatggttgaggataccccatatgaatctgggaaatgggctaggcctgaggcagtcacctatttgtagaactcaattgatccccaacctgccaggcttcctatctcataggaaacatcctcattgatcctcttcagttggagtctcccaaatttaatgtggaagacaaagtgttggaaaatcaaaagaggctcactcaaaccagcacagggagtcctcagagttgcagttcaattcattttaattagaaaagtatgaaagaggtataacactcttattctagcacagtgccttgcctagagtagtagtatgaaaactatttgttgaagaaataaatgaatggaaagacatagggaagaatgggctgtaaatcctaattaaaaatagaggtcgacatgagatacctggcattttgggaagtgaccaaagatggccagctagagattcagcatctccaggatcctcatgtgcctctcctcaaagctccctcccatctgtaggagattagtgaggcaaggtgctgctcagagaggaggacctcattgttcttaggaccttggccagttgttctcaaagtgtggtacctggatcagcagtatcactatcacttgggctagttagagatccagattctggatccataccccatacctactgaattagaaactctaggggatgaatagtggtgttctctgttgctaagtgacagtgggcccagccacctattttaacaagccctcccagtgattgtgatacatactaaagtttgagaaccattgtactaggccattccagctgaatctcaaacagaaggcagtaatgagagcctacaaatgggagggacctaagtgcctacctactcgctaatcgcaggtgcaaacacacaaggagtttggtgggcttaaggtcagaggagtgtgtagggagggatgtatgtggaaggtaagattcagggcaagctaaaaatccgatactgcaacgttttccaaaatcccagaaggcaaactgtgcatgttctaccctgaaccacccaagcaacactttctaccttgccttatttttaattggattcactgtccaaaatgcagaggtttgctttgcttttttttcagaagttccaaacagcaactttgagagcagtggggtgcttggcagctgttctgtgttttccaggaatccaactgagcattgaaatctctcatttgccgacttatttttataggaagccaattaaaaaaaaaaaaagttttcttatagtattggaactacttctaattttaaaatgacttttttgatgtattttttgttaaatactatgtagtgtaatgtataattgctcttgtttattgcttttacaatcatatttattaaacagataatgtctctaaagtctttgcctcaggtatttttttttttaatcctaaacccttggtgttcattctaaatatagaagtgttgcatgtataggatttcataaaggctaattgcataagaaagagtaaacaccacaggcttgaggtttttggctgttttttactaacaaggcagaatgtatgtactacctgaattctacctgcatttcaattaactatacaatgtctgtttattaaattactttgattt

SEQ ID NO: 184899 - DNA, 6862 bp, Homo sapiens
  Payload ID: 16406
  Gene Symbol: SORCS1
  Gene Name: sortilin-related VPS10 domain containing receptor 1
  ENST ID: ENST00000612154
  CDS Start-End: 172-2985
caggtgattctcattttgacaaagctctatgactataacctggggagcatcacagagagctcgctttggaggtcaaccgattatggaacaacctatgagaagctgaatgataaagttggtttgaaaaccattttgagctatctctatgtgtgtcctaccaacaagcgtaagataatgttactcacagacccggagattgagagcagtttattgatcagctcagatgaaggggcaacttatcaaaagtaccggctgaacttctacattcaaagcttgctttttcaccccaaacaagaagactggattctggcatacagtcaagaccaaaagttatacagctctgctgaatttgggagaagatggcagcttatccaagaaggggttgtaccaaacaggttctactggtctgtgatggggtcaaataaagaaccagaccttgtgcatcttgaggccagaactgtggatggtcattcacattatctaacttgccgaatgcagaactgtacagaggccaacaggaatcagccttttccaggctacattgacccagactctttgattgttcaggatcattatgtgtttgttcagctgacatcaggagggcggccacattactacgtgtcctaccgaaggaatgcatttgcccaaatgaagcttccgaaatatgctttgcccaaggacatgcatgttatcagcaccgatgagaatcaggtgttcgcagcggtccaagaatggaaccagaatgacacgtacaacctctacatctcagacacacgtggtgtctacttcaccctggccttggagaatgtccagagcagcagaggccctgagggcaacatcatgatcgacctctatgaggtagcagggataaagggaatgttcttggctaacaagaagattgacaaccaagtgaagactttcatcacatataacaaaggcagagactggcgtttgctgcaggcgccggacacggatctaaggggggaccccgtgcactgcttgctgccctattgctcactacaccttcacctgaaggtctctgagaatccctacacatcagggatcattgccagcaaagacacagctccaagcatcatagtggcatcaggtaatataggttctgaattgtcagacactgacatcagcatgtttgtctcttcagatgcagggaacacctggagacagatctttgaagaagagcacagtgttttgtacctggatcaaggtggagtcctggttgctatgaaacacacatctctcccaattcgacatctttggttgagttttgatgaagggagatcttggagcaaatacagtttcacatctattccactttttgtggatggggttctgggtgagcctggagaagagactctcatcatgacagtgtttggacacttcagccaccgctctgaatggcagctggtcaaagtagattacaagtccatttttgatagacggtgtgccgaagaggactacagaccttggcagctgcacagccagggggaagcatgtatcatgggagcaaaaaggatatataagaagcgaaaatcagagcggaagtgtatgcaaggaaaatatgcaggagctatggaatctgaaccctgtgtctgcactgaggctgattttgattgcgactatggttatgagcgacacagcaatggccagtgcctgccggcattttggttcaatccatcctctctgtcaaaggattgcagcttgggacagagttacctcaatagtactgggtacaggaaggtggtttccaataattgcactgatggcgtaagggaacagtacactgccaaaccgcagaagtgcccagggaaagccccgcgggggctgcggatagtcacggctgatggaaagctgacagcggaacaaggacacaacgtcactctcatggtgcaattagaagagggtgatgttcagcggacactcatccaagtggactttggcgatggtatcgcggtgtcttacgtcaatctcagctccatggaagatgggatcaaacacgtctatcagaacgtgggcattttccgtgtgaccgtgcaggtggacaacagtctgggttctgacagcgccgtcctgtacttacatgtaacttgtcccttggagcacgtgcacctgtctcttccctttgtcaccacaaagaacaaagaggtcaatgcgacggcagtgctgtggcccagccaagtgggcaccctcacttacgtgtggtggtacggaaacaacacggagcctttgatcaccttggagggaagcatatccttcagatttacttcagaaggaatgaataccatcacagtgcaggtctcagctgggaatgccatcctacaagacacaaagaccatcgcagtatatgaggaattccggtctcttcgcttgtccttttctccaaacctggatgactacaacccggacatccctgagtggaggagggacatcggtcgagtcatcaaaaaatccctggtggaagccacaggggttccaggccagcacatcctggtggcggtgctccctggcttacccaccactgctgaactctttgtcctaccctatcaggatccagctggagaaaacaaaaggtcaactgatgacctggagcagatatcagaattgctgatccacacgctcaaccaaaactcagtacacttcgagctgaagccaggagtccgagtccttgtccatgctgctcacttaacagcggcccccctggtggacctcactccaacccacagtggatctgccatgctgatgctgctctcagtggtgtttgtggggctggcagtgttcgtcatctacaagtttaaaaggaagatcccggggattaatgtttatgcccagatgcagaatgagaaagaacaagagatgatcagtccagtcagtcactctgaaagcaggcccaatgtccctcagactgaactaaggaggcctggccagcttatagatgagaaggtggaatcccagctcataggagagtagctttaccctcccctccctccccttctactcaacctggtgactcatctctccgattgcaaagagcaagacacgccactccgccttcaacgccaaagcggggatctgctggggcacagtatgcaatttaaggaaaacccccaaaggctacaggcgacctgctgatcaggaaagaatttcgctcttgtcaagtacatcatccttcatgaccactaactttgtgttttttttctttcctttgttgttctgtttcctattttgccaggaagtatttccatagttgctgagaatcaaagcacaaaagaaatccctacctatgtaaatgtttgaatggaggacgccagtaaaaaaacaaaaacaaaaacaaaacaaaacataaaatataaacaatcaaaatccaaacaaacaaacaaacactcactgcatcgggactttttaattcttcagacacagacaacaagggtttttagctttaagcctgtgcatgtggacaatactctgagaacatgtctggaggggcagtgtacaggtgctctattttaatggaaaacactcccctctccctctttcttcttctctctcttttttctgatcggtcgtgtttgtagaaaattcataacatatataggccaaggaaatctgcatgtatttttggaaatattcttggctctagatttatcagctattttagcattaaaggctgatgggtggattagctaccccagctcctttcataagacacaaagacgtgcacaggagtttgaaaccctgagctgtttctctgttccactttccatactgtcatttcccttctaagttagctttggtagctctgttggtcagcagtggccacaaggctgctttctgcactctctgtggccacaggaacaaagatgcgagttgaagatccctttgtgccggtagaataaggaaggaagggaggcagggaggcaaagcatgtcagaaacggaccttggtttcctgttcacctctttccaccatgattgcctccccttgcagctttccctactcctgccccaactgcagtaggaaatggaatcccattagttacccattgtcctgtcttcacatttgtttgtcatccatgtgtgaccatgatctgttgatatctttgaatctcttccctccaaaccccaagtaagttgtccttcaactgttctcagtttttcttcccaaacatattgctagattctggacattaaccctgacgtttcctaaatactggcctggcctgtgccgcccctgcccccactactcacaagtttctgagccctttgtcagttttgtacattcccaagcatgccagcttctgtgcccatggaccttgctgcatcctgcacagcagggttcagtttcatgtatctttgtcttttcctctagaacctgcctttttcaaatatccctgccttttcccacctggaaacatatactgtatgcgaaagagttgatatatgcaaagtaattcaaacctggccatgtactttggaaaagaaagcatagagatgaattgtggtgttctcacaccttaacgaaaatctcgtgcgatctgattccagaagattcttgtgagaaatgttttgaatgtgtgacaatttcgcagggcaatttcctcctgtgacggttgctgttacctggtatttccactctcacagtagaatagaaatgtttgtgaaataaaactgattttaactggaaggagaaacaggttaatggactttgtgtttaagagtgtcaaacagtctgagagaataaatgggggtcttgtcttacattagggtgagagtttgattatttaggatgatcccagtgatttcatgtgtgctctctgacctctgagtatcatagtatcattaaagtaaagatttaagtctgtataaaggaggagagttactgattggcaaaaaagattggcacaaagcatgaagaaaccccatttttcccagggtaatcatgaaagaaggctcagagaaagagggaaacaaaagcctgttcagcagaggcccctttagtattatggactgggcaaagcccactataaactataggagaaagaagttctgataaacctcttagtatgctcagcctccttctttgctatgtccctaagccaacagggtataacacaggccctggtgataatgagggtgtcctaaagatcctgatgtccatgacttcatgtagttcaggcacagaaagaatagcaaagctgctgtcagaagtttgtcaggcagagatgtttatggttgaggataccccatatgaatctgggaaatgggctaggcctgaggcagtcacctatttgtagaactcaattgatccccaacctgccaggcttcctatctcataggaaacatcctcattgatcctcttcagttggagtctcccaaatttaatgtggaagacaaagtgttggaaaatcaaaagaggctcactcaaaccagcacagggagtcctcagagttgcagttcaattcattttaattagaaaagtatgaaagaggtataacactcttattctagcacagtgccttgcctagagtagtagtatgaaaactatttgttgaagaaataaatgaatggaaagacatagggaagaatgggctgtaaatcctaattaaaaatagaggtcgacatgagatacctggcattttgggaagtgaccaaagatggccagctagagattcagcatctccaggatcctcatgtgcctctcctcaaagctccctcccatctgtaggagattagtgaggcaaggtgctgctcagagaggaggacctcattgttcttaggaccttggccagttgttctcaaagtgtggtacctggatcagcagtatcactatcacttgggctagttagagatccagattctggatccataccccatacctactgaattagaaactctaggggatgaatagtggtgttctctgttgctaagtgacagtgggcccagccacctattttaacaagccctcccagtgattgtgatacatactaaagtttgagaaccattgtactaggccattccagctgaatctcaaacagaaggcagtaatgagagcctacaaatgggagggacctaagtgcctacctactcgctaatcgcaggtgcaaacacacaaggagtttggtgggcttaaggtcagaggagtgtgtagggagggatgtatgtggaaggtaagattcagggcaagctaaaaatccgatactgcaacgttttccaaaatcccagaaggcaaactgtgcatgttctaccctgaaccacccaagcaacactttctaccttgccttatttttaattggattcactgtccaaaatgcagaggtttgctttgcttttttttcagaagttccaaacagcaactttgagagcagtggggtgcttggcagctgttctgtgttttccaggaatccaactgagcattgaaatctctcatttgccgacttatttttataggaagccaattaaaaaaaaaaaaagttttcttatagtattggaactacttctaattttaaaatgacttttttgatgtattttttgttaaatactatgtagtgtaatgtataattgctcttgtttattgcttttacaatcatatttattaaacagataatgtctctaaagtctttgcctcaggtatttttttttttaatcctaaacccttggtgttcattctaaatatagaagtgttgcatgtataggatttcataaaggctaattgcataagaaagagtaaacaccacaggcttgaggtttttggctgttttttactaacaaggcagaatgtatgtactacctgaattctacctgcatttcaattaactatacaatgtctgtttattaaattactttgattt

SEQ ID NO: 184900 - DNA, 5582 bp, Homo sapiens
  Payload ID: 16407
  Gene Symbol: SORCS2
  Gene Name: sortilin-related VPS10 domain containing receptor 2
  ENST ID: ENST00000329016
  CDS Start-End: 47-3010
aacaccacaggtgatcttgatcctgacgaagtactaccacgcagacatggggaaggttctggaaagttctctgtggcggtcatcagatttcgggacgtcctacaccaagctcaccctccagcctggtgtcaccaccgtcatcgacaatttctacatctgcccgaccaacaagaggaaggtcatccttgtcagctcctcactcagtgaccgggaccagagcctattcctcagcgcagacgaaggcgccacctttcagaagcagcccattcccttcttcgtggaaactctgattttccaccctaaggaggaggacaaggtcctcgcctacacaaaggagagcaagctctacgtgtcatctgacttggggaaaaagtggacacttctgcaagagcgagtgaccaaagaccacgtgttctggtctgtgtctggggtggacgctgaccctgacttggtccacgtggaagcccaagacctcggtggagattttcggtacgtcacctgcgcaatccacaattgctccgagaagatgctgacagccccattcgcaggccccattgaccacgggtctctgaccgtgcaggacgattacatcttctttaaggcaacatcagcaaaccagacaaaatactacgtctcttatcgtcgaaatgaatttgtcctgatgaagctgccgaagtatgcattgccaaaggatctgcagatcatcagcacggacgagagtcaggtgttcgtggcggtgcaggagtggtaccagatggacacctacaacctgtaccagtcggacccacggggcgtgcgctacgcgctggtgctgcaggacgtgcgcagctcacggcaggcggaggagagcgtgctcatcgacatcctggaggtcagaggggtgaaaggagtcttcctggcaaaccaaaaaattgatgggaaagtgatgacgcttataacctacaacaagggccgcgactgggattacctgaggccacccagcatggacatgaatggaaaaccaaccaactgcaagcctccagactgccacctgcacctgcacctgcgctgggcagacaacccctacgtatcaggcaccgtgcacaccaaggacaccgccccaggcctcatcatgggtgcaggtaacctgggctcacagctggtggaatataaagaagaaatgtacatcacgtcagactgtggtcacacctggcggcaggtgtttgaggaagagcatcacatcctgtacctggaccacggcggcgtgatcgtggccatcaaagacacctccatccctttgaagatcctcaagttcagtgtggacgagggcctcacctggagcacgcacaacttcaccagcacctcggtgtttgtggacgggctgctgagtgagccaggggacgagacgctggtcatgacggtctttggccacatcagcttccgctccgattgggagctggtcaaggtggacttccggccctcattctccaggcagtgcggcgaggaggactacagctcctgggagctctccaacctgcagggcgaccgctgtatcatgggccagcagagaagtttccggaaaagaaagtccacgtcctggtgcatcaaggggaggagcttcacgtcggcgctcacgtcccgcgtgtgcgagtgccgggactcggacttcctgtgcgactacggatttgagcgctcctcctcctcagagtccagcaccaacaagtgctctgccaacttctggtttaacccattgtccccgcctgacgactgtgccctgggccagacctacaccagcagccttgggtaccggaaagtggtgtccaacgtgtgtgagggtggggtggacatgcagcagagtcaggtgcagctgcagtgccccctcacgccgccccggggcctgcaggtcagcattcaaggcgaggcggtggccgtgcggcctggagaggacgtcctgtttgtggtgcggcaggagcagggtgatgtcctgactaccaagtaccaggtagaccttggggacggcttcaaggccatgtacgtgaaccttacactgaccggggagcccatccggcaccgctacgagagccccggcatctaccgcgtgtccgtcagggcagagaacacggcaggccacgatgaggcggtgctctttgtccaggtcaactcccccctgcaggccctctacctggaggtggttcctgtcattggcctcaaccaggaggtgaacctcacagctgtgctgcttcccttgaaccctaacctcaccgtcttctactggtggatcggccacagcctgcagcccctcctttccctggataattctgtgacaacgcggttttcggacacgggcgacgtgcgtgtgacggtgcaggccgcctgtgggaactcggtgctgcaggactccagggtcctccgtgtgctggatcaatttcaagtcatgcctctgcagttttccaaggagctggatgcctacaaccccaacacccctgagtggagggaagacgtgggcctggtggtcacccggctgctctccaaggagaccagcgtccctcaggagcttctggtgactgtggtgaagccggggctgcccactttggccgatctgtacgtgctcctgccccctcccaggcccacaaggaagaggagcctctcgagtgataagaggctcgccgccatccagcaggtgctgaacgcacagaagatcagcttcctcctgcgaggcggagtccgggtcctggtggccctgcgggacacaggcacaggtgctgagcagctgggcggcggtggcggctactgggcggtagtggtgctgtttgtcatcgggctcttcgcagcgggagccttcatcctctacaatttcatcaggaaacggccaggcaggaccgtgtacgcccaaatgcacaacgagaaggagcaggagatgaccagccctgtgagtcacagtgaggacgtccagggcgctgtccagggcaaccactcaggcgtggtcctgagcatcaactcccgagagatgcacagctacctggtgagctgatgccaccccagcatctgtcttttcacccacggagggcacagaaccaccagcaaagccggcggctggactggcgcccctcagagacctgcggaaagccccctccctgagtcgtcgccacaccaggcgacaggcaccaccccctctgataaatccaagcccgcccaggcccacggggggcccacgggaccccccgggactccccggacatggccctgcccctatgggacaccaggcctgactcaggcaggttctgccccccagaccccacacacggccgccccacgtgctgtcgctcagcccgaggcctgacttctctgggctgaggctggtcgtcctggagccctcccagtacctcgggctgcaagagctgcagacccgttcagacactgcgttgcgggctccttccccgcagaggccggggcctccctgactttgcttcttcactcccacctgtgcggccacccagtccctctgtgggagcccgggtgccaggccctcccaacaccacaccaccctccaggcccccctgccctccggctggaaactgcagctctgtaaatgcctctctaggtagctgctggcggtggtgggggtgtctcactctctgtctttatagccggcggtagccaccggggtggctctgtcagagttccgtactcgggagcccctttccctgagtgcccagggtgtctcctctgcccagaggggcagcagctctccctggttctccccagggcagacggggtagggcgggctcaggacccagtgcccatggttcctcactcctaccagcaagcagcaccatcccgcaggcttctcccacctgatggctgttctcccaccgggtctgggctctggaaggagccagatgcccccagaaaggtgggtggtggagacggcaccagatgtaccagttttctgcagttccttataggcgaagggaaccgggtggaaaccaagctgggagaggctgaggatggcagggctggaagggccatcagcgtgaccctcattttcaagaaggggaaactgaggcccagggaggagagtaactgaaggtcacagcacggtcacagcagaggtggccgaacccagccctctgcgcgccagtgctgtgcggtctccacacccttacggtttcctagaatcagggatgttagtgtaagtctataggaatataggggggtgggggggtcaccttttgccttgaaatgggaagtcagtagccccttcctcctcctccctcctccccctcctctctggcagggatctcagatgaccgtggcctccctctcagagggggagaacgccagagccctggctggtgatgtgctggctgggggtgaatcccaatgagggtccctctcagagcgggagaacgccagagccctggatggtgatgcgctggctgggggtgaatcccaatgagggtccctctcagaaagggagaacgccagagccctggctggtgacatgctggctgggggtgaatccgaatgacagtgcagacgttctcccatccaccatgtctgagcttgggggaattgcctcatttcccctggaaaagaaacatggtccattagaggggaaagcccaggggtgaatcttcacgccccaaacagtgcccggtggggaggaggcacccgctccttgttgagtaaaaccacccatggagactggaacctcatctccctgggtcggggggtgttcaaggccacaggacaaggggagcaccctgggccacacaggcgtggaggtgtccccaccccttccacctgtcccccagacccaaagctctctccccaccctacctgcccacctggggctcctgtgccccctccccactccagaggccaccctacaagttgtcctcaaggtcatcctggagatgggatccaggacgtggggccatgactctctgggaccttgccacagcccccattcccctgcttgcagtctgcaaggacacctttgcagggattcttgtcctgctggccaccccacccacacctgtccctggccagcaggccgcctgcaagcgtcaggcacacagggacagacatggcgagcacagtgcaggcccggggcccacgggcaacatggaaccctgggaactgccctcccccttagctcacagtgcctgcggtagccactctaggtcgttggccttccttgaccactccatttaattctctctgctgtttgggttgggtttttccccttagttatctgtgggtttcctgtattttatgttaatatttctattaagaacatgttgggcatgtggacccaagcacctgggaaggaggtggcatctgagacagcctgatacgttcccgtctgtgcacccatggagatccaggcgtgggcccgtgtctgtccctggttgtaaattcgagggtctgcatatctgatgttcaggtagacctgggcgcctgggaacgaggccatcagctgccatgcacataacaaagagacaatgcattccttcttatttttcctttttaaaaatcgatgaatcatttgtgatgcttttaacaaagattaaatgaatttgatcagcttttgcctt

SEQ ID NO: 184901 - DNA, 6152 bp, Homo sapiens
  Payload ID: 16407
  Gene Symbol: SORCS2
  Gene Name: sortilin-related VPS10 domain containing receptor 2
  Uniprot ID: Q96PQ0
  ENST ID: ENST00000507866
  CDS Start-End: 110-3589
cctttctctgcgctctcgctcgcgctccccagcgccctcctgctctcccggccgcggtcccctcgtccgcgccgccccgccgccggctccgctgccgcccctggcgaccatggcgcaccgggggccctcgcgcgcctcgaagggccccggccccaccgcccgagccccgagccccggggctccgccgccgccgcgctcgccgcgctcgcggccgctcctgctgctgctgctgctgctgggcgcctgcggggcggcggggcgctcccctgagcccgggcgcctgggtcctcacgcccaactgacccgggtgccgcggagccctcccgcggggcgcgcggagcccggtggcggcgaggaccggcaggcgcgcggcacggagccaggcgccccgggtccgagtcccggtcccgctcctggtcccggcgaggacggcgcccccgccgcgggctaccggcgctgggagcgggcggcgccgctggccggagtggcttcgcgggcgcaggtctcgctcatcagcacgtcgttcgtgctcaagggggacgcgacgcacaaccaggcgatggtgcactggacgggcgagaacagcagcgtgatcttgatcctgacgaagtactaccacgcagacatggggaaggttctggaaagttctctgtggcggtcatcagatttcgggacgtcctacaccaagctcaccctccagcctggtgtcaccaccgtcatcgacaatttctacatctgcccgaccaacaagaggaaggtcatccttgtcagctcctcactcagtgaccgggaccagagcctattcctcagcgcagacgaaggcgccacctttcagaagcagcccattcccttcttcgtggaaactctgattttccaccctaaggaggaggacaaggtcctcgcctacacaaaggagagcaagctctacgtgtcatctgacttggggaaaaagtggacacttctgcaagagcgagtgaccaaagaccacgtgttctggtctgtgtctggggtggacgctgaccctgacttggtccacgtggaagcccaagacctcggtggagattttcggtacgtcacctgcgcaatccacaattgctccgagaagatgctgacagccccattcgcaggccccattgaccacgggtctctgaccgtgcaggacgattacatcttctttaaggcaacatcagcaaaccagacaaaatactacgtctcttatcgtcgaaatgaatttgtcctgatgaagctgccgaagtatgcattgccaaaggatctgcagatcatcagcacggacgagagtcaggtgttcgtggcggtgcaggagtggtaccagatggacacctacaacctgtaccagtcggacccacggggcgtgcgctacgcgctggtgctgcaggacgtgcgcagctcacggcaggcggaggagagcgtgctcatcgacatcctggaggtcagaggggtgaaaggagtcttcctggcaaaccaaaaaattgatgggaaagtgatgacgcttataacctacaacaagggccgcgactgggattacctgaggccacccagcatggacatgaatggaaaaccaaccaactgcaagcctccagactgccacctgcacctgcacctgcgctgggcagacaacccctacgtatcaggcaccgtgcacaccaaggacaccgccccaggcctcatcatgggtgcaggtaacctgggctcacagctggtggaatataaagaagaaatgtacatcacgtcagactgtggtcacacctggcggcaggtgtttgaggaagagcatcacatcctgtacctggaccacggcggcgtgatcgtggccatcaaagacacctccatccctttgaagatcctcaagttcagtgtggacgagggcctcacctggagcacgcacaacttcaccagcacctcggtgtttgtggacgggctgctgagtgagccaggggacgagacgctggtcatgacggtctttggccacatcagcttccgctccgattgggagctggtcaaggtggacttccggccctcattctccaggcagtgcggcgaggaggactacagctcctgggagctctccaacctgcagggcgaccgctgtatcatgggccagcagagaagtttccggaaaagaaagtccacgtcctggtgcatcaaggggaggagcttcacgtcggcgctcacgtcccgcgtgtgcgagtgccgggactcggacttcctgtgcgactacggatttgagcgctcctcctcctcagagtccagcaccaacaagtgctctgccaacttctggtttaacccattgtccccgcctgacgactgtgccctgggccagacctacaccagcagccttgggtaccggaaagtggtgtccaacgtgtgtgagggtggggtggacatgcagcagagtcaggtgcagctgcagtgccccctcacgccgccccggggcctgcaggtcagcattcaaggcgaggcggtggccgtgcggcctggagaggacgtcctgtttgtggtgcggcaggagcagggtgatgtcctgactaccaagtaccaggtagaccttggggacggcttcaaggccatgtacgtgaaccttacactgaccggggagcccatccggcaccgctacgagagccccggcatctaccgcgtgtccgtcagggcagagaacacggcaggccacgatgaggcggtgctctttgtccaggtcaactcccccctgcaggccctctacctggaggtggttcctgtcattggcctcaaccaggaggtgaacctcacagctgtgctgcttcccttgaaccctaacctcaccgtcttctactggtggatcggccacagcctgcagcccctcctttccctggataattctgtgacaacgcggttttcggacacgggcgacgtgcgtgtgacggtgcaggccgcctgtgggaactcggtgctgcaggactccagggtcctccgtgtgctggatcaatttcaagtcatgcctctgcagttttccaaggagctggatgcctacaaccccaacacccctgagtggagggaagacgtgggcctggtggtcacccggctgctctccaaggagaccagcgtccctcaggagcttctggtgactgtggtgaagccggggctgcccactttggccgatctgtacgtgctcctgccccctcccaggcccacaaggaagaggagcctctcgagtgataagaggctcgccgccatccagcaggtgctgaacgcacagaagatcagcttcctcctgcgaggcggagtccgggtcctggtggccctgcgggacacaggcacaggtgctgagcagctgggcggcggtggcggctactgggcggtagtggtgctgtttgtcatcgggctcttcgcagcgggagccttcatcctctacaagttcaaaaggaaacggccaggcaggaccgtgtacgcccaaatgcacaacgagaaggagcaggagatgaccagccctgtgagtcacagtgaggacgtccagggcgctgtccagggcaaccactcaggcgtggtcctgagcatcaactcccgagagatgcacagctacctggtgagctgatgccaccccagcatctgtcttttcacccacggagggcacagaaccaccagcaaagccggcggctggactggcgcccctcagagacctgcggaaagccccctccctgagtcgtcgccacaccaggcgacaggcaccaccccctctgataaatccaagcccgcccaggcccacggggggcccacgggaccccccgggactccccggacatggccctgcccctatgggacaccaggcctgactcaggcaggttctgccccccagaccccacacacggccgccccacgtgctgtcgctcagcccgaggcctgacttctctgggctgaggctggtcgtcctggagccctcccagtacctcgggctgcaagagctgcagacccgttcagacactgcgttgcgggctccttccccgcagaggccggggcctccctgactttgcttcttcactcccacctgtgcggccacccagtccctctgtgggagcccgggtgccaggccctcccaacaccacaccaccctccaggcccccctgccctccggctggaaactgcagctctgtaaatgcctctctaggtagctgctggcggtggtgggggtgtctcactctctgtctttatagccggcggtagccaccggggtggctctgtcagagttccgtactcgggagcccctttccctgagtgcccagggtgtctcctctgcccagaggggcagcagctctccctggttctccccagggcagacggggtagggcgggctcaggacccagtgcccatggttcctcactcctaccagcaagcagcaccatcccgcaggcttctcccacctgatggctgttctcccaccgggtctgggctctggaaggagccagatgcccccagaaaggtgggtggtggagacggcaccagatgtaccagttttctgcagttccttataggcgaagggaaccgggtggaaaccaagctgggagaggctgaggatggcagggctggaagggccatcagcgtgaccctcattttcaagaaggggaaactgaggcccagggaggagagtaactgaaggtcacagcacggtcacagcagaggtggccgaacccagccctctgcgcgccagtgctgtgcggtctccacacccttacggtttcctagaatcagggatgttagtgtaagtctataggaatataggggggtgggggggtcaccttttgccttgaaatgggaagtcagtagccccttcctcctcctccctcctccccctcctctctggcagggatctcagatgaccgtggcctccctctcagagggggagaacgccagagccctggctggtgatgtgctggctgggggtgaatcccaatgagggtccctctcagagcgggagaacgccagagccctggatggtgatgcgctggctgggggtgaatcccaatgagggtccctctcagaaagggagaacgccagagccctggctggtgacatgctggctgggggtgaatccgaatgacagtgcagacgttctcccatccaccatgtctgagcttgggggaattgcctcatttcccctggaaaagaaacatggtccattagaggggaaagcccaggggtgaatcttcacgccccaaacagtgcccggtggggaggaggcacccgctccttgttgagtaaaaccacccatggagactggaacctcatctccctgggtcggggggtgttcaaggccacaggacaaggggagcaccctgggccacacaggcgtggaggtgtccccaccccttccacctgtcccccagacccaaagctctctccccaccctacctgcccacctggggctcctgtgccccctccccactccagaggccaccctacaagttgtcctcaaggtcatcctggagatgggatccaggacgtggggccatgactctctgggaccttgccacagcccccattcccctgcttgcagtctgcaaggacacctttgcagggattcttgtcctgctggccaccccacccacacctgtccctggccagcaggccgcctgcaagcgtcaggcacacagggacagacatggcgagcacagtgcaggcccggggcccacgggcaacatggaaccctgggaactgccctcccccttagctcacagtgcctgcggtagccactctaggtcgttggccttccttgaccactccatttaattctctctgctgtttgggttgggtttttccccttagttatctgtgggtttcctgtattttatgttaatatttctattaagaacatgttgggcatgtggacccaagcacctgggaaggaggtggcatctgagacagcctgatacgttcccgtctgtgcacccatggagatccaggcgtgggcccgtgtctgtccctggttgtaaattcgagggtctgcatatctgatgttcaggtagacctgggcgcctgggaacgaggccatcagctgccatgcacataacaaagagacaatgcattccttcttatttttcctttttaaaaatcgatgaatcatttgtgatgcttttaacaaagattaaatgaatttgatcagc

SEQ ID NO: 184902 - DNA, 762 bp, Homo sapiens
  Payload ID: 16407
  Gene Symbol: SORCS2
  Gene Name: sortilin-related VPS10 domain containing receptor 2
  ENST ID: ENST00000505529
  CDS Start-End: 1-306
cagctgggcggcggtggcggctactgggcggtagtggtgctgtttgtcatcgggctcttcgcagcgggagccttcatcctctacaagttcaaaaggaaacggccaggcaggaccgtgtacgcccaaatgcacaacgagaaggagcaggagatgaccagccctgtgagtcacagtgaggacgtccagggcgctgtccagggtgaggagtttatagatgatgatctcgactcgcagactctaggcaaccactcaggcgtggtcctgagcatcaactcccgagagatgcacagctacctggtgagctgatgccaccccagcatctgtcttttcacccacggagggcacagaaccaccagcaaagccggcggctggactggcgcccctcagagacctgcggaaagccccctccctgagtcgtcgccacaccaggcgacaggcaccaccccctctgataaatccaagcccgcccaggcccacggggggcccacgggaccccccgggactccccggacatggccctgcccctatgggacaccaggcctgactcaggcaggttctgccccccagaccccacacacggccgccccacgtgctgtcgctcagcccgaggcctgacttctctgggctgaggctggtcgtcctggagccctcccagtacctcgggctgcaagagctgcagacccgttcagacactgcgttgcgggctccttccccgcagaggccggggcctccctgactttgcttcttcactcccacctgtgc

SEQ ID NO: 184903 - DNA, 5530 bp, Homo sapiens
  Payload ID: 16408
  Gene Symbol: SORCS3
  Gene Name: sortilin-related VPS10 domain containing receptor 3
  Uniprot ID: Q9UPU3
  ENST ID: ENST00000369699
  CDS Start-End: 1-3669
atggaggcggcgcgcacggagcgccccgcaggcaggccgggggcgccgcttgtccggacggggctcctactcttgtcgacgtgggtcctggccggcgccgagatcacttgggacgcgacaggcggtcccggacgcccggcggccccggcttcgcggccaccggcgttgtctccactctcgccgcgggcagtggccagccagtggccggaggagctggcgtcggcgcggagagccgccgtgctggggcgccgggccggaccagagctgctgccccagcagggcggcggcagaggcggtgagatgcaggtggaagccggagggacatcaccggcaggcgagcggcggggccggggcatcccagctcctgccaagcttggcggcgcgaggaggagtcgccgggcgcagcccccaatcacccaggaacgcggggacgcctgggccactgctccggccgatggttccagaggaagccgtccccttgctaagggttcccgggaggaggtgaaggcgccgcgggctggggggtcggcggctgaagacctccggctgcccagcacctccttcgcgctgaccggggactcggcccacaaccaagccatggtgcactggtcgggacacaactcctctgtcatacttatcctgacgaagctgtatgacttcaacctgggcagcgtgactgagagttcactatggaggtcgacagattatggcaccacctatgaaaagctgaatgacaaagtgggtttgaagactgtcctcagttacctctatgtcaatccaaccaacaaaaggaagattatgcttctcagtgatcctgagatggagagcagcatattgatcagctcagacgaaggggcgacctatcagaagtatcggctcaccttctatatccagagcctgctctttcatcccaagcaagaggactgggtgctggcctacagtttggatcaaaagctctacagctccatggactttggaagacggtggcaactcatgcatgaacgcatcacacccaacaggttttattggtcggtggccggattggataaggaggcggacctggtgcacatggaggtgcggaccacggatggatatgctcactacctcacctgcaggatccaggaatgtgccgagacaactagaagtgggccttttgcccgctccattgacatcagttccctggttgtccaggatgaatatatcttcattcaggtaacaactagtggaagagccagctactacgtgtcttatcgaagagaggcctttgctcagataaagctgcctaagtactcgttgccaaaggacatgcacatcatcagtacagacgagaaccaagtatttgctgcggtccaagaatggaaccagaacgacacgtacaacctctacatctcagacacgcgtgggatttacttcactctggccatggagaacatcaagagcagcagaggtctaatggggaacatcattattgaattgtatgaggtagcaggtatcaaagggatatttctggcaaacaagaaggtggacgaccaggtgaagacatacatcacttacaacaaaggcagggattggcgcctgctgcaagctccggatgtggacctgagaggaagcccagtgcactgcctgctgcccttctgttccttacatctgcacctgcaactctctgaaaatccatattcctcaggaagaatctctagcaaggagacagccccaggacttgtggtggctacaggcaacattggcccggagctctcatatactgatattggtgtgttcatctcctccgatgggggcaacacatggagacagatctttgatgaagagtacaatgtctggttcctagactggggtggtgccctcgtggccatgaaacacacacctctgccagtcaggcatttgtgggtgagttttgatgagggccactcttgggacaagtatggtttcacttcggttcctctctttgttgacggggctctggtggaggcaggaatggagacccacatcatgacagtttttggccacttcagcctccgctccgaatggcaattggtgaaagtggactacaaatctatcttcagccggcattgcaccaaggaggactatcagacctggcacctgctcaatcagggagagccttgtgtcatgggagaaaggaaaatattcaagaaacgtaagccaggagctcagtgtgccctgggccgagaccactcaggatcagtggtctcagaaccctgtgtctgtgccaattgggacttcgagtgtgactatgggtatgagagacatggggagagccagtgtgtcccagctttctggtacaatccagcatccccatcaaaggactgcagccttggtcaaagctaccttaacagcactgggtatcggcggattgtgtccaacaactgcacagatgggctaagggagaagtacaccgccaaggcccagatgtgccctggaaaagcccctcggggcctccatgtggtgacgaccgatgggcggctggtggcagagcaggggcacaatgcaactttcatcatcctcatggaggagggtgatctacaaaggacaaacatccagcttgactttggggatgggattgctgtgtcctacgcaaacttcagccccatcgaggacggcatcaagcacgtgtataagagtgcggggatcttccaggtgacagcctatgcagagaacaaccttggctcagacacagctgtcctcttcctgcatgtggtttgtcctgtggagcatgttcatctccgagttccatttgttgccataagaaataaggaggtcaacatcagtgcagtcgtgtggcccagtcaactggggacccttacctatttctggtggttcggcaatagcacaaagcctctcatcactttggacagcagcatttccttcacattccttgcagaaggaaccgacaccatcacagtccaggtggctgctgggaatgccctcatccaggacacaaaagagattgcagttcatgaatatttccagtcccagcttttatcattctctcctaatctggattaccacaatcctgacattcctgagtggagaaaagatattggcaatgtcatcaagcgagctctggttaaagtaaccagtgtcccagaggaccagatcctcattgccgtgtttcctggtctccccacttcagcagagcttttcattcttccacccaagaacctgacagagaggaggaaaggcaatgaaggggacctggaacaaattgtagaaacactgtttaatgctctcaaccaaaatttggtccagtttgagctgaagccgggggtacaagtcattgtgtatgtcacacagctgacgttagctccattggtggactccagtgctgggcacagcagctcagccatgcttatgctattatcagtggtatttgttggcctggctgtgtttttgatctacaagtttaaaaggaaaatcccttggattaacatctatgctcaagtccaacacgacaaggagcaggagatgattgggtcagtgagccaaagtgaaaacgcccccaaaatcacactcagtgactttacggagcctgaggagctgctggacaaagagctggacacgcgggtcataggaggcattgccactattgcaaacagcgaaagcacaaaggagatccccaactgcactagtgtttaataccagcaagccacgtggtcaaccacctttctgactttttatttttgatgattactattactattattatggaaaaattaaaatgtcttttttaccttttgtttaccaagggccccttcataaatagcaggcaaatgcctagctttgggagaaaagggcattcttagctgattgaaatgagacaaagggaataaatggctgtatttgtgctaagagcaaaggatgcatcttcccacagcctcctcgctttactctgccattggtagcttaaagactttctttttccttgtggtctcccttttttcaaaattgaagttgggttggctctttgtgaacctctcatccccacagcagaatcaccaacactctccgcttcccccagcacacacacatacaacacagatcatttcccagttagatccgcaggaagtaggttggtgggggtggatgtagctgcagaaagcatgcacaactttgtgaaagaggccctgccttgtgcatgtccatagtgaggctacagatggcttattgtatataattacaatgtaaatagctttttatttcctaagaaataatttaatgtttagtaaaaaagaaaacagaaaaaagaaagatgcgtgtgttggcttacgcactggccctcagagctgaccaacccgccaggcctgctcaatgcattgggtttggatgctctcctgttgtctgtcacacttaactcttgcatctccttgtccatgccatagctggtttctacttatgtatataaaggggggtggggggaggggcttctctggggcaattgataaaggaaggactctagtgacatcatagaacatggcagtcgtttttgttccaagaatgatatgaaaggtgaagaagaggcccactagaggcttcatactgagacccagatgggggaaaacagcttcctctctaaaaggaaaaacttgatatttatcagtctgagaaaatatttttttctaaagaaggcagtcagtggatcttaaaatgacaatctgtttttaaattggattctatgaaaatgcataatgcttatggtgaattctcaggctattctgagctcagaaaagtcccctgggcactaggtaaagcccagtgaatgtctcttggcatgggaggagttaaagaggttggaagggaagaggcatttgtggaattatgagttcatgcaaaactctccaggccaagtaggggtctagcctttaatgatattagtcaaaggcaattttagcaaagctgtgctatttgcttgtcagatgtacacaacttccttaaagtcaaatgtctgccttcagttcccttaaggtagttcttgcctctggggtgagtggctttcaaagccttttagcttttccagcacctcagccccttcacacatttacacataccaatttttttcaatagggtcacgttaagccatgctgtaagcattgtttttattttcaggcttagcctgagcacacttatttttgaaaatgatataatgtatatatatgggaggaaaggccacattttgtacctgttaatttttgtgggatgttgttcccattcttctttgtgagacagagagaatgtgatatagagaaatctggctggctacagtgtagatcagtattaggaatatttctaaagatcctgcttttttgtttcaagggttaaatggggcagacaattgcaatacttgtactaaacactggaatacaaatgcatgactcatatctatatatacagtatatgtacatatactgttcttggttttattgttccacttgaatatttctactgtaaaaaaaagacagtggttttgaaattgttgaaaataaatgtatttttgtacatc

SEQ ID NO: 184904 - DNA, 5757 bp, Homo sapiens
  Payload ID: 16408
  Gene Symbol: SORCS3
  Gene Name: sortilin-related VPS10 domain containing receptor 3
  Uniprot ID: Q9UPU3
  ENST ID: ENST00000369701
  CDS Start-End: 228-3896
atcaccctctggacaagagaacgggcgagcgggagctaggagggaagagtggagaggaccggcgaggcgcgccagccggagccacctccttcccggccgccccctccccactccccctacacacacacgctcgctcgctcgccggcgcgcgcacaccccccgcgccggacccgcacctcggcgggcgccacacactcggcagcccgagccgcggtagccgcagcgggatggaggcggcgcgcacggagcgccccgcaggcaggccgggggcgccgcttgtccggacggggctcctactcttgtcgacgtgggtcctggccggcgccgagatcacttgggacgcgacaggcggtcccggacgcccggcggccccggcttcgcggccaccggcgttgtctccactctcgccgcgggcagtggccagccagtggccggaggagctggcgtcggcgcggagagccgccgtgctggggcgccgggccggaccagagctgctgccccagcagggcggcggcagaggcggtgagatgcaggtggaagccggagggacatcaccggcaggcgagcggcggggccggggcatcccagctcctgccaagcttggcggcgcgaggaggagtcgccgggcgcagcccccaatcacccaggaacgcggggacgcctgggccactgctccggccgatggttccagaggaagccgtccccttgctaagggttcccgggaggaggtgaaggcgccgcgggctggggggtcggcggctgaagacctccggctgcccagcacctccttcgcgctgaccggggactcggcccacaaccaagccatggtgcactggtcgggacacaacagcagcgtcatacttatcctgacgaagctgtatgacttcaacctgggcagcgtgactgagagttcactatggaggtcgacagattatggcaccacctatgaaaagctgaatgacaaagtgggtttgaagactgtcctcagttacctctatgtcaatccaaccaacaaaaggaagattatgcttctcagtgatcctgagatggagagcagcatattgatcagctcagacgaaggggcgacctatcagaagtatcggctcaccttctatatccagagcctgctctttcatcccaagcaagaggactgggtgctggcctacagtttggatcaaaagctctacagctccatggactttggaagacggtggcaactcatgcatgaacgcatcacacccaacaggttttattggtcggtggccggattggataaggaggcggacctggtgcacatggaggtgcggaccacggatggatatgctcactacctcacctgcaggatccaggaatgtgccgagacaactagaagtgggccttttgcccgctccattgacatcagttccctggttgtccaggatgaatatatcttcattcaggtaacaactagtggaagagccagctactacgtgtcttatcgaagagaggcctttgctcagataaagctgcctaagtactcgttgccaaaggacatgcacatcatcagtacagacgagaaccaagtatttgctgcggtccaagaatggaaccagaacgacacgtacaacctctacatctcagacacgcgtgggatttacttcactctggccatggagaacatcaagagcagcagaggtctaatggggaacatcattattgaattgtatgaggtagcaggtatcaaagggatatttctggcaaacaagaaggtggacgaccaggtgaagacatacatcacttacaacaaaggcagggattggcgcctgctgcaagctccggatgtggacctgagaggaagcccagtgcactgcctgctgcccttctgttccttacatctgcacctgcaactctctgaaaatccatattcctcaggaagaatctctagcaaggagacagccccaggacttgtggtggctacaggcaacattggcccggagctctcatatactgatattggtgtgttcatctcctccgatgggggcaacacatggagacagatctttgatgaagagtacaatgtctggttcctagactggggtggtgccctcgtggccatgaaacacacacctctgccagtcaggcatttgtgggtgagttttgatgagggccactcttgggacaagtatggtttcacttcggttcctctctttgttgacggggctctggtggaggcaggaatggagacccacatcatgacagtttttggccacttcagcctccgctccgaatggcaattggtgaaagtggactacaaatctatcttcagccggcattgcaccaaggaggactatcagacctggcacctgctcaatcagggagagccttgtgtcatgggagaaaggaaaatattcaagaaacgtaagccaggagctcagtgtgccctgggccgagaccactcaggatcagtggtctcagaaccctgtgtctgtgccaattgggacttcgagtgtgactatgggtatgagagacatggggagagccagtgtgtcccagctttctggtacaatccagcatccccatcaaaggactgcagccttggtcaaagctaccttaacagcactgggtatcggcggattgtgtccaacaactgcacagatgggctaagggagaagtacaccgccaaggcccagatgtgccctggaaaagcccctcggggcctccatgtggtgacgaccgatgggcggctggtggcagagcaggggcacaatgcaactttcatcatcctcatggaggagggtgatctacaaaggacaaacatccagcttgactttggggatgggattgctgtgtcctacgcaaacttcagccccatcgaggacggcatcaagcacgtgtataagagtgcggggatcttccaggtgacagcctatgcagagaacaaccttggctcagacacagctgtcctcttcctgcatgtggtttgtcctgtggagcatgttcatctccgagttccatttgttgccataagaaataaggaggtcaacatcagtgcagtcgtgtggcccagtcaactggggacccttacctatttctggtggttcggcaatagcacaaagcctctcatcactttggacagcagcatttccttcacattccttgcagaaggaaccgacaccatcacagtccaggtggctgctgggaatgccctcatccaggacacaaaagagattgcagttcatgaatatttccagtcccagcttttatcattctctcctaatctggattaccacaatcctgacattcctgagtggagaaaagatattggcaatgtcatcaagcgagctctggttaaagtaaccagtgtcccagaggaccagatcctcattgccgtgtttcctggtctccccacttcagcagagcttttcattcttccacccaagaacctgacagagaggaggaaaggcaatgaaggggacctggaacaaattgtagaaacactgtttaatgctctcaaccaaaatttggtccagtttgagctgaagccgggggtacaagtcattgtgtatgtcacacagctgacgttagctccattggtggactccagtgctgggcacagcagctcagccatgcttatgctattatcagtggtatttgttggcctggctgtgtttttgatctacaagtttaaaaggaaaatcccttggattaacatctatgctcaagtccaacacgacaaggagcaggagatgattgggtcagtgagccaaagtgaaaacgcccccaaaatcacactcagtgactttacggagcctgaggagctgctggacaaagagctggacacgcgggtcataggaggcattgccactattgcaaacagcgaaagcacaaaggagatccccaactgcactagtgtttaataccagcaagccacgtggtcaaccacctttctgactttttatttttgatgattactattactattattatggaaaaattaaaatgtcttttttaccttttgtttaccaagggccccttcataaatagcaggcaaatgcctagctttgggagaaaagggcattcttagctgattgaaatgagacaaagggaataaatggctgtatttgtgctaagagcaaaggatgcatcttcccacagcctcctcgctttactctgccattggtagcttaaagactttctttttccttgtggtctcccttttttcaaaattgaagttgggttggctctttgtgaacctctcatccccacagcagaatcaccaacactctccgcttcccccagcacacacacatacaacacagatcatttcccagttagatccgcaggaagtaggttggtgggggtggatgtagctgcagaaagcatgcacaactttgtgaaagaggccctgccttgtgcatgtccatagtgaggctacagatggcttattgtatataattacaatgtaaatagctttttatttcctaagaaataatttaatgtttagtaaaaaagaaaacagaaaaaagaaagatgcgtgtgttggcttacgcactggccctcagagctgaccaacccgccaggcctgctcaatgcattgggtttggatgctctcctgttgtctgtcacacttaactcttgcatctccttgtccatgccatagctggtttctacttatgtatataaaggggggtggggggaggggcttctctggggcaattgataaaggaaggactctagtgacatcatagaacatggcagtcgtttttgttccaagaatgatatgaaaggtgaagaagaggcccactagaggcttcatactgagacccagatgggggaaaacagcttcctctctaaaaggaaaaacttgatatttatcagtctgagaaaatatttttttctaaagaaggcagtcagtggatcttaaaatgacaatctgtttttaaattggattctatgaaaatgcataatgcttatggtgaattctcaggctattctgagctcagaaaagtcccctgggcactaggtaaagcccagtgaatgtctcttggcatgggaggagttaaagaggttggaagggaagaggcatttgtggaattatgagttcatgcaaaactctccaggccaagtaggggtctagcctttaatgatattagtcaaaggcaattttagcaaagctgtgctatttgcttgtcagatgtacacaacttccttaaagtcaaatgtctgccttcagttcccttaaggtagttcttgcctctggggtgagtggctttcaaagccttttagcttttccagcacctcagccccttcacacatttacacataccaatttttttcaatagggtcacgttaagccatgctgtaagcattgtttttattttcaggcttagcctgagcacacttatttttgaaaatgatataatgtatatatatgggaggaaaggccacattttgtacctgttaatttttgtgggatgttgttcccattcttctttgtgagacagagagaatgtgatatagagaaatctggctggctacagtgtagatcagtattaggaatatttctaaagatcctgcttttttgtttcaagggttaaatggggcagacaattgcaatacttgtactaaacactggaatacaaatgcatgactcatatctatatatacagtatatgtacatatactgttcttggttttattgttccacttgaatatttctactgtaaaaaaaagacagtggttttgaaattgttgaaaataaatgtatttttgtacatc

SEQ ID NO: 184905 - DNA, 458 bp, Homo sapiens
  Payload ID: 16408
  Gene Symbol: SORCS3
  Gene Name: sortilin-related VPS10 domain containing receptor 3
  ENST ID: ENST00000393176
  CDS Start-End: 1-458
gaaaatccatattcctcaggaagaatctctagcaaggagacagccccaggacttgtggtggctacaggcaacattggcccggagctctcatatactgatattggtgtgttcatctcctccgatgggggcaacacatggagacagatctttgatgaagagtacaatgtctggttcctagactggggtggtgccctcgtggccatgaaacacacacctctgccagtcaggcatttgtgggtgagttttgatgagggccactcttgggacaagtatggtttcacttcggttcctctctttgttgacggggctctggtggaggcaggaatggagacccacatcatgactgactatgggtatgagagacatggggagagccagtgtgtcccagctttctggtacaatccagcatccccatcaaaggactgcagccttggtcaaagctaccttaacagcactgg

SEQ ID NO: 184906 - DNA, 3373 bp, Homo sapiens
  Payload ID: 16409
  Gene Symbol: SNX1
  Gene Name: sorting nexin 1
  Uniprot ID: Q13596
  ENST ID: ENST00000261889
  CDS Start-End: 22-1695
ttccgccgcgggtggaagaagatggcgtcgggtggtggtggctgtagcgcttcggagagactgcctccgcccttccccggcctggagccggagtccgagggggcggccgggggatcagaacccgaggctggggacagcgacaccgagggggaggacattttcaccggcgccgcggtggtcagtaaacatcagtctccaaagataactacatcccttcttcccatcaacaatggctccaaagaaaatgggatccatgaagaacaagaccaagagccacaggatctctttgcagatgccacagtggagctatccttggacagcacacaaaataatcagaagaaggtgctagccaaaacactcatttctcttcctcctcaggaagccacaaattcttcgaagccccagccaacctatgaggagctagaggaagaagaacaggaggatcaatttgatttgacagtcggtataactgatcctgagaagataggggatggtatgaatgcatatgtagcctacaaagttacaacacagacaagcttaccattgttcagaagcaaacagtttgcagtaaaaagaagatttagtgactttctgggtctttatgagaagctttccgagaagcactctcagaatggcttcattgtccctccgcccccggagaagagcctcatagggatgacaaaagtgaaagttgggaaggaagattcttcttctgcagaatttcttgaaaaacggagggccgctttagaaaggtaccttcagaggattgtaaatcatcctaccatgttacaggaccctgacgtcagagagttcttggaaaaagaagagctgccacgtgccgtgggtacccagacattgagtggtgctggtctcctcaagatgttcaacaaagccacagatgccgtcagcaaaatgaccatcaagatgaatgaatcagacatttggtttgaggagaagctccaggaggtagagtgtgaggagcagcgcttacggaaactgcatgctgttgtagaaactctagtcaaccataggaaagagctagcgctgaacacagcccagtttgcaaagagtctagccatgcttgggagctctgaggacaacacggcattgtcacgggcactctcccagctggctgaggtggaagaaaaaattgagcagctccaccaggaacaggccaacaatgacttcttcctccttgctgagctcctgagtgactacattcgcctcctggccatagtccgcgctgccttcgaccagcgcatgaagacatggcagcgctggcaggatgcccaagccacactgcagaagaagcgggaggccgaggctcggctgctgtgggccaacaagcctgataagctgcagcaggccaaggacgagatcctcgagtgggagtctcgggtgactcaatatgaaagggacttcgagaggatttcaacagtggtccgaaaagaagtgatacggtttgagaaagagaaatccaaggacttcaagaaccacgtgatcaagtaccttgagacactcctttactcacagcagcaggctggggagcagttgggaatcaggtctggaatactcctaaccaagaagttgcccaggtatagtaagtttttctctaccgttcacaagttttgtgctgctgcttccctctggaaatggggtttctttctctccgcctacctcagctacctgttctgagggtctcaatctgtttcgtattcccacttctttagggaaggagttttaaaaacatctcttaaaataagaggagcaaaatctattaaaacctattctcctgcaaaggaggcagagactttctctctctcttttttttttttttttggtgtccctatcattaagcaagagcctttctcttttattcttcctgcttccctaagctgctcagggttctctgagtcttgccctctgatggcaagtcttatatataactaaacctatttttgtcacccatcaaaacacatcctcagtagactgtgtgaaggtgtgaaggtctgataatgacttgatgctttgtctccatagacatgaaagccatgccctctgcctctagatagggtgatccaagagctcctgaaccttaggaggttcaaagaagctctactgtctgtgcccaggaggtagcctgccagcaagagccctcaggagttgcacacacagccaaagggtgttcacacagatctctgccggtctagccaggggaggccagagtctcgtcagtcaaggatgggcttcccccttagctgtgtccacagctgctcaagctatactggtcagagtgggctttgaagctcctttgtgagctcgagctgctgactgccactatgggagccttgccacctccagcccctccatcccaaagacgctcctgccactggggccccaggtcctgctgtatcagttctctttggtggggggctaaggtttggggcgaggcaacctgagacaagaaaacgcagtaaacattctgattccctgtacacagatgcagcaccaggggaagggccagtggtgcaagtatttctttttaacaggtgaagtttttggaaaaagtcactctccctacccctcagtatccttaccatcaactttggttttatccttccagtctttattatatgcttgcttttacatagttgtaataatatacacataaagtattttgtatcctgcttttatcattcaacattgtacatgttataagcattttactatattgttatatatcttcacaaagttgatctgtaaagctgtgtaatttgaaggcatccatagggtgactgtaccataattttgattcatcccttgttgttggattcttggtcaggggttgtttgttttgttttattggtaactttaaaattttgaatacaatttcagatttacagaaaagttgcaggaatatcacaaagaactcctatatatcttttatccagatttactgagtgtttacattttatcccatttgccttatctatatttcatgttgcattttcttaatcatttgagaataatttgcacagataccccattatgcccaaaacagtatgcatttccctaagaacaggacattctcttctaagagaagaagagaattactttaagcattattcagtatttttttaagtattattatcaaaatcaggaagtttaacagtgatttaatactgttatctaacccatgattcatatttaaattttgccatttatcccaataatgtcctttgtagccattcttttaccttgtgcaggatcatgttacatttgtaaacgtgtgtctctcaatactgcagattcctcaactttcttttgtctttcattaccatgacatttttgaagaatacaggctattttgtcg

SEQ ID NO: 184907 - DNA, 8119 bp, Homo sapiens
  Payload ID: 16409
  Gene Symbol: SNX1
  Gene Name: sorting nexin 1
  ENST ID: ENST00000380285
  CDS Start-End: 24-332
gcttccgccgcgggtggaagaagatggcgtcgggtggtggtggctgtagcgcttcggagagactgcctccgcccttccccggcctggagccggagtccgagggggcggccgggggatcagaacccgaggctggggacagcgacaccgagggggaggacattttcaccggcgccgcggtggtcagtaaacatcagtctccaaagataactacatcccttcttcccatcaacaatggctccaaagaaaatgggatccatgaagaacaagaccaagagccacaggatctctttgcaggaagccacaaattcttcgaagccccagccaacctatgaggagctagaggaagaagaacaggaggatcaatttgatttgacagtcggtataactgatcctgagaagataggggatggtatgaatgcatatgtagcctacaaagttacaacacagacaagcttaccattgttcagaagcaaacagtttgcagtaaaaagaagatttagtgactttctgggtctttatgagaagctttccgagaagcactctcagaatggcttcattgtccctccgcccccggagaagagcctcatagggatgacaaaagtgaaagttgggaaggaagattcttcttctgcagaatttcttgaaaaacggagggccgctttagaaaggtaccttcagaggattgtaaatcatcctaccatgttacaggaccctgacgtcagagagttcttggaaaaagaagagctgccacgtgccgtgggtacccagacattgagtggtgctggtctcctcaagatgttcaacaaagccacagatgccgtcagcaaaatgaccatcaagatgaatgaatcagacatttggtttgaggagaagctccaggaggtagagtgtgaggagcagcgcttacggaaactgcatgctgttgtagaaactctagtcaaccataggaaagagctagcgctgaacacagcccagtttgcaaagagtctagccatgcttgggagctctgaggacaacacggcattgtcacgggcactctcccagctggctgaggtggaagaaaaaattgagcagctccaccaggaacaggccaacaatgacttcttcctccttgctgagctcctgagtgactacattcgcctcctggccatagtccgcgctgccttcgaccagcgcatgaagacatggcagcgctggcaggatgcccaagccacactgcagaagaagcgggaggccgaggctcggctgctgtgggccaacaagcctgataagctgcagcaggccaaggacgagatcctcgagtgggagtctcgggtgactcaatatgaaagggacttcgagaggatttcaacagtggtccgaaaagaagtgatacggtttgagaaagagaaatccaaggacttcaagaaccacgtgatcaagtaccttgagacactcctttactcacagcagcagctggcaaagtactgggaagccttccttcctgaggcaaaggccatctcctaatggaccaaggaccccagagcccacctgtgtgacgctgcctttttatacactgtcctcctccaccttgatggacccctagtgatgcatcctgcctaggctggacttaaccccttcctccctgtccccacgaccaactgtccccagttactctaaccgttatttcatttagcttccatatatattttcttacctaagagaatagtttcctgctttaagcaaaagacctacaataggtggtggaattatgggatggggtggagtattgatataaatatataaatacaaatgtatatttttcaggatgtggtttaggaactgggaataacgttttctgttactcctgatggtgccatgaaaaggttatgtaataaaatattttaaaatcaggtcacatgactcagaatgttggtggtttttgcttaggctggggagcagttgggaatcaggtctggaatactcctaaccaagaagttgcccaggtatagtaagtttttctctaccgttcacaagttttgtgctgctgcttccctctggaaatggggtttctttctctccgcctacctcagctacctgttctgagggtctcaatctgtttcgtattcccacttctttagggaaggagttttaaaaacatctcttaaaataagaggagcaaaatctattaaaacctattctcctgcaaaggaggcagagactttctctctctcttttttttttttttttggtgtccctatcattaagcaagagcctttctcttttattcttcctgcttccctaagctgctcagggttctctgagtcttgccctctgatggcaagtcttatatataactaaacctatttttgtcacccatcaaaacacatcctcagtagactgtgtgaaggtgtgaaggtctgataatgacttgatgctttgtctccatagacatgaaagccatgccctctgcctctagatagggtgatccaagagctcctgaaccttaggaggttcaaagaagctctactgtctgtgcccaggaggtagcctgccagcaagagccctcaggagttgcacacacagccaaagggtgttcacacagatctctgccggtctagccaggggaggccagagtctcgtcagtcaaggatgggcttcccccttagctgtgtccacagctgctcaagctatactggtcagagtgggctttgaagctcctttgtgagctcgagctgctgactgccactatgggagccttgccacctccagcccctccatcccaaagacgctcctgccactggggccccaggtcctgctgtatcagttctctttggtggggggctaaggtttggggcgaggcaacctgagacaagaaaacgcagtaaacattctgattccctgtacacagatgcagcaccaggggaagggccagtggtgcaagtatttctttttaacaggtgaagtttttggaaaaagtcactctccctacccctcagtatccttaccatcaactttggttttatccttccagtctttattatatgcttgcttttacatagttgtaataatatacacataaagtattttgtatcctgcttttatcattcaacattgtacatgttataagcattttactatattgttatatatcttcacaaagttgatctgtaaagctgtgtaatttgaaggcatccatagggtgactgtaccataattttgattcatcccttgttgttggattcttggtcaggggttgtttgttttgttttattggtaactttaaaattttgaatacaatttcagatttacagaaaagttgcaggaatatcacaaagaactcctatatatcttttatccagatttactgagtgtttacattttatcccatttgccttatctatatttcatgttgcattttcttaatcatttgagaataatttgcacagataccccattatgcccaaaacagtatgcatttccctaagaacaggacattctcttctaagagaagaagagaattactttaagcattattcagtatttttttaagtattattatcaaaatcaggaagtttaacagtgatttaatactgttatctaacccatgattcatatttaaattttgccatttatcccaataatgtcctttgtagccattcttttaccttgtgcaggatcatgttacatttgtaaacgtgtgtctctcaatactgcagattcctcaactttcttttgtctttcattaccatgacatttttgaagaatacaggctattttgtcgaatgttcctcagtttggatttgtgtgatggttccgcatgactaggtgagggttttgcattctgggtgggaatatcacagaagcagtgtgtcgtcagtgcgtcgtaatcagcatataatgtcagttggtcccattaatgttgttaactctgttcaccgcttaggttggtgtctgccagatttcattttaaatttacgatttcctctttgtaatttacaagtaatttgtggggagatactttgagactatataagtattttgttcctcattcaccagttatatagtatcagttgattagtcttgtcccagttattactgtcatgattgaccaacatgatttcctaactccataatgccttctacatttattggttgacattctacatacaaagaaaaacatcctttctcaccatttatttattcacttgtttatcaatatggatgcagggattcctgttttactcagagttgcaagccattgctttgattttatcttgattctcaaattgtcccagatttatagcggcctcttgtgtgtttgtagcttgctcccatcatgttttgagtactttcttaccttctggcataacaagatgttccaggctcatcttgaatgttccctaccctagccctggaatcagccatttctccagggagtcttggttccttataatggagaatggtatttatttatttttatttgatttgattattattactatttttgagacagagtctcgctcttgtcgcccaggctggattgcaatggcacaatctcagctcactgcaacctccacctaccaggttcaagcaattctcctgcctcagccttccaagtagctgggattacaggtgcctgcccccacacccagctaatttttgcatttttggtagaaatgggggttttaccatgttggggaggctggtctcgaactcctgacctcaggtgatctgcccacctcaacctcccaaagtgctgggattacaggtgtgagccaccatacccagccagagaatgttatttagaaaccaagatctgggtgccaaatgtgctgcttgttactggaatgtcattgcctctaggctctcaccatacagtgcaaagagatgatagatagatagatagatagatagatagatagatagatagatgatagatatagatagatagatagattgattgatttgtagaaacaagataggttagagatacctgacataaatagatactaaaaatcatgaattcacactgatgctttgagaccagccctgtaggtttattccagtctgcccccttttccatgttgttaactctttcctccagagagacaaagatttcaggttgctttgttaagttccatctaatgatcattctgacgtaagtctgtttttcttatttccttggaatgatgtctcctctggtttcagaacttcctcctctgcttcctgtatcctgaggctggcggggccagttgtctttagggcttgtgcatttttgtaaagagcttgcacgtgtggaaatcaagtaggccagtagtgggttaggggtactgagccagaagcctctacaaggaataacaggagcacaaaggaagaaggtggtattccagctggggacccaggagggaggactttgtggagaacctgatgcttgaactgagtctaaaaggtgtaaaagtgtttgttgcttctgcctccctgtctgtctggcagggtgaggtaggcgcatctagggaaatgtcaagtggcttggtgtagggtaaagtcagtgaggcccatggagaaaaacgagcaggagccacatcacatgggtgtctgataggacctgggaggcgctttccacattaccattgtcgcttcgtgatctggacacaccagaaggcgtgagactggaggcaggaagagcagccaggcttatccctaccctcaggagagctgaaaagggcaggtatggtggggccagagctcaggagagtttcggaaccactgagatcggtccttgatttgatgagaggcttgaggggagagggaggtagctaggatgccccgcaagcttctggcccagacactgggcagacaatgaaaccctttgtaacacatgaggcaataggtttggggcagatgggaggggaagcagtggtgggggcagtgagtgctgaaggtgttttaagaagcggctctgggccaggcacagtggcttatgcctgtattcctagcattttgggaggccgaggtgggagaatcacttgagcccaagaatttgagaccagcctggggaatatagtgagaccctgtccctacaaaaataaaaacaactagctgggtgtgtggtggtgcatgcctgtaggcccagctacgcgggaacatcacctgagcccaggaggttgaggttgcagtgagctacagttgcgccactgcactccagcctaggtgacagagcaagatcttgtctcaaaaaaaaaagcagctctggatgggaagggaggccagttgctttaagtaggggagatagagttaaaggaggctttgttttatttaaaggtgggacaaacttaagcatgttaataaaattcagagaagagaaagagaatgactatcagagccatgtttggaagaaaatggggtccagagcacaggaaggggacctgtgttcagagggtgcctcactgctgaggccacaggaaagaatctgtaggtggaggggaggccgaagaggggaagtttcatgcttgataattaaaattttctgagataggaatgtcatatttacctatttaagccaagtttttttagataaaaggtatggaacctgctttccccttggctagttcagcgtttgggctccggagtgctgaagatgaggactggacttcgagctggtgtgatcccagtattcagtgtcagtactcagtgacaaaataaatgagagaaacgggaataagaattgtcgcctacacaaaaataccagcaactgttaactcttcccagaagattttcattctgaatgctcctgtagctaggaaccctaaaaagtctttgaagcaactcaagttttaaaaaaggggaggaactcctggaaatctcaggatggggccaagatgtggctggagagtgtgtggtgatggagggcgtgtcttttgccgagcacactcagggcccacgggaagcccatagacttcaaggacatcaagccccaaggtggtgggattttccccaccagtacttggcagcctagggggaaggggagggcgggagaagataatggggatccctggctccaaacataggaggacacatctgtgctacagtgcgcacatgcctggatgtacactctgtctttggagacactggctaagattctctgctccatgtttggacagggtcgtgcctgatctgagataaatggacaagaacaactgaagcctgtcttctggtgcatgtgtcacctgccgataactgcatcttgtgataaagttgggtgatttacagtctccaccaaatgctaaactctggggtcttacgcctttataactccatgggccccagcaaaggttcaggctcaaaacaggtgtcaaatagataactgttgaatgattgttccccagttgcaggctctgccacctggcgttcatactgtctgtgaaaggacccagctcacctttccctctttatctcccagtccttcccaacagcgccgacacctcatggaaactgattgcaaatgtgctacttctcacttctgtgtggcccgaggaggctgggttaatgctgggcttggtaccttaagcaccctttctcccttccccatcttcattctcagaattacacctgtctgaagcaggcattttccaatgccctagatgggaatataagtgtaaggagatgtgaagcatttgcctgtgtgtcagaacattcactgaggatcctcataggcacttctagaaaccaaatccttgaagatgactaaccagaaatgcccgtcatagcactgtttacagttgcaaaaactgaagccaattgaaatgtccatcaggaggggattaaatgaattatggtacagttacaccgttgaatattttacagccattgaagatgatatatagctatattcattgacaaggaaaactcatattttttagtgaaaaaagcaggttatagaattgcatgatattcacatttatataaaactttatatatgggaaggatgttgattgaattgttaataactatggtcacctctagagatggaagtttgcattacctttaatttttaataccattttgtattgcttaaaatttgtatgtattatcgttaaaataagaaaaatcaaataaagctattttcattatgggaaaa

SEQ ID NO: 184908 - DNA, 1869 bp, Homo sapiens
  Payload ID: 16409
  Gene Symbol: SNX1
  Gene Name: sorting nexin 1
  ENST ID: ENST00000560829
  CDS Start-End: 567-1481
gactgactcactcagtatccgtgataagttaaagatgaatcctgaaggggtaggggaaaggagatcttgagttctccagcacggagactctttacaattatttctccgcgggatccgctgacagccaacgtctttcttacttcctgatcggacaggaagtaggtttcagttgctgtgaaaagggatgtcatgggaagccagtgaggtagtcagagtaaacatcagtctccaaagataactacatcccttcttcccatcaacaatggctccaaagaaaatgggatccatgaagaacaagaccaagagccacaggatctctttgcagatgccacagtggagctatccttggacagcacacaaaataatcagaagaaggtgctagccaaaacactcatttctcttcctcctcaggaagccacaaattcttcgaagccccagccaacctatgaggagctagaggaagaagaacaggaggatcaatttgatttgacagtcggtataactgatcctgagaagataggggatggtatgaatgcatatgtagcctacaaagttacaacacagggatgacaaaagtgaaagttgggaaggaagattcttcttctgcagaatttcttgaaaaacggagggccgctttagaaaggtaccttcagaggattgtaaatcatcctaccatgttacaggaccctgacgtcagagagttcttggaaaaagaagagctgccacgtgccgtgggtacccagacattgagtggtgctggtctcctcaagatgttcaacaaagccacagatgccgtcagcaaaatgaccatcaagatgaatgaatcagacatttggtttgaggagaagctccaggaggtagagtgtgaggagcagcgcttacggaaactgcatgctgttgtagaaactctagtcaaccataggaaagagctagcgctgaacacagcccagtttgcaaagagtctagccatgcttgggagctctgaggacaacacggcattgtcacgggcactctcccagctggctgaggtggaagaaaaaattgagcagctccaccaggaacaggccaacaatgacttcttcctccttgctgagctcctgagtgactacattcgcctcctggccatagtccgcgctgccttcgaccagcgcatgaagacatggcagcgctggcaggatgcccaagccacactgcagaagaagcgggaggccgaggctcggctgctgtgggccaacaagcctgataagctgcagcaggccaaggacgagatcctcgagtgggagtctcgggtgactcaatatgaaagggacttcgagaggatttcaacagtggtccgaaaagaagtgatacggtttgagaaagagaaatccaaggacttcaagaaccacgtgatcaagtaccttgagacactcctttactcacagcagcagctggcaaagtactgggaagccttccttcctgaggcaaaggccatctcctaatggaccaaggaccccagagcccacctgtgtgacgctgcctttttatacactgtcctcctccaccttgatggacccctagtgatgcatcctgcctaggctggacttaaccccttcctccctgtccccacgaccaactgtccccagttactctaaccgttatttcatttagcttccatatatattttcttacctaagagaatagtttcctgctttaagcaaaagacctacaataggtggtggaattatgggatggggtggagtattgatataaatatataaatacaaatgtatatttttcaggatgtggtttaggaactgggaataacgttttctgttactcctgatggtgccatgaaaaggttatgtaataaaatattttaaaatcagg

SEQ ID NO: 184909 - DNA, 550 bp, Homo sapiens
  Payload ID: 16409
  Gene Symbol: SNX1
  Gene Name: sorting nexin 1
  ENST ID: ENST00000559061
  CDS Start-End: 494-550
aggaagtaggtttcagttgctgtgaaaagggatgtcatgggaagccagtgaggtagtcagagtaaacatcagtctccaaagataactacatcccttcttcccatcaacaatggctccaaagaaaatgggatccatgaagaacaagaccaagagccacaggatctctttgcagggtctcactctgttgcccaggctggagtgcagtggtgtggtcatggctcactgcagccccgacctcccaggctcaagtgatcttcccacctcaaccttctgagtagctaggaccacagatgccacagtggagctatccttggacagcacacaaaataatcagaagaaggtgctagccaaaacactcatttctcttcctcctcaggaagccacaaattcttcgaagccccagccaacctatgaggagctagaggaagaagaacaggaggatcaatttgatttgacagtcggtataactgatcctgagaagataggggatggtatgaatgcatatgtagcctacaaagttacaacacagacaagcttaccattgttcaga

SEQ ID NO: 184910 - DNA, 774 bp, Homo sapiens
  Payload ID: 16409
  Gene Symbol: SNX1
  Gene Name: sorting nexin 1
  ENST ID: ENST00000558040
  CDS Start-End: 1-387
ggtggtggctgtagcgcttcggagagactgcctccgcccttccccggcctggagccggagtccgagggggcggccgggggatcagaacccgaggctggggacagcgacaccgagggggaggacattttcaccggcgccgcggtggtcagtaaacatcagtctccaaagataactacatcccttcttcccatcaacaatggctccaaagaaaatgggatccatgaagaacaagaccaagagccacaggatctctttgcagatgccacagtggagctatccttggacagcacacaaaataatcagaagaagtgctgggattacaggcgtgagccaccacacccggccctaagttgttttcttaaagacctgaaggcatccacacagtaggcctgttaaggacaagtcccatttggatacccacctgacctggtaagcattggagcttctctgacccctgcaagacattctttccccagatgggcaggggttgcccagtggagtagtagcagaggctggaagacagaagcatctttggtgagtagctggggaccttaatggcagacatgaaaaactccacttgctgagaagccaccgccagcaccctggggacagctagcatatgaggcagggccacctcccttccagacctcgaggcctggagctcctgcccatcctggcttctgcctgttgccccagttcttggtccctcagctctcttcacagtgaacccctgttacttgagggacccaagtgtgtctttgtttcttgaacccc

SEQ ID NO: 184911 - DNA, 1326 bp, Homo sapiens
  Payload ID: 16409
  Gene Symbol: SNX1
  Gene Name: sorting nexin 1
  ENST ID: ENST00000560260
  CDS Start-End: 11-334
gtggaagaagatggcgtcgggtggtggtggctgtagcgcttcggagagactgcctccgcccttccccggcctggagccggagtccgagggggcggccgggggatcagaacccgaggctggggacagcgacaccgagggggaggacattttcaccggcgccgcggtggtcagtaaacatcagtctccaaagataactacatcccttcttcccatcaacaatggctccaaagaaaatgggatccatgaagaacaagaccaagagccacaggatctctttgcagacaagcttaccattgttcagaagcaaacagtttgcagtaaaaagaagatttagtgactttctgggtctttatgagaagctttccgagaagcactctcagaatggcttcattgtccctccgcccccggagaagagcctcatagggatgacaaaagtgaaagttgggaaggaagattcttcttctgcagaatttcttgaaaaacggagggccgctttagaaaggtaccttcagaggattgtaaatcatcctaccatgttacaggaccctgacgtcagagagttcttggaaaaagaagaggggcagcagataacttgccatccctgccttcttggtcttgtagctgccacgtgccgtgggtacccagacattgagtggtgctggtctcctcaagatgttcaacaaagccacagatgccgtcagcaaaatgaccatcaagatgaatgaatcagacatttggtttgaggagaagctccaggaggtagagtgtgaggagcagcgcttacggaaactgcatgctgttgtagaaactctagtcaaccataggaaagagctagcgctgaacacagcccagtttgcaaagagtctagccatgcttgggagctctgaggacaacacggcattgtcacgggcactctcccagctggctgaggtggaagaaaaaattgagcagctccaccaggaacaggccaacaatgacttcttcctccttgctgagctcctgagtgactacattcgcctcctggccatagtccgcgctgccttcgaccagcgcatgaagacatggcagcgctggcaggatgcccaagccacactgcagaagaagcgggaggccgaggctcggctgctgtgggccaacaagcctgataagctgcagcaggccaaggacgagatcctcgaggtgagtccactgaggcagcccagccaggggtgttctgctggttccaaatgaacccagggcccatcccacccagaggtttggaaccccacagggggaagagcgctgattgagtctaaagggccgtggctgctgaggaagcctctgaga

SEQ ID NO: 184912 - DNA, 753 bp, Homo sapiens
  Payload ID: 16409
  Gene Symbol: SNX1
  Gene Name: sorting nexin 1
  ENST ID: ENST00000559389
  CDS Start-End: 1-334
tggctgtagcgcttcggagagactgcctccgcccttccccggcctggagccggagtccgagggggcggccgggggatcagaacccgaggctggggacagcgacaccgagggggaggacattttcaccggcgccgcggtggtcagtaaacatcagtctccaaagataactacatcccttcttcccatcaacaatggctccaaagaaaatgggatccatgaagaacaagaccaagagccacaggatctctttgcagggtctcactctgttgcccaggctggagtgcagtggtgtggtcatggctcactgcagccccgacctcccaggctcaagtgatcttcccacctcaaccttctgagtagctaggaccacagatgccacagtggagctatccttggacagcacacaaaataatcagaagaaggtgctagccaaaacactcatttctcttcctcctcaggaagccacaaattcttcgaagccccagccaacctatgaggagctagaggaagaagaacaggaggatcaatttgatttgacagtcggtataactgatcctgagaagataggggatggtatgaatgcatatgtagcctacaaagttacaacacagacaagcttaccattgttcagaagcaaacagtttgcagtaaaaagaagatttagtgactttctgggtctttatgagaagctttccgagaagcactctcagaatggcttcattgtccctccgcccccggagaagagcctcatag

SEQ ID NO: 184913 - DNA, 850 bp, Homo sapiens
  Payload ID: 16409
  Gene Symbol: SNX1
  Gene Name: sorting nexin 1
  ENST ID: ENST00000560861
  CDS Start-End: 1-213
tgggagtctcgggtgactcaatatgaaagggacttcgagaggatttcaacagtggtccgaaaagaagtgatacggtttgagaaagagaaatccaaggacttcaagaaccacgtgatcaagtaccttgagacactcctttactcacagcagcaggctggggagcagttgggaatcaggtctggaatactcctaaccaagaagttgcccagataaaaggtatggaacctgctttccccttggctagttcagcgtttgggctccggagtgctgaagatgaggactggacttcgagctggtgtgatcccagtattcagtgtcagtactcagtgacaaaataaatgagagaaacgggaataagaattgtcgcctacacaaaaataccagcaactgttaactcttcccagaagattttcattctgaatgctcctgtagctaggaaccctaaaaagtctttgaagcaactcaagttttaaaaaaggggaggaactcctggaaatctcaggatggggccaagatgtggctggagagtgtgtggtgatggagggcgtgtcttttgccgagcacactcagggcccacgggaagcccatagacttcaaggacatcaagccccaaggtggtgggattttccccaccagtacttggcagcctagggggaaggggagggcgggagaagataatggggatccctggctccaaacataggaggacacatctgtgctacagtgcgcacatgcctggatgtacactctgtctttggagacactggctaagattctctgctccatgtttggacagggtcgtgcctgatctgagataaatggacaagaacaactgaagcctgtcttctgg

SEQ ID NO: 184914 - DNA, 1374 bp, Homo sapiens
  Payload ID: 16409
  Gene Symbol: SNX1
  Gene Name: sorting nexin 1
  Uniprot ID: Q13596
  ENST ID: ENST00000561026
  CDS Start-End: 1-1374
atggcgtcgggtggtggtggctgtagcgcttcggagagactgcctccgcccttccccggcctggagccggagtccgagggggcggccgggggatcagaacccgaggctggggacagcgacaccgagggggaggacattttcaccggcgccgcggtggtcagtaaacatcagtctccaaagataactacatcccttcttcccatcaacaatggctccaaagaaaatgggatccatgaagaacaagaccaagagccacaggatctctttgcaggggatggtatgaatgcatatgtagcctacaaagttacaacacagacaagcttaccattgttcagaagcaaacagtttgcagtaaaaagaagatttagtgactttctgggtctttatgagaagctttccgagaagcactctcagaatggcttcattgtccctccgcccccggagaagagcctcatagggatgacaaaagtgaaagttgggaaggaagattcttcttctgcagaatttcttgaaaaacggagggccgctttagaaaggtaccttcagaggattgtaaatcatcctaccatgttacaggaccctgacgtcagagagttcttggaaaaagaagagctgccacgtgccgtgggtacccagacattgagtggtgctggtctcctcaagatgttcaacaaagccacagatgccgtcagcaaaatgaccatcaagatgaatgaatcagacatttggtttgaggagaagctccaggaggtagagtgtgaggagcagcgcttacggaaactgcatgctgttgtagaaactctagtcaaccataggaaagagctagcgctgaacacagcccagtttgcaaagagtctagccatgcttgggagctctgaggacaacacggcattgtcacgggcactctcccagctggctgaggtggaagaaaaaattgagcagctccaccaggaacaggccaacaatgacttcttcctccttgctgagctcctgagtgactacattcgcctcctggccatagtccgcgctgccttcgaccagcgcatgaagacatggcagcgctggcaggatgcccaagccacactgcagaagaagcgggaggccgaggctcggctgctgtgggccaacaagcctgataagctgcagcaggccaaggacgagatcctcgagtgggagtctcgggtgactcaatatgaaagggacttcgagaggatttcaacagtggtccgaaaagaagtgatacggtttgagaaagagaaatccaaggacttcaagaaccacgtgatcaagtaccttgagacactcctttactcacagcagcagctggcaaagtactgggaagccttccttcctgaggcaaaggccatctcctaa

SEQ ID NO: 184915 - DNA, 1971 bp, Homo sapiens
  Payload ID: 16409
  Gene Symbol: SNX1
  Gene Name: sorting nexin 1
  Uniprot ID: Q13596
  ENST ID: ENST00000559844
  CDS Start-End: 15-1583
gcgggtggaagaagatggcgtcgggtggtggtggctgtagcgcttcggagagactgcctccgcccttccccggcctggagccggagtccgagggggcggccgggggatcagaacccgaggctggggacagcgacaccgagggggaggacattttcaccggcgccgcggtggtcagtaaacatcagtctccaaagataactacatcccttcttcccatcaacaatggctccaaagaaaatgggatccatgaagaacaagaccaagagccacaggatctctttgcagatgccacagtggagctatccttggacagcacacaaaataatcagaagaaggtgctagccaaaacactcatttctcttcctcctcaggaagccacaaattcttcgaagccccagccaacctatgaggagctagaggaagaagaacaggaggatcaatttgatttgacagtcggtataactgatcctgagaagataggggatggtatgaatgcatatgtagcctacaaagttacaacacagacaagcttaccattgttcagaagcaaacagtttgcagtaaaaagaagatttagtgactttctgggtctttatgagaagctttccgagaagcactctcagaatggcttcattgtccctccgcccccggagaagagcctcatagggatgacaaaagtgaaagttgggaaggaagattcttcttctgcagaatttcttgaaaaacggagggccgctttagaaaggtaccttcagaggattgtaaatcatcctaccatgttacaggaccctgacgtcagagagttcttggaaaaagaagagctgccacgtgccgtgggtacccagacattgagtggtgctggtctcctcaagatgttcaacaaagccacagatgccgtcagcaaaatgaccatcaagatgaatgaatcagacatttggtttgaggagaagctccaggaggtagagtgtgaggagcagcgcttacggaaactgcatgctgttgtagaaactctagtcaaccataggaaagagctagcgctgaacacagcccagtttgcaaagagtctagccatgcttgggagctctgaggacaacacggcattgtcacgggcactctcccagctggctgaggtggaagaaaaaattgagcagctccaccaggaacaggccaacaatgacttcttcctccttgctgagctcctgagtgactacattcgcctcctggccatagtccgcgctgccttcgaccagcgcatgaagacatggcagcgctggcaggatgcccaagccacactgcagaagaagcgggaggccgaggctcggctgctgtgggccaacaagcctgataagctgcagcaggccaaggacgagatcctcgagtgggagtctcgggtgactcaatatgaaagggacttcgagaggatttcaacagtggtccgaaaagaagtgatacggtttgagaaagagaaatccaaggacttcaagaaccacgtgatcaagtaccttgagacactcctttactcacagcagcagctggcaaagtactgggaagccttccttcctgaggcaaaggccatctcctaatggaccaaggaccccagagcccacctgtgtgacgctgcctttttatacactgtcctcctccaccttgatggacccctagtgatgcatcctgcctaggctggacttaaccccttcctccctgtccccacgaccaactgtccccagttactctaaccgttatttcatttagcttccatatatattttcttacctaagagaatagtttcctgctttaagcaaaagacctacaataggtggtggaattatgggatggggtggagtattgatataaatatataaatacaaatgtatatttttcaggatgtggtttaggaactgggaataacgttttctgttactcctgatggtgccatgaaaaggttatgtaataaaatattttaaaatcagg

SEQ ID NO: 184916 - DNA, 324 bp, Homo sapiens
  Payload ID: 16409
  Gene Symbol: SNX1
  Gene Name: sorting nexin 1
  ENST ID: ENST00000625244
  CDS Start-End: 1-324
atggcgtcgggtggtggtggctgtagcgcttcggagagactgcctccgcccttccccggcctggagccggagtccgagggggcggccgggggatcagaacccgaggctggggacagcgacaccgagggggaggacattttcaccggcgccgcggtggtcagtaaacatcagtctccaaagataactacatcccttcttcccatcaacaatggctccaaagaaaatgggatccatgaagaacaagaccaagagccacaggatctctttgcagacaagcttaccattgttcagaagcaaacagtttgcagtaaaaagaagatttag

SEQ ID NO: 184917 - DNA, 2546 bp, Homo sapiens
  Payload ID: 16410
  Gene Symbol: SNX10
  Gene Name: sorting nexin 10
  Uniprot ID: Q9Y5X0
  ENST ID: ENST00000338523
  CDS Start-End: 188-793
gcgcggggagcgcggggagcgcggggagcgcggggctgcgctcgtgtgcgctcctgggcgctcgccgccgccgctgccgccgcgcgcctttgagtcagcaaactccgcggcccgcaagcccggctcggcccggccctgctctgttctgcccggaggagccgcccattgatcgtgtcctgtgctgaagatgtttccggaacaacagaaagaggaatttgtaagtgtctgggttcgagatcctaggattcagaaggaggacttctggcattcttacattgactatgagatatgtattcatactaatagcatgtgttttacaatgaaaacatcctgtgtacgaagaagatatagagaattcgtgtggctgaggcagagactccaaagtaatgcgttgctggtacaactgccagaacttccatctaaaaacctgtttttcaacatgaacaatcgccagcacgtggatcagcgtcgccagggtctggaagatttcctcagaaaagtcctacagaatgcacttttgctttcagatagcagccttcacctcttcttacagagccatctgaattcagaagacattgaggcgtgtgtttctgggcagactaagtactctgtggaagaagcaattcacaagtttgccttaatgaatagacgtttccctgaagaagatgaagaaggaaaaaaagaaaatgatatagattatgattcagaaagttcatcctctgggcttggacacagtagtgatgacagcagttcacatggatgtaaagtaaatacagctccgcaggaatcctgaaaaataattctaatgttactatcttaggaatagcaaattatgtccagtcatagagaagaaagcttcataataatacattcttacctaaagctcactgtcatgatgttaggtatttaaattcttaaagatgttgggttgtttattagtggtatttttatgttgtcttattttaggtaagcttctgtgtaaagctaaaaatcctgtgaatacaatactatcctttacaggcagacattattggtaaacaagatcttgccctccaatgaaatgacttacatgttttaaaaaaccgagttggttttattgaatttaaaaagataggtaactaagtagcatttaaaatcaagatagagcattccttcttgtatcagtggggcagtgttaccataaacacggtgtatatgttgttaaaccctatgaagagtaacagtgtagaccagactgcctctctcagatatgtgcctgatattttgtggatacctcccctgcactggcaaaacactatgcttttgggtgttagactgaaatattttaagagtatttaacctttccagtattctgtttcacgcttagatggaaatgtatcttatgaatagagacatattaaaataatgtttacatcttagaaaaaacatagatagtgctagtaatattacttataactgtaatatatagattcagaaatacattttcattatccaaaatcagcttcaacaaatggtttctggagacaaataatttgttttcattatcattgtataatcaggttaatgatttattttttgactaaatgtgcaatttcttatcactagataactttcagtatcagtggtggttacttattacttaaatcagaggaaggattttataaagattaataaatttaattttaccaataaatattcccataatttagaaaaggatgtcgacttgctaatttcagaaataattattcatttttaaaaagccccttttaaagcatctacttgaagattggtataattttcataaaatgtctttttttttagtgtcccaaagatatcttagataaactattttgaagttcagatttcagatgaggcaacattttcttgagataattacccaagtttcatccatgttgaatggtacaaaatatttctgtgaaactaacaggaagatattttcagataactaggataacttgttgctttgttacccagcctaattgaagagtggcagaggctactacaaaaagcaaccttttcattttcactaagagtttaaaagctattgtattattaaaaagtctttacaatgcttgtttcaaagaaccaacagaaaaaaaagctaagaaaactgagaactaacattaaaaaaattaaatttagaataagaatgatttctttaatttgtcctttttttctttggtctaaaacattattaaatttttgtaaatattttgatttaatgtgtcttagatcctcattattttaatacaggaaaagaaaagatttagtaatttcttaccatgctaatatgtaaagttcatgccatccaggcatttaagagcgatcctcatcccttcagcaatatgtatttgagttcacactatttctgttttacagcagttttgaaaaacacatactatgccaccaattgtcatattatttttagatgatgtaacatagccatcaaaattaatattatgtaatgcctaatacttagtatgtaaatgtcacgagatcatttttacattaaacgtgaaaaaaaa

SEQ ID NO: 184918 - DNA, 2491 bp, Homo sapiens
  Payload ID: 16410
  Gene Symbol: SNX10
  Gene Name: sorting nexin 10
  Uniprot ID: Q9Y5X0
  ENST ID: ENST00000396376
  CDS Start-End: 129-734
atagttgaccagcttctgcaggggctcctcagtgagagaatggaggtgaggtcagggactcctgccttgcctctgccatcacttccagtgatgcctattcctaagattgatcgtgtcctgtgctgaagatgtttccggaacaacagaaagaggaatttgtaagtgtctgggttcgagatcctaggattcagaaggaggacttctggcattcttacattgactatgagatatgtattcatactaatagcatgtgttttacaatgaaaacatcctgtgtacgaagaagatatagagaattcgtgtggctgaggcagagactccaaagtaatgcgttgctggtacaactgccagaacttccatctaaaaacctgtttttcaacatgaacaatcgccagcacgtggatcagcgtcgccagggtctggaagatttcctcagaaaagtcctacagaatgcacttttgctttcagatagcagccttcacctcttcttacagagccatctgaattcagaagacattgaggcgtgtgtttctgggcagactaagtactctgtggaagaagcaattcacaagtttgccttaatgaatagacgtttccctgaagaagatgaagaaggaaaaaaagaaaatgatatagattatgattcagaaagttcatcctctgggcttggacacagtagtgatgacagcagttcacatggatgtaaagtaaatacagctccgcaggaatcctgaaaaataattctaatgttactatcttaggaatagcaaattatgtccagtcatagagaagaaagcttcataataatacattcttacctaaagctcactgtcatgatgttaggtatttaaattcttaaagatgttgggttgtttattagtggtatttttatgttgtcttattttaggtaagcttctgtgtaaagctaaaaatcctgtgaatacaatactatcctttacaggcagacattattggtaaacaagatcttgccctccaatgaaatgacttacatgttttaaaaaaccgagttggttttattgaatttaaaaagataggtaactaagtagcatttaaaatcaagatagagcattccttcttgtatcagtggggcagtgttaccataaacacggtgtatatgttgttaaaccctatgaagagtaacagtgtagaccagactgcctctctcagatatgtgcctgatattttgtggatacctcccctgcactggcaaaacactatgcttttgggtgttagactgaaatattttaagagtatttaacctttccagtattctgtttcacgcttagatggaaatgtatcttatgaatagagacatattaaaataatgtttacatcttagaaaaaacatagatagtgctagtaatattacttataactgtaatatatagattcagaaatacattttcattatccaaaatcagcttcaacaaatggtttctggagacaaataatttgttttcattatcattgtataatcaggttaatgatttattttttgactaaatgtgcaatttcttatcactagataactttcagtatcagtggtggttacttattacttaaatcagaggaaggattttataaagattaataaatttaattttaccaataaatattcccataatttagaaaaggatgtcgacttgctaatttcagaaataattattcatttttaaaaagccccttttaaagcatctacttgaagattggtataattttcataaaatgtctttttttttagtgtcccaaagatatcttagataaactattttgaagttcagatttcagatgaggcaacattttcttgagataattacccaagtttcatccatgttgaatggtacaaaatatttctgtgaaactaacaggaagatattttcagataactaggataacttgttgctttgttacccagcctaattgaagagtggcagaggctactacaaaaagcaaccttttcattttcactaagagtttaaaagctattgtattattaaaaagtctttacaatgcttgtttcaaagaaccaacagaaaaaaaagctaagaaaactgagaactaacattaaaaaaattaaatttagaataagaatgatttctttaatttgtcctttttttctttggtctaaaacattattaaatttttgtaaatattttgatttaatgtgtcttagatcctcattattttaatacaggaaaagaaaagatttagtaatttcttaccatgctaatatgtaaagttcatgccatccaggcatttaagagcgatcctcatcccttcagcaatatgtatttgagttcacactatttctgttttacagcagttttgaaaaacacatactatgccaccaattgtcatattatttttagatgatgtaacatagccatcaaaattaatattatgtaatgcctaatacttagtatgtaaatgtcacgagatcatttttacattaaacgtgaaaaaaaatcaa

SEQ ID NO: 184919 - DNA, 944 bp, Homo sapiens
  Payload ID: 16410
  Gene Symbol: SNX10
  Gene Name: sorting nexin 10
  Uniprot ID: Q9Y5X0
  ENST ID: ENST00000409838
  CDS Start-End: 219-572
actgcttatttccatcatcctggctgtcttcagggctgttatgttcctgggttatgtgcaagatttcagagtactggcataaatataaatatatgtttggtggtttaaatcctatttagagtgaatgttgagatcatattgtgaattatagatacaagaaatgcatttttttcctcagacaactgccagaacttccatctaaaaacctgtttttcaacatgaacaatcgccagcacgtggatcagcgtcgccagggtctggaagatttcctcagaaaagtcctacagaatgcacttttgctttcagatagcagccttcacctcttcttacagagccatctgaattcagaagacattgaggcgtgtgtttctgggcagactaagtactctgtggaagaagcaattcacaagtttgccttaatgaatagacgtttccctgaagaagatgaagaaggaaaaaaagaaaatgatatagattatgattcagaaagttcatcctctgggcttggacacagtagtgatgacagcagttcacatggatgtaaagtaaatacagctccgcaggaatcctgaaaaataattctaatgttactatcttaggaatagcaaattatgtccagtcatagagaagaaagcttcataataatacattcttacctaaagctcactgtcatgatgttaggtatttaaattcttaaagatgttgggttgtttattagtggtatttttatgttgtcttattttaggtaagcttctgtgtaaagctaaaaatcctgtgaatacaatactatcctttacaggcagacattattggtaaacaagatcttgccctccaatgaaatgacttacatgttttaaaaaaccgagttggttttattgaatttaaaaagataggtaactaagtagcatttaaaatcaagatagagcattccttcttgtatcagt

SEQ ID NO: 184920 - DNA, 746 bp, Homo sapiens
  Payload ID: 16410
  Gene Symbol: SNX10
  Gene Name: sorting nexin 10
  ENST ID: ENST00000409367
  CDS Start-End: 225-710
ttaacacctactcatctttactgtgctacaaagattcaaactaagctatgatggaaaattttaaaaaacacacctatcacaatggctaaaataaaaaatagtgataatccccctggaaactgtaataggaatttgtaagtgtctgggttcgagatcctaggattcagaaggaggacttctggcattcttacattgactatgagatatgtattcatactaatagcatgtgttttacaatgaaaacatcctgtgtacgaagaagatatagagaattcgtgtggctgaggcagagactccaaagtaatgcgttgctggtacaactgccagaacttccatctaaaaacctgtttttcaacatgaacaatcgccagcacgtggatcagcgtcgccagggtctggaagatttcctcagaaaagtcctacagaatgcacttttgctttcagatagcagccttcacctcttcttacagagccatctgaattcagaagacattgaggcgtgtgtttctgggcagactaagtactctgtggaagaagcaattcacaagtttgccttaatgaatagacgtttccctgaagaagatgaagaaggaaaaaaagaaaatgatatagattatgattcagaaagttcatcctctgggcttggacacagtagtgatgacagcagttcacatggatgtaaagtaaatacagctccgcaggaatcctgaaaaataattctaatgttactatcttaggaatagcaa

SEQ ID NO: 184921 - DNA, 429 bp, Homo sapiens
  Payload ID: 16410
  Gene Symbol: SNX10
  Gene Name: sorting nexin 10
  ENST ID: ENST00000412416
  CDS Start-End: 271-429
tttgagtcagcaaactccgcggcccgcaagcccggctcggcccggccctgctctgttctgcccggaggagccgcccattgatcgtgtcctgtgctgaagatgtttccggaacaacagaaagagttaacacctactcatctttactgtgctacaaagattcaaactaagctatgatggaaaattttaaaaaacacacctatcacaatggctaaaataaaaaatagtgataatccccctggaaactgtaataggcatttatttattcattaaatgatactaatggaaggcattggatgtatgaggcattcaagtcttacaagacagcctaagctgccctacaggagcttagcgtctgctagaggaggcctacaggaatttgtaagtgtctgggttcgagatcctaggattcagaaggaggacttctggcat

SEQ ID NO: 184922 - DNA, 2613 bp, Homo sapiens
  Payload ID: 16410
  Gene Symbol: SNX10
  Gene Name: sorting nexin 10
  Uniprot ID: Q9Y5X0
  ENST ID: ENST00000446848
  CDS Start-End: 263-868
gctgagcgcgggcgcggggccgctacgtgcgcggggagcgcggggagcgcggggagcgcggggctgcgctcgtgtgcgctcctgggcgctcgccgccgccgctgccgccgcgcgcctttgagtcagcaaactccgcggcccgcaagcccggctcggcccggccctgctctgttctgcccggaggagccgcccgtaagtgacaagagacccgctgagggggcctcccctgcaccgcccagattgatcgtgtcctgtgctgaagatgtttccggaacaacagaaagaggaatttgtaagtgtctgggttcgagatcctaggattcagaaggaggacttctggcattcttacattgactatgagatatgtattcatactaatagcatgtgttttacaatgaaaacatcctgtgtacgaagaagatatagagaattcgtgtggctgaggcagagactccaaagtaatgcgttgctggtacaactgccagaacttccatctaaaaacctgtttttcaacatgaacaatcgccagcacgtggatcagcgtcgccagggtctggaagatttcctcagaaaagtcctacagaatgcacttttgctttcagatagcagccttcacctcttcttacagagccatctgaattcagaagacattgaggcgtgtgtttctgggcagactaagtactctgtggaagaagcaattcacaagtttgccttaatgaatagacgtttccctgaagaagatgaagaaggaaaaaaagaaaatgatatagattatgattcagaaagttcatcctctgggcttggacacagtagtgatgacagcagttcacatggatgtaaagtaaatacagctccgcaggaatcctgaaaaataattctaatgttactatcttaggaatagcaaattatgtccagtcatagagaagaaagcttcataataatacattcttacctaaagctcactgtcatgatgttaggtatttaaattcttaaagatgttgggttgtttattagtggtatttttatgttgtcttattttaggtaagcttctgtgtaaagctaaaaatcctgtgaatacaatactatcctttacaggcagacattattggtaaacaagatcttgccctccaatgaaatgacttacatgttttaaaaaaccgagttggttttattgaatttaaaaagataggtaactaagtagcatttaaaatcaagatagagcattccttcttgtatcagtggggcagtgttaccataaacacggtgtatatgttgttaaaccctatgaagagtaacagtgtagaccagactgcctctctcagatatgtgcctgatattttgtggatacctcccctgcactggcaaaacactatgcttttgggtgttagactgaaatattttaagagtatttaacctttccagtattctgtttcacgcttagatggaaatgtatcttatgaatagagacatattaaaataatgtttacatcttagaaaaaacatagatagtgctagtaatattacttataactgtaatatatagattcagaaatacattttcattatccaaaatcagcttcaacaaatggtttctggagacaaataatttgttttcattatcattgtataatcaggttaatgatttattttttgactaaatgtgcaatttcttatcactagataactttcagtatcagtggtggttacttattacttaaatcagaggaaggattttataaagattaataaatttaattttaccaataaatattcccataatttagaaaaggatgtcgacttgctaatttcagaaataattattcatttttaaaaagccccttttaaagcatctacttgaagattggtataattttcataaaatgtctttttttttagtgtcccaaagatatcttagataaactattttgaagttcagatttcagatgaggcaacattttcttgagataattacccaagtttcatccatgttgaatggtacaaaatatttctgtgaaactaacaggaagatattttcagataactaggataacttgttgctttgttacccagcctaattgaagagtggcagaggctactacaaaaagcaaccttttcattttcactaagagtttaaaagctattgtattattaaaaagtctttacaatgcttgtttcaaagaaccaacagaaaaaaaagctaagaaaactgagaactaacattaaaaaaattaaatttagaataagaatgatttctttaatttgtcctttttttctttggtctaaaacattattaaatttttgtaaatattttgatttaatgtgtcttagatcctcattattttaatacaggaaaagaaaagatttagtaatttcttaccatgctaatatgtaaagttcatgccatccaggcatttaagagcgatcctcatcccttcagcaatatgtatttgagttcacactatttctgttttacagcagttttgaaaaacacatactatgccaccaattgtcatattatttttagatgatgtaacatagccatcaaaattaatattatgtaatgcctaatacttagtatgtaaatgtcacgagatcatttttacattaaacgtg

SEQ ID NO: 184923 - DNA, 823 bp, Homo sapiens
  Payload ID: 16410
  Gene Symbol: SNX10
  Gene Name: sorting nexin 10
  ENST ID: ENST00000416246
  CDS Start-End: 233-823
gtgcgcggggagcgcggggagcgcggggagcgcggggctgcgctcgtgtgcgctcctgggcgctcgccgccgccgctgccgccgcgcgcctttgagtcagcaaactccgcggcccgcaagcccggctcggcccggccctgctctgttctgcccggaggagccgcccattgatcgtgtcctgtgctgaagatgtttccggaacaacagaaagaggcatttatttattcattaaatgatactaatggaaggcattggatgtatgaggcattcaagtcttacaagacagcctaagctgccctacaggagcttagcgtctgctagaggaggcctacaggaatttgtaagtgtctgggttcgagatcctaggattcagaaggaggacttctggcattcttacattgactatgagatatgtattcatactaatagcatgtgttttacaatgaaaacatcctgtgtacgaagaagatatagagaattcgtgtggctgaggcagagactccaaagtaatgcgttgctggtacaactgccagaacttccatctaaaaacctgtttttcaacatgaacaatcgccagcacgtggatcagcgtcgccagggtctggaagatttcctcagaaaagtcctacagaatgcacttttgctttcagatagcagccttcacctcttcttacagagccatctgaattcagaagacattgaggcgtgtgtttctgggcagactaagtactctgtggaagaagcaattcacaagtttgccttaatgaatagacgtttccctgaagaagatgaagaaggaaaaaaagaaaatgatatagattat

SEQ ID NO: 184924 - DNA, 2361 bp, Homo sapiens
  Payload ID: 16410
  Gene Symbol: SNX10
  Gene Name: sorting nexin 10
  ENST ID: ENST00000619420
  CDS Start-End: 1-606
atgttgcctagagagatgaagaaagaatttgtaagtgtctgggttcgagatcctaggattcagaaggaggacttctggcattcttacattgactatgagatatgtattcatactaatagcatgtgttttacaatgaaaacatcctgtgtacgaagaagatatagagaattcgtgtggctgaggcagagactccaaagtaatgcgttgctggtacaactgccagaacttccatctaaaaacctgtttttcaacatgaacaatcgccagcacgtggatcagcgtcgccagggtctggaagatttcctcagaaaagtcctacagaatgcacttttgctttcagatagcagccttcacctcttcttacagagccatctgaattcagaagacattgaggcgtgtgtttctgggcagactaagtactctgtggaagaagcaattcacaagtttgccttaatgaatagacgtttccctgaagaagatgaagaaggaaaaaaagaaaatgatatagattatgattcagaaagttcatcctctgggcttggacacagtagtgatgacagcagttcacatggatgtaaagtaaatacagctccgcaggaatcctgaaaaataattctaatgttactatcttaggaatagcaaattatgtccagtcatagagaagaaagcttcataataatacattcttacctaaagctcactgtcatgatgttaggtatttaaattcttaaagatgttgggttgtttattagtggtatttttatgttgtcttattttaggtaagcttctgtgtaaagctaaaaatcctgtgaatacaatactatcctttacaggcagacattattggtaaacaagatcttgccctccaatgaaatgacttacatgttttaaaaaaccgagttggttttattgaatttaaaaagataggtaactaagtagcatttaaaatcaagatagagcattccttcttgtatcagtggggcagtgttaccataaacacggtgtatatgttgttaaaccctatgaagagtaacagtgtagaccagactgcctctctcagatatgtgcctgatattttgtggatacctcccctgcactggcaaaacactatgcttttgggtgttagactgaaatattttaagagtatttaacctttccagtattctgtttcacgcttagatggaaatgtatcttatgaatagagacatattaaaataatgtttacatcttagaaaaaacatagatagtgctagtaatattacttataactgtaatatatagattcagaaatacattttcattatccaaaatcagcttcaacaaatggtttctggagacaaataatttgttttcattatcattgtataatcaggttaatgatttattttttgactaaatgtgcaatttcttatcactagataactttcagtatcagtggtggttacttattacttaaatcagaggaaggattttataaagattaataaatttaattttaccaataaatattcccataatttagaaaaggatgtcgacttgctaatttcagaaataattattcatttttaaaaagccccttttaaagcatctacttgaagattggtataattttcataaaatgtctttttttttagtgtcccaaagatatcttagataaactattttgaagttcagatttcagatgaggcaacattttcttgagataattacccaagtttcatccatgttgaatggtacaaaatatttctgtgaaactaacaggaagatattttcagataactaggataacttgttgctttgttacccagcctaattgaagagtggcagaggctactacaaaaagcaaccttttcattttcactaagagtttaaaagctattgtattattaaaaagtctttacaatgcttgtttcaaagaaccaacagaaaaaaaagctaagaaaactgagaactaacattaaaaaaattaaatttagaataagaatgatttctttaatttgtcctttttttctttggtctaaaacattattaaatttttgtaaatattttgatttaatgtgtcttagatcctcattattttaatacaggaaaagaaaagatttagtaatttcttaccatgctaatatgtaaagttcatgccatccaggcatttaagagcgatcctcatcccttcagcaatatgtatttgagttcacactatttctgttttacagcagttttgaaaaacacatactatgccaccaattgtcatattatttttagatgatgtaacatagccatcaaaattaatattatgtaatgcctaatacttagtatgtaaatgtcacgagatcatttttacattaaacgtgaaaaaaaatc

SEQ ID NO: 184925 - DNA, 2315 bp, Homo sapiens
  Payload ID: 16411
  Gene Symbol: SNX11
  Gene Name: sorting nexin 11
  Uniprot ID: Q9Y5W9
  ENST ID: ENST00000359238
  CDS Start-End: 268-1080
ccggcgtcccaagtgagtggaggggggatcccgactccagtccggggccttggccagcggagccgcgctattcggaagcgggaatcccactcagagcccgggcctgtaggggcggggcgtcccgggcacccgggattggggcgtctcccgtcgtgcaccggggcaccggcgactcacccggaaggagaagccgtgatctggctatatggtggggcgcgggcggtgtcgctgtggggagctggtgctgttctcagatgtttccttccaatgggcttttggtgtaggatgtcggagaaccaagaacaggaggaggtgattacagtgcgtgttcaggacccccgagtgcagaatgagggctcctggaactcttatgtggattataagatattcctccataccaacagcaaagcctttactgccaagacttcctgtgtgcggcgccgctaccgtgagttcgtgtggctgagaaagcagctacagagaaatgctggtttggtgcctgttcctgaacttcctgggaagtcaaccttcttcggcacctcagatgagttcattgagaagcgacgacaaggtctgcagcacttccttgaaaaggtcctgcagagtgtggttctcctgtcagacagccagttgcacctattcctgcaaagccagctctcggtgcctgagatagaagcctgtgtccagggccgaagtaccatgactgtgtctgatgccattcttcgatatgctatgtcaaactgtggctgggcccaggaagagaggcagagctcttctcacctggctaaaggagaccagcctaagagttgctgctttcttccaagatcgggtaggaggagctctccctcaccgcctcccagtgaagaaaaggaccatttagaagtgtgggctccagttgttgactctgaggttccttccttggaaagtcccactctcccacccctctcctcaccattatgctgtgattttggaagacccaaagagggaacctccactcttcagtctgtgaggagggctgtgggaggagatcatgctgtgcctttggaccctggtcagttagaaacagttttggaaaagtgagctctgggttctgctctgagatggtcagagaagatgcgggccaggagacttactcaggtgggactgggcacagggcaggtatgtgggaggctgggctgcttagtgtcttctagtcacctctgcttgggctgattgacagaggtcagtcattacagccccttatgcctcttccatgggaacaaatactgtgcagatgtttgtaagttaaacataagacacaggggctgttgcttttgaacagaaccctatattactctcctgggatctgagtttctgcaggtcatttgtatgtaggaccaggagtatctcctcaggtgaccagttttggggacccgtatgtggcaaattctaagctgccatattgaacatcatcccactgggagtggttatgttgtatccccatcttggctggcttcagtttttgctgtagccctagagcactttgtttgtgggaggctggcctcttgcctacctccttgcatggacagggggatgaatatttactttcccacctccttgctttttctttcactgataccactgaatggaactggtgctgtgactcctgctgctggggatttatgtcccgagaccttagcctggctgagtggagcctgagacctgcacaacagctcatggtcatgcatgagagagaagtggctggccacagccagagggaacagtaacagcccaggggcctttattttgggaaaggctgtcccgggctgttactgtctcttctggttataaagcagacatgtggccatcttttccgcagggttagagtgggctcctttctttttggaatccttttcttctcctttggtagcagctccctgcctccagggcttccgccaccagcgtctctgctgtgttgcgcagtgcagtggggtgcaagggctttgtttctgcctgcctgaaagagagggctctggggatggagatgagaaacaacacgctctccttcagacaatgaggcattctgtcctcctgctgccattcttcatctccactgagagccagagctggtaggagccgagtgccacaggcattctgcattgctctactcttaggtttgtgtgtgtgatccttcccctccctgtcgcccactcctccctcctctggctatcctaccctgtctgtgggctcttttactaccagcctatgctgtgggactgtcatggcatttagttcagagtggaggggctttggcctgaaataaaatgcaagtattt

SEQ ID NO: 184926 - DNA, 2733 bp, Homo sapiens
  Payload ID: 16411
  Gene Symbol: SNX11
  Gene Name: sorting nexin 11
  Uniprot ID: Q9Y5W9
  ENST ID: ENST00000393405
  CDS Start-End: 355-1167
ccctcacccggcacctgcgtgcactctccggcgtcccaagtgagtggaggggggatcccgactccagtccggggccttggccagcggagccgcgctattcggaagcgggaatcccactcagagcccgggcctgtaggggcggggcgtcccgggcacccgggattggggcgtctcccgtcgtgcaccggggcaccggcgactcacccggaaggagaagccgtgatctggctatatggtggggcgcgggcggtgtcgctgtggggagctggtgctgttctcaggagccagcctggatcatttgttggcagtacatattggctgaagtcagttttcatttcaagatgtttccttccaatgggcttttggtgtaggatgtcggagaaccaagaacaggaggaggtgattacagtgcgtgttcaggacccccgagtgcagaatgagggctcctggaactcttatgtggattataagatattcctccataccaacagcaaagcctttactgccaagacttcctgtgtgcggcgccgctaccgtgagttcgtgtggctgagaaagcagctacagagaaatgctggtttggtgcctgttcctgaacttcctgggaagtcaaccttcttcggcacctcagatgagttcattgagaagcgacgacaaggtctgcagcacttccttgaaaaggtcctgcagagtgtggttctcctgtcagacagccagttgcacctattcctgcaaagccagctctcggtgcctgagatagaagcctgtgtccagggccgaagtaccatgactgtgtctgatgccattcttcgatatgctatgtcaaactgtggctgggcccaggaagagaggcagagctcttctcacctggctaaaggagaccagcctaagagttgctgctttcttccaagatcgggtaggaggagctctccctcaccgcctcccagtgaagaaaaggaccatttagaagtgtgggctccagttgttgactctgaggttccttccttggaaagtcccactctcccacccctctcctcaccattatgctgtgattttggaagacccaaagagggaacctccactcttcagtctgtgaggagggctgtgggaggagatcatgctgtgcctttggaccctggtcagttagaaacagttttggaaaagtgagctctgggttctgctctgagatggtcagagaagatgcgggccaggagacttactcaggtgggactgggcacagggcaggtatgtgggaggctgggctgcttagtgtcttctagtcacctctgcttgggctgattgacagaggtcagtcattacagccccttatgcctcttccatgggaacaaatactgtgcagatgtttgtaagttaaacataagacacaggggctgttgcttttgaacagaaccctatattactctcctgggatctgagtttctgcaggtcatttgtatgtaggaccaggagtatctcctcaggtgaccagttttggggacccgtatgtggcaaattctaagctgccatattgaacatcatcccactgggagtggttatgttgtatccccatcttggctggcttcagtttttgctgtagccctagagcactttgtttgtgggaggctggcctcttgcctacctccttgcatggacagggggatgaatatttactttcccacctccttgctttttctttcactgataccactgaatggaactggtgctgtgactcctgctgctggggatttatgtcccgagaccttagcctggctgagtggagcctgagacctgcacaacagctcatggtcatgcatgagagagaagtggctggccacagccagagggaacagtaacagcccaggggcctttattttgggaaaggctgtcccgggctgttactgtctcttctggttataaagcagacatgtggccatcttttccgcagggttagagtgggctcctttctttttggaatccttttcttctcctttggtagcagctccctgcctccagggcttccgccaccagcgtctctgctgtgttgcgcagtgcagtggggtgcaagggctttgtttctgcctgcctgaaagagagggctctggggatggagatgagaaacaacacgctctccttcagacaatgaggcattctgtcctcctgctgccattcttcatctccactgagagccagagctggtaggagccgagtgccacaggcattctgcattgctctactcttaggtttgtgtgtgtgatccttcccctccctgtcgcccactcctccctcctctggctatcctaccctgtctgtgggctcttttactaccagcctatgctgtgggactgtcatggcatttagttcagagtggaggggctttggcctgaaataaaatgcaagtatttaagattgttgttgcaatttgtgtctaacaagctgtagcagagaaggagggagtgagcgctggcagtatttcctttcataaatcatgaatttatcagtgtggaaataatgcttcagaactgtgctctgtagccctcctgcattgtgtgtgcagctcaagttcaccactggaggaaggattgtcttccaaagagctgggatccaactcttctcacagttctgggcgtgaaccttgttaggtataatttacctgatgctgcttccatcctcgcagtctgtctgaggtgccaggtgctgaaagagaaataaagtttgtcaacaggcagatgcaaa

SEQ ID NO: 184927 - DNA, 1601 bp, Homo sapiens
  Payload ID: 16411
  Gene Symbol: SNX11
  Gene Name: sorting nexin 11
  ENST ID: ENST00000452859
  CDS Start-End: 594-974
attcgccgtccctcacccggcacctgcgtgcactctccggcgtcccaagtgagtggaggggggatcccgactccagtccggggccttggccagcggagccgcgctattcggaagcgggaatcccactcagagcccgggcctgtaggggcggggcgtcccgggcacccgggattggggcgtctcccgtcgtgcaccggggcaccggcgactcacccggaaggagaagccgtgatctggctatatggtggggcgcgggcggtgtcgctgtggggagctggtgctgttctcagaccaacagcaaagcctttactgccaagacttcctgtgtgcggcgccgctaccgtgagttcgtgtggctgagaaagcagctacagagaaatgctggtttggtgcctgttcctgaacttcctgggaagtcaaccttcttcggcacctcagatgagttcattgagaagcgacgacaaggtctgcagcacttccttgaaaaggtcctgcagagtgtggttctcctgtcagacagccagttgcacctattcctgcaaagccagctctcggtgcctgagatagaagcctgtgtccagggccgaagtaccatgactgtgtctgatgccattcttcgatatgctatgtcaaactgtggctgggcccaggaagagaggcagagctcttctcacctggctaaaggagaccagcctaagagttgctgctttcttccaagatcgggtaggaggagctctccctcaccgcctcccagtgaagaaaaggaccatttagaagtgtgggctccagttgttgactctgaggttccttccttggaaagtcccactctcccacccctctcctcaccattatgctgtgattttggaagacccaaagagggaacctccactcttcagtctgtgaggagggctgtgggaggagatcatgctgtgcctttggaccctggtcagttagaaacagttttggaaaagtgagctctgggttctgctctgagatggtcagagaagatgcgggccaggagacttactcaggtgggactgggcacagggcaggtatgtgggaggctgggctgcttagtgtcttctagtcacctctgcttgggctgattgacagaggtcagtcattacagccccttatgcctcttccatgggaacaaatactgtgcagatgtttgtaagttaaacataagacacaggggctgttgcttttgaacagaaccctatattactctcctgggatctgagtttctgcaggtcatttgtatgtaggaccaggagtatctcctcaggtgaccagttttggggacccgtatgtggcaaattctaagctgccatattgaacatcatcccactgggagtggttatgttgtatccccatcttggctggcttcagtttttgctgtagccctagagcactttgtttgtgggaggctggcctcttgcctacctccttgcatggacagggggatgaatatttactttcccacctccttgctttttctttcactgataccactgaatggaactggtgctgtgactcctgctgctggggatttatgtcccgagaccttagcctggctgagtggagcctgagacctgcac

SEQ ID NO: 184928 - DNA, 1200 bp, Homo sapiens
  Payload ID: 16411
  Gene Symbol: SNX11
  Gene Name: sorting nexin 11
  Uniprot ID: Q9Y5W9
  ENST ID: ENST00000580219
  CDS Start-End: 112-900
attcgccgtccctcacccggcacctgcgtgcactctccggcgtcccaaatgtttccttccaatgggcttttggtgtaggatgtcggagaaccaagaacaggaggtaagagtatggtctgcagagaacaggaggtgattacagtgcgtgttcaggacccccgagtgcagaatgagggctcctggaactcttatgtggattataagatattcctccataccaacagcaaagcctttactgccaagacttcctgtgtgcggcgccgctaccgtgagttcgtgtggctgagaaagcagctacagagaaatgctggtttggtgcctgttcctgaacttcctgggaagtcaaccttcttcggcacctcagatgagttcattgagaagcgacgacaaggtctgcagcacttccttgaaaaggtcctgcagagtgtggttctcctgtcagacagccagttgcacctattcctgcaaagccagctctcggtgcctgagatagaagcctgtgtccagggccgaagtaccatgactgtgtctgatgccattcttcgatatgctatgtcaaactgtggctgggcccaggaagagaggcagagctcttctcacctggctaaaggagaccagcctaagagttgctgctttcttccaagatcgggtaggaggagctctccctcaccgcctcccagtgaagaaaaggaccatttagaagtgtgggctccagttgttgactctgaggttccttccttggaaagtcccactctcccacccctctcctcaccattatgctgtgattttggaagacccaaagagggaacctccactcttcagtctgtgaggagggctgtgggaggagatcatgctgtgcctttggaccctggtcagttagaaacagttttggaaaagtgagctctgggttctgctctgagatggtcagagaagatgcgggccaggagacttactcaggtgggactgggcacagggcaggtatgtgggaggctgggctgcttagtgtcttctagtcacctctgcttgggctgattgacagaggtcagtcattacagccccttatgcctcttccatgggaacaaatactgtgcagatgtttgtaagttaaacataagacacaggggctgttgcttttgaacagaaccctatattactctcctgggatctgagtttctgcaggtcatttgtatgtaggaccag

SEQ ID NO: 184929 - DNA, 627 bp, Homo sapiens
  Payload ID: 16411
  Gene Symbol: SNX11
  Gene Name: sorting nexin 11
  ENST ID: ENST00000582481
  CDS Start-End: 96-627
aactttcggggttttccctggtaaagaatgataagaacagaggcatactaaccttgatcctgtatcctctgtccctcatcagatgtttccttccaatgggcttttggtgtaggatgtcggagaaccaagaacaggaggaggtgattacagtgcgtgttcaggacccccgagtgcagaatgagggctcctggaactcttatgtggattataagatattcctccataccaacagcaaagcctttactgccaagacttcctgtgtgcggcgccgctaccgtgagttcgtgtggctgagaaagcagctacagagaaatgctggtttggtgcctgttcctgaacttcctgggaagtcaaccttcttcggcacctcagatgagttcattgagaagcgacgacaaggtctgcagcacttccttgaaaaggtcctgcagagtgtggttctcctgtcagacagccagttgcacctattcctgcaaagccagctctcggtgcctgagatagaagcctgtgtccagggccgaagtaccatgactgtgtctgatgccattcttcgatatgctatgtcaaactgtggctgggcccaggaagagaggcagagctcttctcacctggctaaaggagaccagc

SEQ ID NO: 184930 - DNA, 965 bp, Homo sapiens
  Payload ID: 16411
  Gene Symbol: SNX11
  Gene Name: sorting nexin 11
  ENST ID: ENST00000583320
  CDS Start-End: 250-423
ggaggggggatcccgactccagtccggggccttggccagcggagccgcgctattcggaagcgggaatcccactcagagcccgggcctgtaggggcggggcgtcccgggcacccgggattggggcgtctcccgtcgtgcaccggggcaccggcgactcacccggaaggagaagccgtgatctggctatatggtggggcgcgggcggtgtcgctgtggggagctggtgctgttctcagatgtttccttccaatgggcttttggtgtaggatgtcggagaaccaagaacaggaggaggtgattacagtgcgtgttcaggacccccgagtgcagaatgagggctcctggaactcttatgtggattataagatattcctccatatggagttttgctcttgttgcccaggctggagtgcagtggtgtgatctcggcttactgcaacctccgcctcccaggttcaagtgattctcctgcctcagcctcccaagtagctgggattacagaccaacagcaaagcctttactgccaagacttcctgtgtgcggcgccgctaccgtgagttcgtgtggctgagaaagcagctacagagaaatgctggtttggtgcctgttcctgaacttcctgggaagtcaaccttcttcggcacctcagatgagttcattgagaagcgacgacaaggtctgcagcacttccttgaaaaggtcctgcagagtgtggttctcctgtcagacagccagttgcacctattcctgcaaagccagctctcggtgcctgagatagaagcctgtgtccagggccgaagtaccatgactgtgtctgatgccattcttcgatatgctatgtcaaactgtggctgggcccaggaagagaggcagagctcttctcacctggctaaaggagaccagcctaagagttgctgctttcttccaagatcgggtaggaggagctctccctcaccgcctcccag

SEQ ID NO: 184931 - DNA, 922 bp, Homo sapiens
  Payload ID: 16411
  Gene Symbol: SNX11
  Gene Name: sorting nexin 11
  ENST ID: ENST00000584335
  CDS Start-End: 160-922
gtgggcttgagcgtcagtagtggcactcgggatggtggcatcgctttacatcctagggagggactctcttaccacccgggattaaggagccagcctggatcatttgttggcagtacatattggctgaagtcagttttcatttcaagatgtttccttccaatgggcttttggtgtaggatgtcggagaaccaagaacaggaggaggtgattacagtgcgtgttcaggacccccgagtgcagaatgagggctcctggaactcttatgtggattataagatattcctccataccaacagcaaagcctttactgccaagacttcctgtgtgcggcgccgctaccgtgagttcgtgtggctgagaaagcagctacagagaaatgctggtttggtgcctgttcctgaacttcctgggaagtcaaccttcttcggcacctcagatgagttcattgagaagcgacgacaaggtctgcagcacttccttgaaaaggtcctgcagagtgtggttctcctgtcagacagccagttgcacctattcctgcaaagccagctctcggtgcctgagatagaagcctgtgtccagggccgaagtaccatgactgtgtctgatgccattcttcgatatgctatgtcaaactgtggctgggcccaggaagagaggcagagctcttctcacctggctaaaggagaccagcctaagagttgctgctttcttccaagatcgggtaggaggagctctccctcaccgcctcccagtgaagaaaaggaccatttagaagtgtgggctccagttgttgactctgaggttccttccttggaaagtcccactctcccacccctctcctcaccattatgctgtgattttggaagacccaaagagggaacctccactcttcagtctgtgaggagggctgtgggaggagatc

SEQ ID NO: 184932 - DNA, 1282 bp, Homo sapiens
  Payload ID: 16411
  Gene Symbol: SNX11
  Gene Name: sorting nexin 11
  Uniprot ID: Q9Y5W9
  ENST ID: ENST00000582104
  CDS Start-End: 115-903
atatggtggggcgcgggcggtgtcgctgtggggagctggtgctgttctcagatgtttccttccaatgggcttttggtgtaggatgtcggagaaccaagaacaggaggtaagagtatggtctgcagagaacaggaggtgattacagtgcgtgttcaggacccccgagtgcagaatgagggctcctggaactcttatgtggattataagatattcctccataccaacagcaaagcctttactgccaagacttcctgtgtgcggcgccgctaccgtgagttcgtgtggctgagaaagcagctacagagaaatgctggtttggtgcctgttcctgaacttcctgggaagtcaaccttcttcggcacctcagatgagttcattgagaagcgacgacaaggtctgcagcacttccttgaaaaggtcctgcagagtgtggttctcctgtcagacagccagttgcacctattcctgcaaagccagctctcggtgcctgagatagaagcctgtgtccagggccgaagtaccatgactgtgtctgatgccattcttcgatatgctatgtcaaactgtggctgggcccaggaagagaggcagagctcttctcacctggctaaaggagaccagcctaagagttgctgctttcttccaagatcgggtaggaggagctctccctcaccgcctcccagtgaagaaaaggaccatttagaagtgtgggctccagttgttgactctgaggttccttccttggaaagtcccactctcccacccctctcctcaccattatgctgtgattttggaagacccaaagagggaacctccactcttcagtctgtgaggagggctgtgggaggagatcatgctgtgcctttggaccctggtcagttagaaacagttttggaaaagtgagctctgggttctgctctgagatggtcagagaagatgcgggccaggagacttactcaggtgggactgggcacagggcaggtatgtgggaggctgggctgcttagtgtcttctagtcacctctgcttgggctgattgacagaggtcagtcattacagccccttatgcctcttccatgggaacaaatactgtgcagatgtttgtaagttaaacataagacacaggggctgttgcttttgaacagaaccctatattactctcctgggatctgagtttctgcaggtcatttgtatgtaggaccaggagtatctcctcaggtgaccagttttggggacccgtatgtggcaaattctaagctgccatattgaacatcatcccactg

SEQ ID NO: 184933 - DNA, 563 bp, Homo sapiens
  Payload ID: 16411
  Gene Symbol: SNX11
  Gene Name: sorting nexin 11
  ENST ID: ENST00000581298
  CDS Start-End: 47-563
attcctgttagcccgcagcagcaacctgctcagatgtttccttccaatgggcttttggtgtaggatgtcggagaaccaagaacaggaggaggtgattacagtgcgtgttcaggacccccgagtgcagaatgagggctcctggaactcttatgtggattataagatattcctccataccaacagcaaagcctttactgccaagacttcctgtgtgcggcgccgctaccgtgagttcgtgtggctgagaaagcagctacagagaaatgctggtttggtgcctgttcctgaacttcctgggaagtcaaccttcttcggcacctcagatgagttcattgagaagcgacgacaaggtctgcagcacttccttgaaaaggtcctgcagagtgtggttctcctgtcagacagccagttgcacctattcctgcaaagccagctctcggtgcctgagatagaagcctgtgtccagggccgaagtaccatgactgtgtctgatgccattcttcgatatgctatgtcaaactgtggctgggcccaggaagagaggcagagctcttctcacctgg

SEQ ID NO: 184934 - DNA, 1426 bp, Homo sapiens
  Payload ID: 16411
  Gene Symbol: SNX11
  Gene Name: sorting nexin 11
  ENST ID: ENST00000581705
  CDS Start-End: 337-477
gtgcactctccggcgtcccaagtgagtggaggggggatcccgactccagtccggggccttggccagcggagccgcgctattcggaagcgggaatcccactcagagcccgggcctgtaggggcggggcgtcccgggcacccgggattggggcgtctcccgtcgtgcaccggggcaccggcgactcacccggaaggagaagccgtgatctggctatatggtggggcgcgggcggtgtcgctgtggggagctggtgctgttctcaggagccagcctggatcatttgttggcagtacatattggctgaagtcagttttcatttcaagatgtttccttccaatgggcttttggtgtaggatgtcggagaaccaagaacaggaggaggtgattacagtgcgtgttcaggacccccgagtgcagaatgagggctcctggaactcttatgtggattataagatattcctccatgcctgttcctgaacttcctgggaagtcaaccttcttcggcacctcagatgagttcattgagaagcgacgacaaggtctgcagcacttccttgaaaaggtcctgcagagtgtggttctcctgtcagacagccagttgcacctattcctgcaaagccagctctcggtgcctgagatagaagcctgtgtccagggccgaagtaccatgactgtgtctgatgccattcttcgatatgctatgtcaaactgtggctgggcccaggaagagaggcagagctcttctcacctggctaaaggagaccagcctaagagttgctgctttcttccaagatcgggtaggaggagctctccctcaccgcctcccagtgaagaaaaggaccatttagaagtgtgggctccagttgttgactctgaggttccttccttggaaagtcccactctcccacccctctcctcaccattatgctgtgattttggaagacccaaagagggaacctccactcttcagtctgtgaggagggctgtgggaggagatcatgctgtgcctttggaccctggtcagttagaaacagttttggaaaagtgagctctgggttctgctctgagatggtcagagaagatgcgggccaggagacttactcaggtgggactgggcacagggcaggtatgtgggaggctgggctgcttagtgtcttctagtcacctctgcttgggctgattgacagaggtcagtcattacagccccttatgcctcttccatgggaacaaatactgtgcagatgtttgtaagttaaacataagacacaggggctgttgcttttgaacagaaccctatattactctcctgggatctgagtttctgcaggtcatttgtatgtaggaccaggagtatctcctcaggtgaccagttttggggacccgtatgtggcaaattctaagctgccatattgaacatcatcccact

SEQ ID NO: 184935 - DNA, 720 bp, Homo sapiens
  Payload ID: 16412
  Gene Symbol: SNX12
  Gene Name: sorting nexin 12
  Uniprot ID: Q9UMY4
  ENST ID: ENST00000276105
  CDS Start-End: 98-574
gctagttattttgcaagcgggaggggccgtgcgcgctcctgcctcaggcctctgtcccccaccccctttccccggtcccaggctctccttcggaaagatgtcggacacggcagtagctgatacccggcgccttaactcgaagccgcaggacctgaccgacgcttacgggccgccaagtaacttcctggagatcgacatctttaatcctcagacggtgggcgtgggacgcgcgcgcttcaccacctatgagacaaacctacctatcttcaagctaaaggagtcctgcgtacggcggcgctacagtgactttgagtggctgaaaaatgagctggagagagatagcaagattgtagtaccaccactgcctgggaaagccttgaagcggcagctccctttccgaggagatgaagggatctttgaggagtctttcatcgaagaaaggaggcagggcctcgagcagtttattaacaaaattgctgggcacccactggctcagaatgaacgctgcctacacatgttcctgcaagaggaggcaattgacaggaactacgtcccggggaaggtgcgccagtaggagcccctctcaccacctgccctctactttcctgctgaaatgacattggtttttacactaagcctctctctgtctttgatctgaagttggctgcccatctcctggcctgatagactgtctggcattgtgctccctggtacctgact

SEQ ID NO: 184936 - DNA, 2376 bp, Homo sapiens
  Payload ID: 16412
  Gene Symbol: SNX12
  Gene Name: sorting nexin 12
  Uniprot ID: Q9UMY4
  ENST ID: ENST00000374274
  CDS Start-End: 118-606
ccgccgccgcctgtgggttggctagttattttgcaagcgggaggggccgtgcgcgctcctgcctcaggcctctgtcccccaccccctttccccggtcccaggctctccttcggaaagatgtcggacacggcagtagctgatacccggcgccttaactcgaagccgcaggacctgaccgacgcttacgggccgccaagtaacttcctggagatcgacatctttaatcctcagacggtgggcgtgggacgcgcgcgcttcaccacctatgaggttcgcatgcggacaaacctacctatcttcaagctaaaggagtcctgcgtacggcggcgctacagtgactttgagtggctgaaaaatgagctggagagagatagcaagattgtagtaccaccactgcctgggaaagccttgaagcggcagctccctttccgaggagatgaagggatctttgaggagtctttcatcgaagaaaggaggcagggcctcgagcagtttattaacaaaattgctgggcacccactggctcagaatgaacgctgcctacacatgttcctgcaagaggaggcaattgacaggaactacgtcccggggaaggtgcgccagtaggagcccctctcaccacctgccctctactttcctgctgaaatgacattggtttttacactaagcctctctctgtctttgatctgaagttggctgcccatctcctggcctgatagactgtctggcattgtgctccctggtacctgactacaccatgtgggcactctgctaggatcctcttctctgaggagaggtgggaacccacaggcagatgccctttgcttggggttggggtgggtgggtggggggattagactggaaggcaatttcttgggcatttacccatgccagaaggctaacctggggggaggggggcgcttgtgctggtgaggcacttggatacatactgatgctgcaagttcaggggatttttcttactcttaggtttaaccaagaacactgagcagggaaaaaccctgcctttcctaactgcatgtattttttcctttttggaaaggtggtagagactcagaagctttccttgttttcttcaggcctgctcccagttttcttaacagtttcttttgttgctttctctctcccttgttgctttccatggcagtaatcctcctagagtccaagcagtctgttgtatggagcagggtgtgtgggttttctgggcccatcattatggctgcttcagagtcagaagaaagccatagggcagtaggggagctcctattgcctagcccctctccctttgtggctcccactctagctgcctatttttgctcatcagctggtgagtcagtatgggccagcagttctccctccctaagcccttgctactttatgggttagctttgcaggtttggtggcttgaggggtgggggcaactcaccactgccaggtaactccctgaagggtgggagtggattatcttctaggctcttacccgcggtagggaagggcatcaacactgtcttccttccattctcctttcccccatcccatttagtgctgccacagggcagaagcacacaaaccaaccacacagtctctgacttctcctaagcactttgagttgttgaatggggctcaggggcaagagtttttgctgccctccccagcgtggtcacagggttattgaactgcctgcacttgtttctcatgcaactccagcattttccccagaagttgaactatggatagcagcttggtatggatttcctaaatcttaacatttgaagcagcttcttgaggctggcaactatcctggtttctgtcttggagggggtggtttgtttgctggggcccaacgtctgtcccaagtggtggggtgagagtaagttaactttggtgccaggtgagaggtgggggctctttgcttagactccctatcatggaaagattggagttttctatgcagggcactgtggaaaaggattgctgattctgactgaccctgatcagagagattaggattgtattttgacataggatttggaacccatctaaatgttgaagttccctgagacagctctccagctgctgagcctgcgccaggggctaagcagcccctaatgagaggctctgctccctttcccacctcgccaatgttgttgttgctgcctttttgatttgtatcctctgttatagacattttttaaaaacgatttcctctttcattgtgcacaagtgctgagagtctgaggccccatttctgctgtgtatatatatcctgactcggggcttttattcagcaaactgttcattcttctgtcagacaatgtcatattcaactctgttcatattaaaccactgtgaagcaag

SEQ ID NO: 184937 - DNA, 2422 bp, Homo sapiens
  Payload ID: 16412
  Gene Symbol: SNX12
  Gene Name: sorting nexin 12
  Uniprot ID: Q9UMY4
  ENST ID: ENST00000622277
  CDS Start-End: 167-655
ttttgattgccatttccttgggacagcctgaagagagaatcgaaagaagttcttttcagtatggttgcataacatcgagtcggagattgtgaaatgtcctttgagaaaaatgtacgggcaggaagatgaataggtgtctgtttgattaaggctctccttcggaaagatgtcggacacggcagtagctgatacccggcgccttaactcgaagccgcaggacctgaccgacgcttacgggccgccaagtaacttcctggagatcgacatctttaatcctcagacggtgggcgtgggacgcgcgcgcttcaccacctatgaggttcgcatgcggacaaacctacctatcttcaagctaaaggagtcctgcgtacggcggcgctacagtgactttgagtggctgaaaaatgagctggagagagatagcaagattgtagtaccaccactgcctgggaaagccttgaagcggcagctccctttccgaggagatgaagggatctttgaggagtctttcatcgaagaaaggaggcagggcctcgagcagtttattaacaaaattgctgggcacccactggctcagaatgaacgctgcctacacatgttcctgcaagaggaggcaattgacaggaactacgtcccggggaaggtgcgccagtaggagcccctctcaccacctgccctctactttcctgctgaaatgacattggtttttacactaagcctctctctgtctttgatctgaagttggctgcccatctcctggcctgatagactgtctggcattgtgctccctggtacctgactacaccatgtgggcactctgctaggatcctcttctctgaggagaggtgggaacccacaggcagatgccctttgcttggggttggggtgggtgggtggggggattagactggaaggcaatttcttgggcatttacccatgccagaaggctaacctggggggaggggggcgcttgtgctggtgaggcacttggatacatactgatgctgcaagttcaggggatttttcttactcttaggtttaaccaagaacactgagcagggaaaaaccctgcctttcctaactgcatgtattttttcctttttggaaaggtggtagagactcagaagctttccttgttttcttcaggcctgctcccagttttcttaacagtttcttttgttgctttctctctcccttgttgctttccatggcagtaatcctcctagagtccaagcagtctgttgtatggagcagggtgtgtgggttttctgggcccatcattatggctgcttcagagtcagaagaaagccatagggcagtaggggagctcctattgcctagcccctctccctttgtggctcccactctagctgcctatttttgctcatcagctggtgagtcagtatgggccagcagttctccctccctaagcccttgctactttatgggttagctttgcaggtttggtggcttgaggggtgggggcaactcaccactgccaggtaactccctgaagggtgggagtggattatcttctaggctcttacccgcggtagggaagggcatcaacactgtcttccttccattctcctttcccccatcccatttagtgctgccacagggcagaagcacacaaaccaaccacacagtctctgacttctcctaagcactttgagttgttgaatggggctcaggggcaagagtttttgctgccctccccagcgtggtcacagggttattgaactgcctgcacttgtttctcatgcaactccagcattttccccagaagttgaactatggatagcagcttggtatggatttcctaaatcttaacatttgaagcagcttcttgaggctggcaactatcctggtttctgtcttggagggggtggtttgtttgctggggcccaacgtctgtcccaagtggtggggtgagagtaagttaactttggtgccaggtgagaggtgggggctctttgcttagactccctatcatggaaagattggagttttctatgcagggcactgtggaaaaggattgctgattctgactgaccctgatcagagagattaggattgtattttgacataggatttggaacccatctaaatgttgaagttccctgagacagctctccagctgctgagcctgcgccaggggctaagcagcccctaatgagaggctctgctccctttcccacctcgccaatgttgttgttgctgcctttttgatttgtatcctctgttatagacattttttaaaaacgatttcctctttcattgtgcacaagtgctgagagtctgaggccccatttctgctgtgtatatatatcctgactcggggcttttattcagcaaactgttcattcttctgtcagacaatgtcatattcaactctgttcatattaaaccactgtgaagc

SEQ ID NO: 184938 - DNA, 661 bp, Homo sapiens
  Payload ID: 16412
  Gene Symbol: SNX12
  Gene Name: sorting nexin 12
  ENST ID: ENST00000622259
  CDS Start-End: 143-661
gtgcgtgcgtgggcgcgcgtgcgcgccgccgccgcctgtgggttggctagttattttgcaagcgggaggggccgtgcgcgctcctgcctcaggcctctgtcccccaccccctttccccggtcccaggctctccttcggaaagatgtcggacacggcagtagctgatacccggcgccttaactcgaagccgcaggacctgaccgacgcttacgggccgccaagtaacttcctggagatcgacatctttaatcctcagacggtgggcgtgggacgcgcgcgcttcaccacctatgaggttcgcatgcggacaaacctacctatcttcaagctaaaggagtcctgcgtacggcggcgctacagtgactttgagtggctgaaaaatgagctggagagagatagcaagattgtagtaccaccactgcctgggaaagccttgaagcggcagctccctttccgaggagatgaagggatctttgaggagtctttcatcgaagaaaggaggcagggcctcgagcagtttattaacaaaattgctgggcacccactggctcagaatgaacgctgcctacacatgttcctgcaagaggaggcaattgacaggaactacgtcccggggaagtctttctcacagtgttgtccaggctggagtgcagtggcgtga

SEQ ID NO: 184939 - DNA, 4146 bp, Homo sapiens
  Payload ID: 16413
  Gene Symbol: SNX13
  Gene Name: sorting nexin 13
  ENST ID: ENST00000409604
  CDS Start-End: 190-759
gatggcggcgcgtccgtcgcgagcgaccgggccgaggggaggccagcgaagccgagtaaaaccgccgcccgggagaagactgaaggagcagttgccgccgttggcggcggcccgagcagttttcgctgctgctacggctgttgccatgaggcgaggctagggaggacctcacttccccggggtgtaataatgttaactgaggccagtctatccatatggggatggggaagccttggcattgtcctttttctgataacctttggaccctttgtaatattttatttgacattttatatcctctgctttgtgggtgggggtttagtggttactctcctgtttggaaaaacaaactcagagaagtacctagaacagtgtgaacactcatttcttcctccaacatcacctggggttcctaagtgcttagaagaaatgaaacgggaagccaggactattaagattgatagaagattgacgggtgccaatataattgatgaacctctccagcaagttatccagttttccttgagggattatgtccagtattggtattatacactaagcgatgatgaatcttttcttcttgaaattaggcagactcttcaaaacgcactcattcagtttgctactagagtctcgccctgtcgcccaggctggagtacaatggcgcaatctcggctcactgcaacctccgcttcctggaaccctgttttgtttaacaaaaccttggtctcactgtgtctcctagaatatgtaatttaaattctggctctgaaattacagggaattgtggtagtgatttgagaaccctttcagttctaaaatagtaagattctctggtcaggttgttactaatcttgatttcttttcaatcatgtttcctcccaaaacacacactaacatactccatcacactccacattttgaataccatttggggagttatttttttttaagtatataggattgctaattagagttaatttactttgggattaaagtactcttcatatctattgttttattagtaggggtcttatagtaggataacaaaatttatttaaaccttttaatatatttctaaatgatcagaaagaatgcttgattctaaacataaaatacatttactaatctcttctcgatgattaaaacccttgtatcaatgaaataaaaagtttttgtacaaccagactattgctgttctttatagaatgctgaaaacaataaatctgtagtgttatgagtttgattttttttaagttttctgaagtgtaagttctcccaccacgttcagttttaagctatcagcatgaagtcactgaacatggaaataggaagagatgtacacaattgtttgcctactccagctcacagttggagaggatacagctaagtgaagagggggcagaggcagatttgtaaacctgaagtaatgagttgtatttccttgtgtggttgctaatttagctcctatgaaagaattccccgtatatttttgaggactatggtagggggtactcatacattaactttaagttcaggaatgtttgtgaagaaggtcaaattagtttcattattttaatcaatactgacaactaaatccttaaagtggatgataaaaggagactctggagagatggttatggtaacatgtagtatttatgactgaattgacgtaggggggattgatttagtggattcaaaatgaagcttacaattctgtgcctttacaattttacccaaattcaatttcagcctgagtttttgacaccgttaacaaagtagttcttcaaggactctgaaggatggaaacaagtaaaggattatgtatttagagtgaagagtagtatatcctttctaatagtgaattaagagggggacttagtatctgattcagagactcaggagaaggaatttttttctttcacagataagccactcagttgctttctctcaacaaaaaaaagtctgagtcagttgatcaaaaggccttctaatggagtaaaacttttctcaaaatctactcaaagttacttgtcaaaaatctacccaagaaaactaggaattctattttaatgatttttcaaaaatttctattttttttacatagaagataaagaccttttgttgaagattaatacatattattataattttatgtgattggttattatattgatcttattaacatacctttaaaaaggccaactcttaacgtgcgtgtgtgtgtgtgtgtttgtgtatgtgtatatgtatataccttttcccttgagattcctttcagttctaaaatactaagattctatggacctctgtgtgtgtgtgtgtgtgtgtgtgttgtacatatagtgtctatgtatacctacacattatgcagtatatagtatactctaccattcttactgtttttaaaaaaggtcttcgtagtcatttctctgaaaaactaatgtggcatcaggagcataacatttattataggattgttttctgtggaaaaagcagcttttacttttatcattttgacataaggcaccttttccaggaaaatattctgccatgaatgtgaagatcgcctttactgccaagcgatcaccctctcctctagtcaggcaagtctacaagatgacccttgcatatatatttatcatgctcatccccctcttctgctcattcctgtgtcctttcttctcccatataaatactgctctttcatcaagatttaagtgtagcctctttaatgaagcctctttaaattatgacatattccttaatctatagtctttgtgtgtgtggttctcgtcaacaaaattttaagctgattttgaaatggttcctattctgtgctattgcagtgaaagttctcttaactgatgtttggttagccagtgctctccattccctttgtatgctgtactgactgataaccttagcattaagactaggctctattacatctatccacttctgtttccacccttggagttgtatgcttatcaaaagtcagttgtgtgatacctggaccccacctccagaaaatctgatacaattagtctgtagtgtgacctgaatattggtgatttagaggagacagataatcaaacacgttgaaataaaagttgtatttgtttttgagcctaaatatcccagttacactttttatgataatcaggtcgtttaattaacagtcaacttagattgaagaaatatgaatatgacaaggtagtttctatgaaaaccaagtcacttgctttggaattactcgcagctggttgaagagtgtaattgaattaagtgagcgaaaggcagctatgaaatttgaaagtcttcaaggactctgcatgcagatttgttcacaaatgtctttattgccatgccattttaaagaaactggaaaccataggttttgcagtgtaggaacagttcatagttttttcaagacccaggtcatgttaataccactcagcagagccttaaccaaagaaaaagtcttattcctacacaggaagatttatataattgaacttaaagtgaaatatattcatggctccctcttttgatcgaatgtttaaatttacctactgcccaattaccagttttttatacactccatccctgtgtatgtatatgtgtggttttatgtagctaatataatcatagactcaaagatgtaatgagtgttgttagagaaaacaaactttgggaaatgatgtgacttgctgaatttcatagactggcactgatgcctttgatttgagtaaaagacccatcatttgggggagtcttttgttagaatcaaaggcatctgtgtcagtccagtgcgttttccagaaatacttgattttggtagtgttttgtgctactgatgatgagctgtacactgcttagaatagatggaacaagtgaggcaatttacaatcctaaactcaaccacatatttgggcctttacttgcctttttaagggattggcattaagtagccatgggacaaaaagagcttctcagtacatattctactttaacactttaaggagtaaggaagcaattgttgtttgtgcctcctgttgccattgtccaaacacccattgtaaacagtgctccgaccctgaaaaaggaatcaataaatcaatatgcattgagtgcctctaataa

SEQ ID NO: 184940 - DNA, 3818 bp, Homo sapiens
  Payload ID: 16413
  Gene Symbol: SNX13
  Gene Name: sorting nexin 13
  ENST ID: ENST00000409076
  CDS Start-End: 157-621
gaggggaggccagcgaagccgagtaaaaccgccgcccgggagaagactgaaggagcagttgccgccgttggcggcggcccgagcagttttcgctgctgctacggctgttgccatgaggcgaggctagggaggacctcacttccccggggtgtaataatgttaactgaggccagtctatccatatggggatggggaagccttggcattgtcctttttctgataacctttggaccctttgtaatattttatttgacattttatatcctctgctttgtgggtgggggtttagtggttactctcctgtttggaaaaacaaactcagagaagtacctagaacagtgtgaacactcatttcttcctccaacatcacctggggttcctaagtgcttagaagaaatgaaacgggaagccaggactattaagattgatagaagattgacgggtgccaatataattgatgaacctctccagcaagttatccagttttccttgagggattatgtccagtattggtattatacactaagcgatgatgaatcttttcttcttgaaattaggcagactcttcaaaacgcactcattcagtttgctactagatgctggggatacagcagtgaataaaacaaagtccctgctcagtggagtgaaatgaaatacctgtgacagtgttttgaaaattgtgaaggaatttagaaatttaagtttttatgccatccaacacccataattttactgatgaggaagctaaggtccagaaaggtcaaaagaaatagactggcaaccttattttactacacgcattgtagatgactttggcacacacttacgagtattcagaaaggctcaacagaaaataacagagaaagatgatcaagtgaaaggtacagcagaagatcttgtagataccttctttgaagttgaagttgaaatggagaaggaggtttgccgtgatctagtgtgcacttcccccaaagatgaagaaggattcctaagggatttgtgtgaggtcttactatatttattgctacctcctggagatttccagaacaagatcatgcgatactttgtcagggaaatccttgcacgaggaattcttcttccattaataaatcaactcagtgatcctgattatattaatcagtatgtcatatggatgatccgtgattctaactgcaactatgaggcctttatgaacattattaaattgagtgacaatattggagagctagaagcagtcagagataaggcagcagaagaattacagtatcttagatctctagatacagctggtgatgatatcaacactatcaaaaatcaaataaatagcttactattcgtaaagaaggtatgtgactcaagaatacagcgattgcagtcaggcaaagaaataaatactgtgaaacttgcagcaaactttgggaaactttgcacagtccccctggacagcattcttgtagacaatgttgcactacaattttttatggattacatgcagcaaactggaggtcaagcacatctattcttttggatgacagtggaaggataccgggttaccgcccaacagcagctagaagttttattaagtcgtcagagagatggaaaacatcaaaccaaccaaaccaaaggtcttttaagagcagctgctgttggaatttatgaacagtatttatcagaaaaggcatctccaagagttactgttgatgactatttagtagcaaaattagcagatactttgaatcatgaagatccaacccctgaaatctttgatgacattcaaagaaaggtatatgaattgatgctacgagatgaaagattttatccttccttcagacagaatgcactttatgtgcgcatgttagctgagcttgacatgttaaaagatcctagtttcagaggatccgatgatggggatggagaatcttttaatgggtctcctacaggaagcataaatttgtctttagatgacctttcaaatgtttcttctgatgactcagtacaacttcatgcctacatttcagacacaggcgtttgtaatgatcatggcaagacatatgcattatatgccatcactgtacaccggcgcaacctaaacagtgaggagatgtggaaaacctatcgtcgttatagtgacttccatgacttccacatgagaatcactgaacagtttgaaagtctctcaagcatattgaaacttcctggaaaaaagacttttaataatatggatagagattttttagaaaagagaaaaaaggatctaaatgcatatttgcagttactgttagctcctgaaatgatgaaggcatcccccgctttagctcactatgtgtatgatttccttgagaacaaagcctacagtaaaggaaaaggggattttgctcgcaagatggacacttttgtaaatccacttcgcaattcaatgaggaatgtttcaaatgcagttaaatcccttcctgatagcttggcagagggaatgactaaaatgtcagacaacatgggcaaaatgtcagaaagattaggtcaagacataaagcaatcattttttaaggtgcctcctttaattcctaagactgattcagaccctgaacatcgccgagtttcggctcaacttgacgataatgtggatgacaatattccacttagggtaatgctgcttctcatggatgaagtattcgacttaaaagaaagaaatcagtggttgcgaaggaatatcaaaaacctacttcaacagcttattagagctacatatggcgatactattaatagaaaaatagttgaccatgttgactggatgacttcacctgaacaagtagccgactcagtgaaacgtttcagagatgcattttggccaaatggcattttagcagaggctgttccatgcagagataaaagtattcgaatgagaacaagagtagcaggaaaaacgaaattacttgcaattatgccagatgagctgaagcacattattggggctgagacaacacggaaaggtattcttcgtgtttttgaaatgtttcagcacaaccaattaaataggagaatggtttatgtcttcttggaaggctttttagaaaccttatttccacagtataaattccgtgaacttttcaacaaactgcattcacggtcaaagcagatgcagaaatataaacagaaacttcaaactactcaagcgccttctttgcagaaaaggtgacactccactctatgaagctggtgttcattttgtccaggactaatggtatggacagatcttctggggcttaactcaaatactgttgtgtctgcaccagtcttttagtgtctcaaaatagattattaatacatccataagtctgtggttcttctcattctcatctataatccaccactaccaagagagatttctgtgtcttaaatgatttggtgcatattttgcaacattgagagaaaactgcccccatctcaagcaagaatggcgttggtttcttccatttcaaactaatcagcattctccagcaatgacaaagtgccagagtgtatatatgaaagctaaggaaagcacaaaacaatggttcagagataaattggctaatttgtttaacagttggagactgtgcaatgtacgacttggaggagtttgtttggcataatgattttgtaggtctgtcagcattttgatatattgtggattagccaggtgaatgatccttgaaacatctctttcaggtctggagaaagagacagaatgcccttaaagtgtgaaataaccttatacctgaattacagttttgtgatataaaataaagctgagtataaaataaaaccaatcaaacacagaa

SEQ ID NO: 184941 - DNA, 2018 bp, Homo sapiens
  Payload ID: 16413
  Gene Symbol: SNX13
  Gene Name: sorting nexin 13
  ENST ID: ENST00000444712
  CDS Start-End: 207-338
ggacgtcgctcttccaagatggcggcgcgtccgtcgcgagcgaccgggccgaggggaggccagcgaagccgagtaaaaccgccgcccgggagaagactgaaggagcagttgccgccgttggcggcggcccgagcagttttcgctgctgctacggctgttgccatgaggcgaggctagggaggacctcacttccccggggtgtaataatgttaactgaggccagtctatccatatggggatggggaagccttggcattgtcctttttctgataacctttggaccctttgtaatattttatttgacattttatatcctctgctttgtgggtggtgcttagaagaaatgaaacgggaagccaggactattaagattgatagaagattgacgggtgccaatataattgatgaacctctccagcaagttatccagttttccttgagggattatgtccagtattggtattatacactaagcgatgatgaatcttttcttcttgaaattaggcagactcttcaaaacgcactcattcagtttgctactaggtcaaaagaaatagactggcaaccttattttactacacgcattgtagatgactttggcacacacttacgagtattcagaaaggctcaacagaaaataacagagaaagatgatcaagtgaaaggtacagcagaagatcttgtagataccttctttgaagttgaagttgaaatggagaaggaggtttgccgtgatctagtgtgcacttcccccaaagatgaagaaggattcctaagggatttgtgtgaggtcttactatatttattgctacctcctggagatttccagaacaagatcatgcgatactttgtcagggaaatccttgcacgaggaattcttcttccattaataaatcaactcagtgatcctgattatattaatcagtatgtcatatggatgatccgtgattctaactgcaactatgaggcctttatgaacattattaaattgagtgacaatattggagagctagaagcagtcagagataaggcagcagaagaattacagtatcttagatctctagatacagctggtgatgatatcaacactatcaaaaatcaaataaatagcttactattcgtaaagaaggtatgtgactcaagaatacagcgattgcagtcaggcaaagaaataaatactgtgaaacttgcagcaaactttgggaaactttgcacagtccccctggacagcattcttgtagacaatgttgcactacaattttttatggattacatgcagcaaactggaggtcaagcacatctattcttttggatgacagtggaaggataccgggttaccgcccaacagcagctagaagttttattaagtcgtcagagagatggaaaacatcaaaccaaccaaaccaaaggtcttttaagagcagctgctgttggaatttatgaacagtatttatcagaaaaggcatctccaagagttactgttgatgactatttagtagcaaaattagcagatactttgaatcatgaagatccaacccctgaaatctttgatgacattcaaagaaaggtatatgaattgatgctacgagatgaaagattttatccttccttcagacagaatgcactttatgtgcgcatgttagctgagcttgacatgttaaaagatcctagtttcagaggatccgatgatggggatggagaatcttttaatgggtctcctacaggaagcataaatttgtctttagatgacctttcaaatgtttcttctgatgactcagtacaacttcatgcctacatttcagacacaggcgtttgtaatgatcatggcaagacatatgcattatatgccatcactgtacaccggcgcaacctaaacagtgaggagatgtggaaaacctatcgtcgttatagtgacttccatgacttccacatgagaatcactgaacagtttgaaagtctctcaagcatattgaaacttcctggaaaaaagacttttaataatatggatagagattttt

SEQ ID NO: 184942 - DNA, 6357 bp, Homo sapiens
  Payload ID: 16413
  Gene Symbol: SNX13
  Gene Name: sorting nexin 13
  Uniprot ID: Q9Y5W8
  ENST ID: ENST00000428135
  CDS Start-End: 200-3073
gctcttccaagatggcggcgcgtccgtcgcgagcgaccgggccgaggggaggccagcgaagccgagtaaaaccgccgcccgggagaagactgaaggagcagttgccgccgttggcggcggcccgagcagttttcgctgctgctacggctgttgccatgaggcgaggctagggaggacctcacttccccggggtgtaataatgttaactgaggccagtctatccatatggggatggggaagccttggcattgtcctttttctgataacctttggaccctttgtaatattttatttgacattttatatcctctgctttgtgggtgggggtttagtggttactctcctgtttggaaaaacaaactcagagaagtacctagaacagtgtgaacactcatttcttcctccaacatcacctggggttcctaagtgcttagaagaaatgaaacgggaagccaggactattaagattgatagaagattgacgggtgccaatataattgatgaacctctccagcaagttatccagttttccttgagggattatgtccagtattggtattatacactaagcgatgatgaatcttttcttcttgaaattaggcagactcttcaaaacgcactcattcagtttgctactaggtcaaaagaaatagactggcaaccttattttactacacgcattgtagatgactttggcacacacttacgagtattcagaaaggctcaacagaaaataacagagaaagatgatcaagtgaaaggtacagcagaagatcttgtagataccttctttgaagttgaagttgaaatggagaaggaggtttgccgtgatctagtgtgcacttcccccaaagatgaagaaggattcctaagggatttgtgtgaggtcttactatatttattgctacctcctggagatttccagaacaagatcatgcgatactttgtcagggaaatccttgcacgaggaattcttcttccattaataaatcaactcagtgatcctgattatattaatcagtatgtcatatggatgatccgtgattctaactgcaactatgaggcctttatgaacattattaaattgagtgacaatattggagagctagaagcagtcagagataaggcagcagaagaattacagtatcttagatctctagatacagctggtgatgatatcaacactatcaaaaatcaaataaatagcttactattcgtaaagaaggtatgtgactcaagaatacagcgattgcagtcaggcaaagaaataaatactgtgaaacttgcagcaaactttgggaaactttgcacagtccccctggacagcattcttgtagacaatgttgcactacaattttttatggattacatgcagcaaactggaggtcaagcacatctattcttttggatgacagtggaaggataccgggttaccgcccaacagcagctagaagttttattaagtcgtcagagagatggaaaacatcaaaccaaccaaaccaaaggtcttttaagagcagctgctgttggaatttatgaacagtatttatcagaaaaggcatctccaagagttactgttgatgactatttagtagcaaaattagcagatactttgaatcatgaagatccaacccctgaaatctttgatgacattcaaagaaaggtatatgaattgatgctacgagatgaaagattttatccttccttcagacagaatgcactttatgtgcgcatgttagctgagcttgacatgttaaaagatcctagtttcagaggatccgatgatggggatggagaatcttttaatgggtctcctacaggaagcataaatttgtctttagatgacctttcaaatgtttcttctgatgactcagtacaacttcatgcctacatttcagacacaggcgtttgtaatgatcatggcaagacatatgcattatatgccatcactgtacaccggcgcaacctaaacagtgaggagatgtggaaaacctatcgtcgttatagtgacttccatgacttccacatgagaatcactgaacagtttgaaagtctctcaagcatattgaaacttcctggaaaaaagacttttaataatatggatagagattttttagaaaagagaaaaaaggatctaaatgcatatttgcagttactgttagctcctgaaatgatgaaggcatcccccgctttagctcactatgtgtatgatttccttgagaacaaagcctacagtaaaggaaaaggggattttgctcgcaagatggacacttttgtaaatccacttcgcaattcaatgaggaatgtttcaaatgcagttaaatcccttcctgatagcttggcagagggaatgactaaaatgtcagacaacatgggcaaaatgtcagaaagattaggtcaagacataaagcaatcattttttaaggtgcctcctttaattcctaagactgattcagaccctgaacatcgccgagtttcggctcaacttgacgataatgtggatgacaatattccacttagggtaatgctgcttctcatggatgaagtattcgacttaaaagaaagaaatcagtggttgcgaaggaatatcaaaaacctacttcaacagcttattagagctacatatggcgatactattaatagaaaaatagttgaccatgttgactggatgacttcacctgaacaagtagccgactcagtgaaacgtttcagagatgcattttggccaaatggcattttagcagaggctgttccatgcagagataaaagtattcgaatgagaacaagagtagcaggaaaaacgaaattacttgcaattatgccagatgagctgaagcacattattggggctgagacaacacggaaaggtattcttcgtgtttttgaaatgtttcagcacaaccaattaaataggagaatggtttatgtcttcttggaaggctttttagaaaccttatttccacagtataaattccgtgaacttttcaacaaactgcattcacggtcaaagcagatgcagaaatataaacagaaacttcaaactactcaagcgccttctttgcagaaaaggtgacactccactctatgaagctggtgttcattttgtccaggactaatggtatggacagatcttctggggcttaactcaaatactgttgtgtctgcaccagtcttttagtgtctcaaaatagattattaatacatccataagtctgtggttcttctcattctcatctataatccaccactaccaagagagatttctgtgtcttaaatgatttggtgcatattttgcaacattgagagaaaactgcccccatctcaagcaagaatggcgttggtttcttccatttcaaactaatcagcattctccagcaatgacaaagtgccagagtgtatatatgaaagctaaggaaagcacaaaacaatggttcagagataaattggctaatttgtttaacagttggagactgtgcaatgtacgacttggaggagtttgtttggcataatgattttgtaggtctgtcagcattttgatatattgtggattagccaggtgaatgatccttgaaacatctctttcaggtctggagaaagagacagaatgcccttaaagtgtgaaataaccttatacctgaattacagttttgtgatataaaataaagctgagtataaaataaaaccaatcaaacacagaatttgattggatttgttattcattggtatacaacaatttttattcttatgtgtgctttaagggctgtgttttgctcttagggtactcaattttatgtttccttttggcattctttgtgcaaaaagaagcatgtggtggctctcatttaaatttcaaaattattagttttatctttaacagattactgattatacagaagatataatttattggaagaactgccaaatacattttgtccttctaaaaatatggaaatttaaatagtagtctggaaagttaccatatgataatttttaattgtgtgatctagacatgccttaggtaactgcagaaatagcaaattaaatgattaatgagcttattagtcatagtaaacatacagattcctaattctatgacagtgtacatatatgaaaataaatgatgaaaaaagaactataatatttttaaaaatatgcttttatttatatttcacataatgtaaagttctacaaaataaagctagtaggcaagacccctcagtgtatacctttaaacccataaattaattttatatcaataaaataaaatactttctctagttttggagcttctgtatttcctatagttttctgactgtccattttatccatcttagaagtattcacatcccttctatgcaggatttctgcatagttttaaatactttcattgcctaagggtttgggtgtgtcagctttttttgttttaaaaatatttaacactaaaaccttaaaataatgaagctacttatcagaccactgagccaagatcctggtattaaaagaaagtctgggtgcttaagataaagggacagagtattggtatcccagttatttgggagctttaagattggaacaagatatcactgtcttgttttcacttagatcctacttacaaagtgagggttattaacagaataaagccttcctttaaagctttataataatcatatttattaataatgctgttgtgcatacttatagtatgcatatattcagcatatgttgcatgtcttcagaattacataaaatgaaatccctttcattgcaacttgcaagtgagaaaagatccttagtggctctggtggaagaaatagtatttcttcttctcagggtgtctccctgccttggcccctccctgagccccaggctttaaaagtgaaaatgtttgaaacatgaaacatgtctgtaggaagcatcagcatggccataagtgcagtgattttcatatatgcctctgcccatttcaaatatatttttgacatgaataaatctaacagtatacagaataattcatgtaagaccctaacgtgtacatgtgaaaaagcatttctatataatgtgaggagcactggccatcaattagggaaataaaggtcatgtaatattgcaaattttcaaaatagagccctgcaagataactgcaatcataccaaaaactatttgagtaaatggatttttaaagtaatttttgtttagaagagtttatatttcagaagcagaaaatgtcaaatgatagtctttgtaaatggtggtgcaccttctctatgcacatctgtcttttacatcagaaagagctgtggtcatgctaaaattagagataactttttgaatgacttggtcaagctgtgtgtaaaatatttaaccataagtcaagtacagtgtactatgtttaataaagttacatttaatgcatttattgcatatatgaatatatacatgaagaggctttatgtcttctggtatttgattttgaatgttttttaagtcagtggtgcctttaggcaagaactttcgaaattaatcattctttgtgttttctgatttttcaggtaacatgtacactatttagaaaccatcatagtttattcaccttaaaaaattgattgtattatttaaatatatcacttagatgggcatttcctataattaggatattccaaatagttgctgaaatcaattgtgccattgaccaatggatgcacttggttagccttaatttttttaaaaaaaaaaaaaacaaaaactttcttgaatatttcagtttgttcattttaagtttgtgctgctggtatttgggaagaaaaatcaatcagttaagtgctaccagaaagtgtaccaatttttataaaaattaagaatgatataaatttcacaatctaaaattttaattttgtgcaatattttcatttaatgcatgtgtatttgagtaattgtaagataaatgaatttttaattttttgagatgtagcttaaactgtcttcttaatccaacaacttacattccgttgttgctgcatccttttatttaaggacttgttttaaaagtctttttgtcactccttggaaaattcttttattagtagtaaattttgcttttaggagcatggctcctgtattacaagggaaaaaatatgaagagcacattttaggattataattgttaaaagataatgtgtgcatatcattgtacagtaagtgtcaactgtgtgcctaactgttctatcaatactttctttctttaacaaagaagaaacaacaatcagaatgtcagttatttttattcaactaaaaggattaaaaaatttatttggtttgtgttctgtccattagaaaatactaataaagtattaacaaaca

SEQ ID NO: 184943 - DNA, 6817 bp, Homo sapiens
  Payload ID: 16413
  Gene Symbol: SNX13
  Gene Name: sorting nexin 13
  ENST ID: ENST00000611725
  CDS Start-End: 174-2840
tcgcgagcgaccgggccgaggggaggccagcgaagccgagtaaaaccgccgcccgggagaagactgaaggagcagttgccgccgttggcggcggcccgagcagttttcgctgctgctacggctgttgccatgaggcgaggctagggaggacctcacttccccggggtgtaataatgttaactgaggccagtctatccatatggggatggggaagccttggcattgtcctttttctgataacctttggaccctttgtaatattttatttgacattttatatcctctgctttgtgggtgggggtttagtggttactctcctgtttggaaaaacaaactcagagaagtacctagaacagtgtgaacactcatttcttcctccaacatcacctggggttcctaagtgcttagaagaaatgaaacgggaagccaggactattaagattgatagaagattgacgggtgccaatataattgatgaacctctccagcaagttatccagttttccttgagggattatgtccagtattggtattatacactaagcgatgatgaatcttttcttcttgaaattaggcagactcttcaaaacgcactcattcagtttgctactaggtcaaaagaaatagactggcaaccttattttactacacgcattgtagatgactttggcacacacttacgagtattcagaaaggctcaacagaaaataacagagaaagatgatcaagtgaaaggtacagcagaagatcttgtagataccttctttgaagttgaagttgaaatggagaaggaggtttgccgtgatctagtgtgcacttcccccaaagatgaagaaggattcctaagggatttgtgtgaggtcttactatatttattgctacctcctggagatttccagaacaagatcatgcgatactttgtcagggaaatccttgcacgaggaattcttcttccattaataaatcaactcagtgatcctgattatattaatcagtatgtcatatggatgatccgtgattctaactgcaactatgaggcctttatgaacattattaaattgagtgacaatattggagagctagaagcagtcagagataaggcagcagaagaattacagtatcttagatctctagatacagctggtgatgatatcaacactatcaaaaatcaaataaatagcttactattcgtaaagaaggtatgtgactcaagaatacagcgattgcagtcaggcaaagaaataaatactgtgaaacttgcagcaaactttgggaaactttgcacagtccccctggacagcattcttgtagacaatgttgcactacaattttttatggattacatgcagcaaactggaggtcaagcacatctattcttttggatgacagtggaaggataccgggttaccgcccaacagcagctagaagttttattaagtcgtcagagagatggaaaacatcaaaccaaccaaaccaaaggtcttttaagagcagctgctgttggaatttatgaacagtatttatcagaaaaggcatctccaagagttactgttgatgactatttagtagcaaaattagcagatactttgaatcatgaagatccaacccctgaaatctttgatgacattcaaagaaaggtatatgaattgatgctacgagatgaaagattttatccttccttcagacagaatgcactttatgtgcgcatgttagctgagcttgacatgttaaaagatcctagtttcagaggatccgatgatggggatggagaatcttttaatgggtctcctacaggaagcataaatttgtctttagatgacctttcaaatgtttcttctgatgactcagtacaacttcatgcctacatttcagacacagtatatgctgactatgacccatatgctgtggcaggcgtttgtaatgatcatggcaagacatatgcattatatgccatcactgtacaccggcgcaacctaaacagtgaggagatgtggaaaacctatcgtcgttatagtgacttccatgacttccacatgagaatcactgaacagtttgaaagtctctcaagcatattgaaacttcctggaaaaaagacttttaataatatggatagagattttttagaaaagagaaaaaaggatctaaatgcatatttgcagttactgttagctcctgaaatgatgaaggcatcccccgctttagctcactatgtgtatgatttccttgagaacaaagcctacagtaaaggaaaaggggattttgctcgcaagatggacacttttgtaaatccacttcgcaattcaatgaggaatgtttcaaatgcagttaaatcccttcctgatagcttggcagagggaatgactaaaatgtcagacaacatgggcaaaatgtcagaaagattaggtcaagacataaagcaatcattttttaaggtgcctcctttaattcctaagactgattcagaccctgaacatcgccgagtttcggctcaacttgacgataatgtggatgacaatattccacttagggtaatgctgcttctcatggatgaagtattcgacttaaaagaaagaaatcagtggttgcgaaggaatatcaaaaacctacttcaacagcttattagagctacatatggcgatactattaatagaaaaatagttgaccatgttgactggatgacttcacctgaacaagtagccgactcagtgaaacgtttcagagatgcattttggccaaatggcattttagcagaggctgttccatgcagagataaaagtattcgaatgagaacaagagtagcaggaaaaacgaaattacttgcaattatgccaggtgagtgagcatgtatagttaaaaatctttataatttgtcattcttctgagtttttagcattcatcatgccagtgtaactgccttttgattataacaactaccttttgatggcttaatacatatcaggcactgtactaggcatttctcatatgttcttaatcagtcctcatgacagtactgtaaagctaaggactgttaacatcaccgctttatatgtgaggaaacggaagctcagagaggttaaataacctatccaaggtttatagctactaagcaacagttggtattctgacttggctttaagtgatgtgaaagcttatgcttttagccacttcgctctgctgccttgaaacatattgggagttaagttaaataaataaaatacatgacaggtgaaagggctaataaaatataaagtatgaatttttcaggaagaatatttgttgtacttaggaaaacaagttatttcaaaaactccatttacatagaaagaactgattggctgattattaatctttattacttaaaatacaatcccaaacaaagtatacttagtagcattttgttggtctgattttggttgcttcattagggtatagctatctcactaccttagatttactttttctcgtttttcttctttcaatcagagaagttatataatgtaaaaagcaatttaatgcggctgggaggtggtgatggttgttttgccccttgttaatgagtatctttgaaaatgcctgcatgtcttttctctgtattttaattctggatgtagagaatgaacagacatatttgtacattctttaatatcacacaataccaatttttttctctaattttgttttcttacctgtattttctctataaattttaatgaccagccttctcttctgtcaattaaattaaaaatttgccacaattttaattcttacctatataccgtttcatttgctgataaaaaagcaaattatagaaatgacattttagaaaaataagaaacaattgcttaggatattatttaatatactattatagtaaacctgattgtgctatatggactgactcagttatctagctggaagaaatctttattcactaaatatttattgaaagttattatgtgccaggtgctgttctttgcacttatgtttgccttcttggagcttactttccagtagaaatagagagactcaaaaacacacagaacaaataaatggaacgtagtttgttagataagtggtaagtactaaagagaaagatactgcaggaaaatggaatagatagtgtcagatgagttgcagttttagatggggtggccagggcaggcctcactgagatgatgatggtggtgtgaagatctgaaggaagtgagggtaaatatgaaagcatataaatttatatatacataatccttgcctattttttagtaaattctcaaaatttttgctttaaattatatcttacccctagttagataaagactttttggaaattgcatgtttctttccaaagcagcaaaataatatctatattatcagtattatgaataattatttgtaattatgaataagaatatgaataattaataatcatacatgttggtctcataacttggtgttatttatgattaaacaccaaatttgctcactcttagtcacagcaccatcggttttctattttctttgctttcttcactttgaatttaaataaaattcaacccaacttgtactatccctatttcttgagcatgctttgttattctagttactgcttatttgctcattcatgttcttttcaccaaggctaatccttcatctcattgcacctatcaaaatcctgcccaagtagaaagtctcctttacctgccacttccttaaagggaacttttctttgttatcgcatctgaaagtctccccactaccaatattcttatacttttagcatttttatggtatagttactatgccaggggtttttgtagatcagggattaatttttttttttcctgtgttccaatgaaactttattcaccatcatggattagtttgtttccttacagcatttgtcactattcattaggcctactaagaatatttgtataatattacaaagtttacagatcactttttacattatttcattaaagacttataaatccttataaggatgttattataaatcctccttttcagatgagaaaagagagtcagggtggtgggtaagtatcacatgggtattaagggacatgtttgtaatcatagtttgggatctttgagactgttttttattttttatctcttacacctgtgctatattgtctcccagtagcttttgcattaagtgcgtaaatagatgcatgcatgcaaagatgcatattaagtttcagctatagtacatagctgaaatgcattaactggttacctactgttcatcagttactctgctgtgtaccttaatttaagaacatttaagagtttaggccttgtgtttcctttgaataattatgtgtgttttcctccacttcatttagatgagctgaagcacattattggggctgagacaacacggaaaggtattcttcgtgtttttgaaatgtttcagcacaaccaattaaataggagaatggtttatgtcttcttggaaggctttttagaaaccttatttccacagtataaattccgtgaacttttcaacaaactgcattcacggtcaaagcagatgcagaaatataaacagaaacttcaaactactcaagcgccttctttgcagaaaaggtgacactccactctatgaagctggtgttcattttgtccaggactaatggtatggacagatcttctggggcttaactcaaatactgttgtgtctgcaccagtcttttagtgtctcaaaatagattattaatacatccataagtctgtggttcttctcattctcatctataatccaccactaccaagagagatttctgtgtcttaaatgatttggtgcatattttgcaacattgagagaaaactgcccccatctcaagcaagaatggcgttggtttcttccatttcaaactaatcagcattctccagcaatgacaaagtgccagagtgtatatatgaaagctaaggaaagcacaaaacaatggttcagagataaattggctaatttgtttaacagttggagactgtgcaatgtacgacttggaggagtttgtttggcataatgattttgtaggtctgtcagcattttgatatattgtggattagccaggtgaatgatccttgaaacatctctttcaggtctggagaaagagacagaatgcccttaaagtgtgaaataaccttatacctgaattacagttttgtgatataaaataaagctgagtataaaataaaaccaatcaaacacagaatttgattggatttgttattcattggtatacaacaatttttattcttatgtgtgctttaagggctgtgttttgctcttagggtactcaattttatgtttccttttggcattctttgtgcaaaaagaagcatgtggtggctctcatttaaatttcaaaattattagttttatctttaacagattactgattatacagaagatataatttattggaagaactgccaaatacattttgtccttctaaaaatatggaaatttaaatagtagtctggaaagttaccatatgataatttttaattgtgtgatctagacatgccttaggtaactgcagaaatagcaaattaaatgattaatgagcttattagtcatagtaaacatacagattcctaattctatgacagtgtacatatatgaaaataaatgatgaaaaaagaactataatatttttaaaaatatgcttttatttatatttcacataatgtaaagttctacaaaataaagctagtaggcaagacccctcagtgtatacctttaaacccataaattaattttatatcaataaaataaaatactttctct

SEQ ID NO: 184944 - DNA, 3348 bp, Homo sapiens
  Payload ID: 16414
  Gene Symbol: SNX14
  Gene Name: sorting nexin 14
  Uniprot ID: Q9Y5W7
  ENST ID: ENST00000346348
  CDS Start-End: 196-2877
ccgcggccgcgcacgcgcggcggggggcgtggggctgggcccagccggacgcgacctcagcctgcggcggctaactgccggtaggcgtctgtgtgcgccgccaagtcggtggggcggggacgcgaggtgtggatggggggtcgccttgacctctgcctcagccagtagcgcagtctcggcctcgccgttacggagatggtgccctgggtgcggacgatggggcagaagctgaagcagcggctgcgactggacgtgggacgcgagatctgccgccagtacccgctgttctgcttcctgctgctctgtctcagcgccgcctccctgcttcttaacaggtatattcatattttaatgatcttctggtcatttgttgctggagttgtcacattctactgctcactaggacctgattctctcttaccaaatatattcttcacaataaaatacaaacccaagcagttaggacttcaggaattatttcctcaaggtcatagctgtgctgtttgtggtaaagtgaaatgtaaacgacataggccttctttgctacttgaaaactaccagccatggctagacctgaaaatttcttccaaggttgatgcatctctctcagaggtggatattccatctattataaccaagaaactattaaaagcagcaatgaagcatatagaagtgatagttaaagccagacagaaagtaaaaaatacagagtttttacagcaagctgctttagaagaatatggtccagagcttcatgttgctttgagaagtcgaagagatgaattgcactatttaaggaaacttactgaactgctttttccttatattttgcctcctaaagcaacagactgcagatctctgaccttacttataagagagattctgtctggctctgtgttccttccttctttggatttcctagctgatccagatactgtgaatcatttgcttatcatcttcatagatgacagtccacctgaaaaagcaactgaaccggcttctcctttggttccattcttgcagaaatttgcagaacctagaaataaaaagccatctgtgctgaagttagaattgaagcaaatcagagagcaacaagatcttttatttcgttttatgaactttctgaaacaagaaggcgcagtgcacgtgttgcagttttgtttgactgtggaggaatttaatgatagaattttacgaccagaattatcaaatgatgaaatgctgtctcttcatgaagaattgcagaagatttataaaacatactgtttggatgaaagtattgacaaaattagatttgatcccttcattgtagaagagattcaaagaattgctgaaggcccatacatagatgttgtgaaacttcaaactatgagatgtctttttgaagcatatgaacatgttctttcccttttggagaatgtatttactcctatgttctgccatagtgatgagtatttcagacaacttttaagaggtgcagaatcaccaacacgcaattcaaaattgaacaggaacacacagaaaaggggagaatcatttggaatcagcagaataggtagcaaaattaaaggagtattcaaaagtaccacaatggagggagctatgttgcctaattatggtgtagctgaaggtgaagatgattttattgaagaaggtattgttgtaatggaagatgattctccagtggaggctgtgagcacacctaatactccccgaaaccttgctgcatggaaaattagcattccatatgtagacttttttgaggatccctcctctgaaaggaaggagaaaaaagaaagaattcctgtgttttgtattgatgttgaaagaaatgatagaagagcagttggacacgagcctgaacattggtctgtctatagaagatatcttgaattctatgtacttgaatcaaaactaacagaatttcatggtgcatttcctgatgcccagcttccttctaagaggatcattggccccaaaaattatgaattcttaaagtcaaagagggaagagttccaagaatatctacagaaacttctgcagcatccagaactgagtaatagtcaacttctggcagactttctttcccctaatggtggggaaacacaatttcttgataagatactaccagatgtaaatcttgggaaaattataaaatctgttcctggaaaactaatgaaagagaaaggtcagcatttggaaccttttatcatgaatttcattaattcttgtgagtctccaaagcctaaaccaagtagaccagaactgaccattctcagccctacttcagaaaacaacaagaagcttttcaatgatctgtttaaaaataatgcaaaccgtgctgaaaatacagagagaaagcaaaatcagaattattttatggaggtgatgactgtagaaggagtctatgattacctgatgtatgtaggacgggtagttttccaggttcctgactggcttcatcatctcttaatgggaactcgaatcctctttaaaaacaccctggaaatgtatactgattactatcttcagtgtaaactagaacagctatttcaggagcaccgtttggtctcactcataacacttctcagagatgctatattctgtgaaaacactgaacctcgctctctccaagataagcaaaaaggagcaaaacagacttttgaagaaatgatgaattacattccagatctgttagtcaagtgtattggtgaagaaaccaagtatgaaagcatcagacttctgtttgatggcttacagcaaccagtactcaacaagcagctgacttatgttttattggacattgtgatacaggaactgtttccagagctcaataaggtacaaaaggaagttacctctgtgacatcttggatgtaaacacttggatttggtatagaataacccattgaaatttctgctgtgcgagggtggtagaaatttacttttttgggtatattcttatatatattatgtacatcgctgtctgaaattttagttattttttgtttttaataaagactaacacaaacttaatgattaaaagtgattgagtctcatagtctttcatttgctagctgtgatccaaattttattagaacataagtcacttgttattgccatttttaaaagagaaaattcataatgatgttatggcaaacagataagactgataaacttcgtattgtatagctttgaaaataattatgcctagtatggagaaacaggaataagatctgattttcttagagttaatatattttagtagattggttttccttttttttattttgtacatagttaactgtgtatctataaataaagcatcctatatgagtttttaataataaa

SEQ ID NO: 184945 - DNA, 3486 bp, Homo sapiens
  Payload ID: 16414
  Gene Symbol: SNX14
  Gene Name: sorting nexin 14
  Uniprot ID: Q9Y5W7
  ENST ID: ENST00000314673
  CDS Start-End: 178-3018
ggcggggggcgtggggctgggcccagccggacgcgacctcagcctgcggcggctaactgccggtaggcgtctgtgtgcgccgccaagtcggtggggcggggacgcgaggtgtggatggggggtcgccttgacctctgcctcagccagtagcgcagtctcggcctcgccgttacggagatggtgccctgggtgcggacgatggggcagaagctgaagcagcggctgcgactggacgtgggacgcgagatctgccgccagtacccgctgttctgcttcctgctgctctgtctcagcgccgcctccctgcttcttaacaggtatattcatattttaatgatcttctggtcatttgttgctggagttgtcacattctactgctcactaggacctgattctctcttaccaaatatattcttcacaataaaatacaaacccaagcagttaggacttcaggaattatttcctcaaggtcatagctgtgctgtttgtggtaaagtgaaatgtaaacgacataggccttctttgctacttgaaaactaccagccatggctagacctgaaaatttcttccaaggttgatgcatctctctcagaggttcttgaattagtgttggaaaactttgtttatccgtggtacagggatgtgacagatgatgaatcctttgttgatgaactgagaataacattacgtttttttgcatctgtcttaataagaaggattcacaaggtggatattccatctattataaccaagaaactattaaaagcagcaatgaagcatatagaagtgatagttaaagccagacagaaagtaaaaaatacagagtttttacagcaagctgctttagaagaatatggtccagagcttcatgttgctttgagaagtcgaagagatgaattgcactatttaaggaaacttactgaactgctttttccttatattttgcctcctaaagcaacagactgcagatctctgaccttacttataagagagattctgtctggctctgtgttccttccttctttggatttcctagctgatccagatactgtgaatcatttgcttatcatcttcatagatgacagtccacctgaaaaagcaactgaaccggcttctcctttggttccattcttgcagaaatttgcagaacctagaaataaaaagccatctgtgctgaagttagaattgaagcaaatcagagagcaacaagatcttttatttcgttttatgaactttctgaaacaagaaggcgcagtgcacgtgttgcagttttgtttgactgtggaggaatttaatgatagaattttacgaccagaattatcaaatgatgaaatgctgtctcttcatgaagaattgcagaagatttataaaacatactgtttggatgaaagtattgacaaaattagatttgatcccttcattgtagaagagattcaaagaattgctgaaggcccatacatagatgttgtgaaacttcaaactatgagatgtctttttgaagcatatgaacatgttctttcccttttggagaatgtatttactcctatgttctgccatagtgatgagtatttcagacaacttttaagaggtgcagaatcaccaacacgcaattcaaaattgaacagaggtagcctaagtttggatgattttcggaacacacagaaaaggggagaatcatttggaatcagcagaataggtagcaaaattaaaggagtattcaaaagtaccacaatggagggagctatgttgcctaattatggtgtagctgaaggtgaagatgattttattgaagaaggtattgttgtaatggaagatgattctccagtggaggctgtgagcacacctaatactccccgaaaccttgctgcatggaaaattagcattccatatgtagacttttttgaggatccctcctctgaaaggaaggagaaaaaagaaagaattcctgtgttttgtattgatgttgaaagaaatgatagaagagcagttggacacgagcctgaacattggtctgtctatagaagatatcttgaattctatgtacttgaatcaaaactaacagaatttcatggtgcatttcctgatgcccagcttccttctaagaggatcattggccccaaaaattatgaattcttaaagtcaaagagggaagagttccaagaatatctacagaaacttctgcagcatccagaactgagtaatagtcaacttctggcagactttctttcccctaatggtggggaaacacaatttcttgataagatactaccagatgtaaatcttgggaaaattataaaatctgttcctggaaaactaatgaaagagaaaggtcagcatttggaaccttttatcatgaatttcattaattcttgtgagtctccaaagcctaaaccaagtagaccagaactgaccattctcagccctacttcagaaaacaacaagaagcttttcaatgatctgtttaaaaataatgcaaaccgtgctgaaaatacagagagaaagcaaaatcagaattattttatggaggtgatgactgtagaaggagtctatgattacctgatgtatgtaggacgggtagttttccaggttcctgactggcttcatcatctcttaatgggaactcgaatcctctttaaaaacaccctggaaatgtatactgattactatcttcagtgtaaactagaacagctatttcaggagcaccgtttggtctcactcataacacttctcagagatgctatattctgtgaaaacactgaacctcgctctctccaagataagcaaaaaggagcaaaacagacttttgaagaaatgatgaattacattccagatctgttagtcaagtgtattggtgaagaaaccaagtatgaaagcatcagacttctgtttgatggcttacagcaaccagtactcaacaagcagctgacttatgttttattggacattgtgatacaggaactgtttccagagctcaataaggtacaaaaggaagttacctctgtgacatcttggatgtaaacacttggatttggtatagaataacccattgaaatttctgctgtgcgagggtggtagaaatttacttttttgggtatattcttatatatattatgtacatcgctgtctgaaattttagttattttttgtttttaataaagactaacacaaacttaatgattaaaagtgattgagtctcatagtctttcatttgctagctgtgatccaaattttattagaacataagtcacttgttattgccatttttaaaagagaaaattcataatgatgttatggcaaacagataagactgataaacttcgtattgtatagctttgaaaataattatgcctagtatggagaaacaggaataagatctgattttcttagagttaatatattttagtagattggttttccttttttttattttgtacatagttaactgtgtatctataaataaagcatcctatatgagtttttaataat

SEQ ID NO: 184946 - DNA, 3111 bp, Homo sapiens
  Payload ID: 16414
  Gene Symbol: SNX14
  Gene Name: sorting nexin 14
  Uniprot ID: Q9Y5W7
  ENST ID: ENST00000369627
  CDS Start-End: 133-2946
gcggcggctaactgccggtaggcgtctgtgtgcgccgccaagtcggtggggcggggacgcgaggtgtggatggggggtcgccttgacctctgcctcagccagtagcgcagtctcggcctcgccgttacggagatggtgccctgggtgcggacgatggggcagaagctgaagcagcggctgcgactggacgtgggacgcgagatctgccgccagtacccgctgttctgcttcctgctgctctgtctcagcgccgcctccctgcttcttaacaggtatattcatattttaatgatcttctggtcatttgttgctggagttgtcacattctactgctcactaggacctgattctctcttaccaaatatattcttcacaataaaatacaaacccaagcagttaggacttcaggaattatttcctcaaggtcatagctgtgctgtttgtggtaaagtgaaatgtaaacgacataggccttctttgctacttgaaaactaccagccatggctagacctgaaaatttcttccaaggttgatgcatctctctcagaggttcttgaattagtgttggaaaactttgtttatccgtggtacagggatgtgacagatgatgaatcctttgttgatgaactgagaataacattacgtttttttgcatctgtcttaataagaaggattcacaaggtggatattccatctattataaccaagaaactattaaaagcagcaatgaagcatatagaagtgatagttaaagccagacagaaagtaaaaaatacagagtttttacagcaagctgctttagaagaatatggtccagagcttcatgttgctttgagaagtcgaagagatgaattgcactatttaaggaaacttactgaactgctttttccttatattttgcctcctaaagcaacagactgcagatctctgaccttacttataagagagattctgtctggctctgtgttccttccttctttggatttcctagctgatccagatactgtgaatcatttgcttatcatcttcatagatgacagtccacctgaaaaagcaactgaaccggcttctcctttggttccattcttgcagaaatttgcagaacctagaaataaaaagccatctgtgctgaagttagaattgaagcaaatcagagagcaacaagatcttttatttcgttttatgaactttctgaaacaagaaggcgcagtgcacgtgttgcagttttgtttgactgtggaggaatttaatgatagaattttacgaccagaattatcaaatgatgaaatgctgtctcttcatgaagaattgcagaagatttataaaacatactgtttggatgaaagtattgacaaaattagatttgatcccttcattgtagaagagattcaaagaattgctgaaggcccatacatagatgttgtgaaacttcaaactatgagatgtctttttgaagcatatgaacatgttctttcccttttggagaatgtatttactcctatgttctgccatagtgatgagtatttcagacaacttttaagaggtgcagaatcaccaacacgcaattcaaaattgaacaggaacacacagaaaaggggagaatcatttggaatcagcagaataggtagcaaaattaaaggagtattcaaaagtaccacaatggagggagctatgttgcctaattatggtgtagctgaaggtgaagatgattttattgaagaaggtattgttgtaatggaagatgattctccagtggaggctgtgagcacacctaatactccccgaaaccttgctgcatggaaaattagcattccatatgtagacttttttgaggatccctcctctgaaaggaaggagaaaaaagaaagaattcctgtgttttgtattgatgttgaaagaaatgatagaagagcagttggacacgagcctgaacattggtctgtctatagaagatatcttgaattctatgtacttgaatcaaaactaacagaatttcatggtgcatttcctgatgcccagcttccttctaagaggatcattggccccaaaaattatgaattcttaaagtcaaagagggaagagttccaagaatatctacagaaacttctgcagcatccagaactgagtaatagtcaacttctggcagactttctttcccctaatggtggggaaacacaatttcttgataagatactaccagatgtaaatcttgggaaaattataaaatctgttcctggaaaactaatgaaagagaaaggtcagcatttggaaccttttatcatgaatttcattaattcttgtgagtctccaaagcctaaaccaagtagaccagaactgaccattctcagccctacttcagaaaacaacaagaagcttttcaatgatctgtttaaaaataatgcaaaccgtgctgaaaatacagagagaaagcaaaatcagaattattttatggaggtgatgactgtagaaggagtctatgattacctgatgtatgtaggacgggtagttttccaggttcctgactggcttcatcatctcttaatgggaactcgaatcctctttaaaaacaccctggaaatgtatactgattactatcttcagtgtaaactagaacagctatttcaggagcaccgtttggtctcactcataacacttctcagagatgctatattctgtgaaaacactgaacctcgctctctccaagataagcaaaaaggagcaaaacagacttttgaagaaatgatgaattacattccagatctgttagtcaagtgtattggtgaagaaaccaagtatgaaagcatcagacttctgtttgatggcttacagcaaccagtactcaacaagcagctgacttatgttttattggacattgtgatacaggaactgtttccagagctcaataaggtacaaaaggaagttacctctgtgacatcttggatgtaaacacttggatttggtatagaataacccattgaaatttctgctgtgcgagggtggtagaaatttacttttttgggtatattcttatatatattatgtacatcgctgtctgaaattttagttattttttgtttttaataaagactaacacaaacttaatgattaaaa

SEQ ID NO: 184947 - DNA, 2578 bp, Homo sapiens
  Payload ID: 16414
  Gene Symbol: SNX14
  Gene Name: sorting nexin 14
  ENST ID: ENST00000369635
  CDS Start-End: 68-619
gtggatggggggtcgccttgacctctgcctcagccagtagcgcagtctcggcctcgccgttacggagatggtgccctgggtgcggacgatggggcagaagctgaagcagcggctgcgactggacgtgggacgcgagatctgccgccagtacccgctgttctgcttcctgctgctctgtctcagcgccgcctccctgcttcttaacaggtatattcatattttaatgatcttctggtcatttgttgctggagttgtcacattctactgctcactaggacctgattctctcttaccaaatatattcttcacaataaaatacaaacccaagcagttaggacttcaggaattatttcctcaaggtcatagctgtgctgtttgtggtaaagtgaaatgtaaacgacataggccttctttgctacttgaaaactaccagccatggctagacctgaaaatttcttccaaggttgatgcatctctctcagaggttcttgaattagtgttggaaaactttgtttatccgtggtacagggatgtgacagatgatgaatcctttgttgatgaactgagaataacattacgtttttttgcatctgtcttaataagaaggattcacaagtaaaaaatacagagtttttacagcaagctgctttagaagaatatggtccagagcttcatgttgctttgagaagtcgaagagatgaattgcactatttaaggaaacttactgaactgctttttccttatattttgcctcctaaagcaacagactgcagatctctgaccttacttataagagagattctgtctggctctgtgttccttccttctttggatttcctagctgatccagatactgtgaatcatttgcttatcatcttcatagatgacagtccacctgaaaaagcaactgaaccggcttctcctttggttccattcttgcagaaatttgcagaacctagaaataaaaagccatctgtgctgaagttagaattgaagcaaatcagagagcaacaagatcttttatttcgttttatgaactttctgaaacaagaaggcgcagtgcacgtgttgcagttttgtttgactgtggaggaatttaatgatagaattttacgaccagaattatcaaatgatgaaatgctgtctcttcatgaagaattgcagaagatttataaaacatactgtttggatgaaagtattgacaaaattagatttgatcccttcattgtagaagagattcaaagaattgctgaaggcccatacatagatgttgtgaaacttcaaactatgagatgtctttttgaagcatatgaacatgttctttcccttttggagaatgtatttactcctatgttctgccatagtgatgagtatttcagacaacttttaagaggtgcagaatcaccaacacgcaattcaaaattgaacagaggtagcctaagtttggatgattttcggaacacacagaaaaggggagaatcatttggaatcagcagaataggtagcaaaattaaaggagtattcaaaagtaccacaatggagggagctatgttgcctaattatggtgtagctgaaggtgaagatgattttattgaagaaggtattgttgtaatggaagatgattctccagtggaggctgtgagcacacctaatactccccgaaaccttgctgcatggaaaattagcattccatatgtagacttttttgaggatccctcctctgaaaggaaggagaaaaaagaaagaattcctgtgttttgtattgatgttgaaagaaatgatagaagagcagttggacacgagcctgaacattggtctgtctatagaagatatcttgaattctatgtacttgaatcaaaactaacagaatttcatggtgcatttcctgatgcccagcttccttctaagaggatcattggccccaaaaattatgaattcttaaagtcaaagagggaagagttccaagaatatctacagaaacttctgcagcatccagaactgagtaatagtcaacttctggcagactttctttcccctaatggtggggaaacacaatttcttgataagatactaccagatgtaaatcttgggaaaattataaaatctgttcctggaaaactaatgaaagagaaaggtcagcatttggaaccttttatcatgaatttcattaattcttgtgagtctccaaagcctaaaccaagtagaccagaactgaccattctcagccctacttcagaaaacaacaagaagcttttcaatgatctgtttaaaaataatgcaaaccgtgctgaaaatacagagagaaagcaaaatcagaattattttatggaggtgatgactgtagaaggagtctatgattacctgatgtatgtaggacgggtagttttccaggttcctgactggcttcatcatctcttaatgggaactcgaatcctctttaaaaacaccctggaaatgtatactgattactatcttcagtgtaaactagaacagctatttcaggagcaccgtttggtctcactcataacacttctcagagatgctatattctgtgaaaacactgaacctcgctctctcc

SEQ ID NO: 184948 - DNA, 636 bp, Homo sapiens
  Payload ID: 16414
  Gene Symbol: SNX14
  Gene Name: sorting nexin 14
  ENST ID: ENST00000418862
  CDS Start-End: 1-636
gatgcccagcttccttctaagaggatcattggccccaaaaattatgaattcttaaagtcaaagagggaagagttccaagaatatctacagaaacttctgcagcatccagaactgagtaatagtcaacttctggcagactttctttcccctaatggtggggaaacacaatttcttgataagatactaccagatgtaaatcttgggaaaattataaaatctgttcctggaaaactaatgaaagagaaaggtcagcatttggaaccttttatcatgaatttcattaattcttgtgagtctccaaagcctaaaccaagtagaccagaactgaccattctcagccctacttcagaaaacaacaagaagcttttcaatgatctgtttaaaaataatgcaaaccgtgctgaaaatacagagagaaagcaaaatcagaattattttatggaggtgatgactgtagaaggagtctatgattacctgatgtatgtagatgctatattctgtgaaaacactgaacctcgctctctccaagataagcaaaaaggagcaaaacagacttttgaagaaatgatgaattacattccagatctgttagtcaagtgtattggtgaagaaaccaagtatgaaagcatcagactt

SEQ ID NO: 184949 - DNA, 2259 bp, Homo sapiens
  Payload ID: 16414
  Gene Symbol: SNX14
  Gene Name: sorting nexin 14
  ENST ID: ENST00000513865
  CDS Start-End: 88-2085
gtggggcggggacgcgaggtgtggatggggggtcgccttgacctctgcctcagccagtagcgcagtctcggcctcgccgttacggagatggtgccctgggtgcggacgatggggcagaagctgaagcagcggctgcgactggacgtgggacgcgagatctgccgccagtacccgctgttctgcttcctgctgctctgtctcagcgccgcctccctgcttcttaacaggtatattcatattttaatgatcttctggtcatttgttgctggagttgtcacattctactgctcactaggacctgattctctcttaccaaatatattcttcacaataaaatacaaacccaagcagttaggacttcaggaattatttcctcaaggtcatagctgtgctgtttgtggtaaagtgaaatgtaaacgacataggccttctttgctacttgaaaactaccagccatggctagacctgaaaatttcttccaaggttgatgcatctctctcagaggttcttgaattagtgttggaaaactttgtttatccgtggtacagggatgtgacagatgatgaatcctttgttgatgaactgagaataacattacgtttttttgcatctgtcttaataagaaggattcacaaggtggatattccatctattataaccaagaaactattaaaagcagcaatgaagcatatagaagtgatagttaaagccagacagaaagtaaaaaatacagagtttttacagcaagctgctttagaagaatatggtccagagcttcatgttgctttgagaagtcgaagagatgaattgcactatttaaggaaacttactgaactgctttttccttatattttgcctcctaaagcaacagactgcagatctctgaccttacttataagagagattctgtctggctctgtgttccttccttctttggatttcctagctgatccagatactgtgaatcatttgcttatcatcttcatagatgacagtccacctgaaaaagcaactgaaccggcttctcctttggttccattcttgcagaaatttgcagaacctagaaataaaaagccatctgtgctgaagttagaattgaagcaaatcagagagcaacaagatcttttatttcgttttatgaactttctgaaacaagaaggcgcagtgcacgtgttgcagttttgtttgactgtggaggaatttaatgatagaattttacgaccagaattatcaaatgatgaaatgctgtctcttcatgaagaattgcagaagatttataaaacatactgtttggatgaaagtattgacaaaattagatttgatcccttcattgtagaagagattcaaagaaggaaaattataaaatctgttcctggaaaactaatgaaagagaaaggtcagcatttggaaccttttatcatgaatttcattaattcttgtgagtctccaaagcctaaaccaagtagaccagaactgaccattctcagccctacttcagaaaacaacaagaagcttttcaatgatctgtttaaaaataatgcaaaccgtgctgaaaatacagagagaaagcaaaatcagaattattttatggaggtgatgactgtagaaggagtctatgattacctgatgtatgtaggacgggtagttttccaggttcctgactggcttcatcatctcttaatgggaactcgaatcctctttaaaaacaccctggaaatgtatactgattactatcttcagtgtaaactagaacagctatttcaggagcaccgtttggtctcactcataacacttctcagagatgctatattctgtgaaaacactgaacctcgctctctccaagataagcaaaaaggagcaaaacagacttttgaagaaatgatgaattacattccagatctgttagtcaagtgtattggtgaagaaaccaagtatgaaagcatcagacttctgtttgatggcttacagcaaccagtactcaacaagcagctgacttatgttttattggacattgtgatacaggaactgtttccagagctcaataaggtacaaaaggaagttacctctgtgacatcttggatgtaaacacttggatttggtatagaataacccattgaaatttctgctgtgcgagggtggtagaaatttacttttttgggtatattcttatatatattatgtacatcgctgtctgaaattttagttattttttgtttttaataaagactaacacaaacttaatgattaaaagtgattgag

SEQ ID NO: 184950 - DNA, 543 bp, Homo sapiens
  Payload ID: 16414
  Gene Symbol: SNX14
  Gene Name: sorting nexin 14
  ENST ID: ENST00000508658
  CDS Start-End: 1-536
ttaaaaataatgcaaaccgtgctgaaaatacagagagaaagcaaaatcagaattattttatggaggtgatgactgtagaaggagtctatgattacctgatgtatgtaggacgggtagttttccaggttcctgactggcttcatcatctcttaatgggaactcgaatcctctttaaaaacaccctggaaatgtatactgattactatcttcagtgtaaactagaacagctatttcaggagcaccgtttggtctcactcataacacttctcagagatgctatattctgtgaaaacactgaacctcgctctctccaagataagcaaaaaggagcaaaacagacttttgaagaaatgatgaattacattccagatctgttagtcaagtgtattggtgaagaaaccaagtatgaaagcatcagacttctgtttgatggcttacagcaaccagtactcaacaagcagctgacttatgttttattggacattgtgatacaggaactgtttccagagctcaataaggtaactgaaaagcagtaattttatt

SEQ ID NO: 184951 - DNA, 505 bp, Homo sapiens
  Payload ID: 16414
  Gene Symbol: SNX14
  Gene Name: sorting nexin 14
  ENST ID: ENST00000509338
  CDS Start-End: 69-505
gtggggctgggcccagccggacgcgacctcagcctgcggcggctaactgccggtatattcatattttaatgatcttctggtcatttgttgctggagttgtcacattctactgctcactaggacctgattctctcttaccaaatatattcttcacaataaaatacaaacccaagcagttaggacttcaggaattatttcctcaaggtcatagctgtgctgtttgtggtaaagtgaaatgtaaacgacataggccttctttgctacttgaaaactaccagccatggctagacctgaaaatttcttccaaggttgatgcatctctctcagaggtggatattccatctattataaccaagaaactattaaaagcagcaatgaagcatatagaagtgatagttaaagccagacagaaagtaaaaaatacagagtttttacagcaagctgctttagaagaatatggtccagagcttcatgttgctttgagaagtcgaagagatgaattgca

SEQ ID NO: 184952 - DNA, 863 bp, Homo sapiens
  Payload ID: 16414
  Gene Symbol: SNX14
  Gene Name: sorting nexin 14
  ENST ID: ENST00000514419
  CDS Start-End: 154-863
agccggacgcgacctcagcctgcggcggctaactgccggtaggcgtctgtgtgcgccgccaagtcggtggggcggggacgcgaggtgtggatggggggtcgccttgacctctgcctcagccagtagcgcagtctcggcctcgccgttacggagatggtgccctgggtgcggacgatggggcagaagctgaagcagcggctgcgactggacgtgggacgcgagatctgccgccagtacccgctgttctgcttcctgctgctctgtctcagcgccgcctccctgcttcttaacaggtatattcatattttaatgatcttctggtcatttgttgctggagttgtcacattctactgctcactaggacctgattctctcttaccaaatatattcttcacaataaaatacaaacccaagttaggacttcaggaattatttcctcaaggtcatagctgtgctgtttgtggtaaagtgaaatgtaaacgacataggccttctttgctacttgaaaactaccagccatggctagacctgaaaatttcttccaaggttgatgcatctctctcagaggttcttgaattagtgttggaaaactttgtttatccgtggtacagggatgtgacagatgatgaatcctttgttgatgaactgagaataacattacgtttttttgcatctgtcttaataagaaggattcacaaggtggatattccatctattataaccaagaaactattaaaagcagcaatgaagcatatagaagtgatagttaaagccagacagaaagtaaaaaatacagagtttttacagcaagctgctttagaagaatatggtccagagcttcatgttgctttgagaagtcgaag

SEQ ID NO: 184953 - DNA, 3288 bp, Homo sapiens
  Payload ID: 16414
  Gene Symbol: SNX14
  Gene Name: sorting nexin 14
  ENST ID: ENST00000515216
  CDS Start-End: 790-3288
atgaaagagattgtggatatgacaaaaaaggtctttcagcataaggatcttacagaaattcaagagccagtagacatcacaccagaggaattaacataatataacttgataaagatgagtgctttggaaccagtgctagacagtgaggaagaagactttgaagaaacagtgccaggggccaaatgcagtggctcatgcctgtaatgccagcattttgggaggccaaggtggatggctcacttgagcccaggagttcaagcctgggtaacacggtgaaaccctgtctctacaaaaaatacaaaaaatttagctggatgtggaggtacacgtctgtagtcccagctacatggggggctgaggtggggaagatcagttgagcctgggatgcagtgagccatgatggcaccactgcactccagctgggatgacagagtgagactctatctcaaaaaaaaaaaaaaaaaaaaagtggtgccagaacacaaattgacagtagacaatatggcagaaggttttcaattatcaagactgcttttcacttcttttatcacatggacccttctttgatactggcactgaatctaaagcaaatggtagaagaaagatcagtactatataaaaatgtttttagagaaatgaaacggcaaaaagtcgggcagaaatcatgatgtacttctataaagtcgagtgtgcctgccacttctgcatccccttctacctctttcacccctgcaattcctcagacagcaagaccaacccctcctcttcagcctacccagtgtgaagacaatgaagatgaagacctttgtgataatccacttccacttaatacagttaggacttcaggaattatttcctcaaggtcatagctgtgctgtttgtggtaaagtgaaatgtaaacgacataggccttctttgctacttgaaaactaccagccatggctagacctgaaaatttcttccaaggttgatgcatctctctcagaggttcttgaattagtgttggaaaactttgtttatccgtggtacagggatgtgacagatgatgaatcctttgttgatgaactgagaataacattacgtttttttgcatctgtcttaataagaaggattcacaaggtggatattccatctattataaccaagaaactattaaaagcagcaatgaagcatatagaagtgatagttaaagccagacagaaagtaaaaaatacagagtttttacagcaagctgctttagaagaatatggtccagagcttcatgttgctttgagaagtcgaagagatgaattgcactatttaaggaaacttactgaactgctttttccttatattttgcctcctaaagcaacagactgcagatctctgaccttacttataagagagattctgtctggctctgtgttccttccttctttggatttcctagctgatccagatactgtgaatcatttgcttatcatcttcatagatgacagtccacctgaaaaagcaactgaaccggcttctcctttggttccattcttgcagaaatttgcagaacctagaaataaaaagccatctgtgctgaagttagaattgaagcaaatcagagagcaacaagatcttttatttcgttttatgaactttctgaaacaagaaggcgcagtgcacgtgttgcagttttgtttgactgtggaggaatttaatgatagaattttacgaccagaattatcaaatgatgaaatgctgtctcttcatgaagaattgcagaagatttataaaacatactgtttggatgaaagtattgacaaaattagatttgatcccttcattgtagaagagattcaaagaattgctgaaggcccatacatagatgttgtgaaacttcaaactatgagatgtctttttgaagcatatgaacatgttctttcccttttggagaatgtatttactcctatgttctgccatagtgatgagtatttcagacaacttttaagaggtgcagaatcaccaacacgcaattcaaaattgaacaggaacacacagaaaaggggagaatcatttggaatcagcagaataggtagcaaaattaaaggagtattcaaaagtaccacaatggagggagctatgttgcctaattatggtgtagctgaaggtgaagatgattttattgaagaaggtattgttgtaatggaagatgattctccagtggaggctgtgagcacacctaatactccccgaaaccttgctgcatggaaaattagcattccatatgtagacttttttgaggatccctcctctgaaaggaaggagaaaaaagaaagaattcctgtgttttgtattgatgttgaaagaaatgatagaagagcagttggacacgagcctgaacattggtctgtctatagaagatatcttgaattctatgtacttgaatcaaaactaacagaatttcatggtgcatttcctgatgcccagcttccttctaagaggatcattggccccaaaaattatgaattcttaaagtcaaagagggaagagttccaagaatatctacagaaacttctgcagcatccagaactgagtaatagtcaacttctggcagactttctttcccctaatggtggggaaacacaatttcttgataagatactaccagatgtaaatcttgggaaaattataaaatctgttcctggaaaactaatgaaagagaaaggtcagcatttggaaccttttatcatgaatttcattaattcttgtgagtctccaaagcctaaaccaagtagaccagaactgaccattctcagccctacttcagaaaacaacaagaagcttttcaatgatctgtttaaaaataatgcaaaccgtgctgaaaatacagagagaaagcaaaatcagaattattttatggaggtgatgactgtagaaggagtctatgattacctgatgtatgtaggacgggtagttttccaggttcctgactggcttcatcatctcttaatgggaactcgaatcctctttaaaaacaccctggaaatgtatactgattactatcttcagtgtaaactagaacagctatttcaggagcaccgtttggtctcactcataacacttctcagagatgctatattctgtgaaaacactgaacctcgctctctccaagataagcaaaaaggagcaaaacagacttttgaagaaatgatgaattacattccagatctgttagtcaagtgtattggtgaagaaaccaagtatgaaagcatcagacttctgtttgatggcttacagcaaccagtactcaacaagcag

SEQ ID NO: 184954 - DNA, 530 bp, Homo sapiens
  Payload ID: 16414
  Gene Symbol: SNX14
  Gene Name: sorting nexin 14
  ENST ID: ENST00000513869
  CDS Start-End: 41-316
tcagcctgcggcggctaactgccggtatattcatattttaatgatcttctggtcatttgttgctggagttgtcacattctactgctcactaggacctgattctctcttaccaaatatattcttcacaataaaatacaaacccaagcagttaggacttcaggaattatttcctcaaggtcatagctgtgctgtttgtggtaaagtgaaatgtaaacgacataggccttctttgctacttgaaaactaccagccatggctagacctgaaaatttcttccaaggttgatgcatctctctcagagggatgtgacagatgatgaatcctttgttgatgaactgagaataacattacgtttttttgcatctgtcttaataagaaggattcacaaggtggatattccatctattataaccaagaaactattaaaagcagcaatgaagcatatagaagtgatagttaaagccagacagaaagtaaaaaatacagagtttttacagcaagctgctttagaagaatatggtccagagctt

SEQ ID NO: 184955 - DNA, 3193 bp, Homo sapiens
  Payload ID: 16414
  Gene Symbol: SNX14
  Gene Name: sorting nexin 14
  Uniprot ID: Q9Y5W7
  ENST ID: ENST00000505648
  CDS Start-End: 340-3024
gtgctgtagtttcttccgggctccctacaaccttcttccctctcctccgcaatacaggcagttactgggtgctggggctgtcctttgatttccggaaatggccggtcgccagtgttgtcagagtttccacggaagactgcgcgctactccggccaggagggcggagcggcgagacgctagaggctttgcgctgggtgacgacttcgggcacgttctacggccgttcctctggtcggctggggaccgcggccgcgcacgcgcggcggggggcgtggggctgggcccagccggacgcgacctcagcctgcggcggctaactgccggtatattcatattttaatgatcttctggtcatttgttgctggagttgtcacattctactgctcactaggacctgattctctcttaccaaatatattcttcacaataaaatacaaacccaagcagttaggacttcaggaattatttcctcaaggtcatagctgtgctgtttgtggtaaagtgaaatgtaaacgacataggccttctttgctacttgaaaactaccagccatggctagacctgaaaatttcttccaaggttgatgcatctctctcagaggttcttgaattagtgttggaaaactttgtttatccgtggtacagggatgtgacagatgatgaatcctttgttgatgaactgagaataacattacgtttttttgcatctgtcttaataagaaggattcacaaggtggatattccatctattataaccaagaaactattaaaagcagcaatgaagcatatagaagtgatagttaaagccagacagaaagtaaaaaatacagagtttttacagcaagctgctttagaagaatatggtccagagcttcatgttgctttgagaagtcgaagagatgaattgcactatttaaggaaacttactgaactgctttttccttatattttgcctcctaaagcaacagactgcagatctctgaccttacttataagagagattctgtctggctctgtgttccttccttctttggatttcctagctgatccagatactgtgaatcatttgcttatcatcttcatagatgacagtccacctgaaaaagcaactgaaccggcttctcctttggttccattcttgcagaaatttgcagaacctagaaataaaaagccatctgtgctgaagttagaattgaagcaaatcagagagcaacaagatcttttatttcgttttatgaactttctgaaacaagaaggcgcagtgcacgtgttgcagttttgtttgactgtggaggaatttaatgatagaattttacgaccagaattatcaaatgatgaaatgctgtctcttcatgaagaattgcagaagatttataaaacatactgtttggatgaaagtattgacaaaattagatttgatcccttcattgtagaagagattcaaagaattgctgaaggcccatacatagatgttgtgaaacttcaaactatgagatgtctttttgaagcatatgaacatgttctttcccttttggagaatgtatttactcctatgttctgccatagtgatgagtatttcagacaacttttaagaggtgcagaatcaccaacacgcaattcaaaattgaacagaggtagcctaagtttggatgattttcggaacacacagaaaaggggagaatcatttggaatcagcagaataggtagcaaaattaaaggagtattcaaaagtaccacaatggagggagctatgttgcctaattatggtgtagctgaaggtgaagatgattttattgaagaaggtattgttgtaatggaagatgattctccagtggaggctgtgagcacacctaatactccccgaaaccttgctgcatggaaaattagcattccatatgtagacttttttgaggatccctcctctgaaaggaaggagaaaaaagaaagaattcctgtgttttgtattgatgttgaaagaaatgatagaagagcagttggacacgagcctgaacattggtctgtctatagaagatatcttgaattctatgtacttgaatcaaaactaacagaatttcatggtgcatttcctgatgcccagcttccttctaagaggatcattggccccaaaaattatgaattcttaaagtcaaagagggaagagttccaagaatatctacagaaacttctgcagcatccagaactgagtaatagtcaacttctggcagactttctttcccctaatggtggggaaacacaatttcttgataagatactaccagatgtaaatcttgggaaaattataaaatctgttcctggaaaactaatgaaagagaaaggtcagcatttggaaccttttatcatgaatttcattaattcttgtgagtctccaaagcctaaaccaagtagaccagaactgaccattctcagccctacttcagaaaacaacaagaagcttttcaatgatctgtttaaaaataatgcaaaccgtgctgaaaatacagagagaaagcaaaatcagaattattttatggaggtgatgactgtagaaggagtctatgattacctgatgtatgtaggacgggtagttttccaggttcctgactggcttcatcatctcttaatgggaactcgaatcctctttaaaaacaccctggaaatgtatactgattactatcttcagtgtaaactagaacagctatttcaggagcaccgtttggtctcactcataacacttctcagagatgctatattctgtgaaaacactgaacctcgctctctccaagataagcaaaaaggagcaaaacagacttttgaagaaatgatgaattacattccagatctgttagtcaagtgtattggtgaagaaaccaagtatgaaagcatcagacttctgtttgatggcttacagcaaccagtactcaacaagcagctgacttatgttttattggacattgtgatacaggaactgtttccagagctcaataaggtacaaaaggaagttacctctgtgacatcttggatgtaaacacttggatttggtatagaataacccattgaaatttctgctgtgcgagggtggtagaaatttacttttttgggtatattcttatatatattatgtacatcgctgtctgaaattttagttattttttgtttttaataaagactaacacaaacttaatgattaaaagtga

SEQ ID NO: 184956 - DNA, 771 bp, Homo sapiens
  Payload ID: 16415
  Gene Symbol: SNX15
  Gene Name: sorting nexin 15
  Uniprot ID: Q9NRS6
  ENST ID: ENST00000352068
  CDS Start-End: 1-771
atgtcccgccaggcgaaggatgacttcctgcggcactacacagtgtcggaccccaggactcaccccaagggctacaccgagtacaaagtaaccgcgcagttcatctcaaagaaggacccagaggatgtcaaagaggtggtggtctggaagcggtacagcgacttccgcaagctgcatggagacctggcctacacccaccgcaacctcttccgccgcctcgaggagttccctgctttcccccgggcccaggtgtttggccggtttgaagcctcagtgatcgaggagcggcgaaagggggcagaggacctgcttcgcttcactgtgcacatacctgcgctcaacaacagcccccagctcaaggagttcttccggggtggggaggtgacccgacccttggaggtgtccagggacctacacatcctgccaccccctctgatccccaccccgccccctgatgacccccggctatcccaactgctccctgcagaaaggaggggcctcgaggaattggaggtgccagtggaccccccaccatccagccctgcccaggaggccctggatctcctctttaactgtgagagcaccgaggaggcatctggttcccctgcccgaggccccctcaccgaggctgagcttgccctcttcgaccccttctccaaggaaggtgacccgttgcctgcccgccaggaaggtgtgaagaagaaggcagctgagtacctgaagcgggcagaggagatcctgcgcctgcacctgtctcaactcccaccctaa

SEQ ID NO: 184957 - DNA, 1939 bp, Homo sapiens
  Payload ID: 16415
  Gene Symbol: SNX15
  Gene Name: sorting nexin 15
  Uniprot ID: Q9NRS6
  ENST ID: ENST00000377244
  CDS Start-End: 131-1159
gacaaaatccctaggccagaggaagaagagcgcaggcctggcgaggcggcggcgggcggaggctgggccggaggggtggggacggcgaggaggtggaggccggcgctccgctccgctccagctcggtttcatgtcccgccaggcgaaggatgacttcctgcggcactacacagtgtcggaccccaggactcaccccaagggctacaccgagtacaaagtaaccgcgcagttcatctcaaagaaggacccagaggatgtcaaagaggtggtggtctggaagcggtacagcgacttccgcaagctgcatggagacctggcctacacccaccgcaacctcttccgccgcctcgaggagttccctgctttcccccgggcccaggtgtttggccggtttgaagcctcagtgatcgaggagcggcgaaagggggcagaggacctgcttcgcttcactgtgcacatacctgcgctcaacaacagcccccagctcaaggagttcttccggggtggggaggtgacccgacccttggaggtgtccagggacctacacatcctgccaccccctctgatccccaccccgccccctgatgacccccggctatcccaactgctccctgcagaaaggaggggcctcgaggaattggaggtgccagtggaccccccaccatccagccctgcccaggaggccctggatctcctctttaactgtgagagcaccgaggaggcatctggttcccctgcccgaggccccctcaccgaggctgagcttgccctcttcgaccccttctccaaggaagaaggcgcagcccccagccccacccatgtggctgagctggcaacgatggaggtggagtctgcaaggctggaccaggaaccctgggagccaggagggcaggaggaggaagaggatggggaaggagggcccacccctgcctacctaagccaggccacagagctcatcacccaggccctgcgggatgagaaggcaggcgcttacgctgctgcactccagggctatcgagacggcgtgcacgtcttgcttcagggagtccccagtgacccgttgcctgcccgccaggaaggtgtgaagaagaaggcagctgagtacctgaagcgggcagaggagatcctgcgcctgcacctgtctcaactcccaccctaacagggagtgggccattccctgggactctcgctcctgcactgccagccccttctcctctccccagggcctggccctacctcctggtcttgtaattacaggagccatttctgtaggtaactggaccaagaatgagaaaaataatgaattcttagctccctgattacacctgccaccttggaatcaaggactcacacttctgaccctgcctgtctttttggggtttttttgagttggagtctcgctgtgtcgcccagactggagtgcagtggtgggatcgcggctcactgcaacctccacctcccaggttcaagcagttctcctgtctcagcctccccagtagctgagattgcaggcacatgccaccacgcccagctaatattttgtattttcagtagggacggggttacaccatgttggccaggctggtctcgaactcctgacctcaagtgatccacccgcctcagtctcccaaagtgctgagattacaggcatgagtcactacgcccggcccatgtctgtctgtcttgatgtgtgagcagcagctgtggtcattaaaccattagtttacccctctagaactggggtctgcaaactcccacctgcagccaaatctggcccacctcctttttaatgtaagggctgtgagagtggtttttactttttttaatgattaaaaaaatcaaaataatattctgtgacaatgacaggtgaaatttatatgtgacaagtgaaaattatatgaaatttaagagtccataaataaaatttgttggaacacaa

SEQ ID NO: 184958 - DNA, 627 bp, Homo sapiens
  Payload ID: 16415
  Gene Symbol: SNX15
  Gene Name: sorting nexin 15
  ENST ID: ENST00000524831
  CDS Start-End: 52-627
ggacggcgaggaggtggaggccggcgctccgctccgctccagctcggtttcatgtcccgccaggcgaaggatgacttcctgcggcactacacagtgtcggaccccaggactcaccccaagggctacaccgagtacaaagtaaccgcgcaggtggtggtctggaagcggtacagcgacttccgcaagctgcatggagacctggcctacacccaccgcaacctcttccgccgcctcgaggagttccctgctttcccccgggcccaggtgtttggccggtttgaagcctcagtgatcgaggagcggcgaaagggggcagaggacctgcttcgcttcactgtgcacatacctgcgctcaacaacagcccccagctcaaggagttcttccggggtggggaggtgacccgacccttggaggtgtccagggacctacacatcctgccaccccctctgatccccaccccgccccctgatgacccccggctatcccaactgctccctgcagaaaggaggggcctcgaggaattggaggtgccagtggaccccccaccatccagccctgcccaggaggccctggatctcctctttaactgtgagagcaccgaggaggcatctggttcccctgcccga

SEQ ID NO: 184959 - DNA, 573 bp, Homo sapiens
  Payload ID: 16415
  Gene Symbol: SNX15
  Gene Name: sorting nexin 15
  ENST ID: ENST00000529673
  CDS Start-End: 67-411
gggccggaggggtggggacggcgaggaggtggaggccggcgctccgctccgctccagctcggtttcatgtcccgccaggcgaaggatgacttcctgcggcactacacagtgtcggaccccaggactcaccccaagggctacaccgagtacaaagtaaccgcgcagttcatctcaaagaaggacccagaggatgtcaaagaggtgaggctcctgggaggaagagggactgttctgcagttccagatctggaaactgtcaaggggcagctggtggtggtctggaagcggtacagcgacttccgcaagctgcatggagacctggcctacacccaccgcaacctcttccgccgcctcgaggagttccctgctttcccccgggcccaggtgtttggccggtttgaagcctcagtgatcgaggagcggcgaaagggggcagaggacctgcttcgcttcactgtgcacatacctgcgctcaacaacagcccccagctcaaggagttcttccggggtggggaggtgacccgacccttggaggtgtccagggacctacacatcctgccaccccctctgatcc

SEQ ID NO: 184960 - DNA, 312 bp, Homo sapiens
  Payload ID: 16415
  Gene Symbol: SNX15
  Gene Name: sorting nexin 15
  ENST ID: ENST00000525648
  CDS Start-End: 115-312
aggcgaaggatgacttcctgcggcactacacagtgtcggaccccaggactcaccccaagggctacaccgagtacaaagtaaccgcgcagttcatctcaaagaaggacccagaggatgtcaaagaggtggtggtctggaagcggtacagcgacttccgcaagctgcatggagacctggcctacacccaccgcaacctcttccgccgcctcgaggagttccctgctttcccccgggcccaggtgtttgggtggggaggtgacccgacccttggaggtgtccagggacctacacatcctgccaccccctctgatc

SEQ ID NO: 184961 - DNA, 704 bp, Homo sapiens
  Payload ID: 16415
  Gene Symbol: SNX15
  Gene Name: sorting nexin 15
  ENST ID: ENST00000534637
  CDS Start-End: 53-704
gggacggcgaggaggtggaggccggcgctccgctccgctccagctcggtttcatgtcccgccaggcgaaggatgacttcctgcggcactacacagtgtcggaccccaggactcaccccaagggctacaccgagtacaaattcatctcaaagaaggacccagaggatgtcaaagaggtggtggtctggaagcggtacagcgacttccgcaagctgcatggagacctggcctacacccaccgcaacctcttccgccgcctcgaggagttccctgctttcccccgggcccaggtgtttggccggtttgaagcctcagtgatcgaggagcggcgaaagggggcagaggacctgcttcgcttcactgtgcacatacctgcgctcaacaacagcccccagctcaaggagttcttccggggtggggaggtgacccgacccttggaggtgtccagggacctacacatcctgccaccccctctgatccccaccccgccccctgatgacccccggctatcccaactgctccctgcagaaaggaggggcctcgaggaattggaggtgccagtggaccccccaccatccagccctgcccaggaggccctggatctcctctttaactgtgagagcaccgaggaggcatctggttcccctgcccgaggccccctcaccgaggctgagcttgccctcttcgaccccttctccaaggaag

SEQ ID NO: 184962 - DNA, 3032 bp, Homo sapiens
  Payload ID: 16416
  Gene Symbol: SNX16
  Gene Name: sorting nexin 16
  Uniprot ID: P57768
  ENST ID: ENST00000353788
  CDS Start-End: 169-1116
ctgcggttaaggagagtccggtttaaccgtcaccgggaagcgcgctcgttcgggatcgccgagggggctgagatagtgaattcctaagaagaaaataatggattgcatattagttgttctctaagtggactcaacagtgtgcaagcttgttggaaaagccaaaagaagatggcaactccttatgtcccagttcctatgcccataggaaactctgcttccagttttacaacaaacagaaatcaaagaagttcttcttttggcagtgtctcaacaagctcaaattcttctaagggccagttagaagactcaaatatgggtaattttaaacagacaagtgttcctgatcaaatggataatacttcatctgtctgtagcagtcccctcattaggactaaatttacaggtacagcttcttccattgagtattctactagaccaagagacactgaagaacaaaatccggaaacagtgaattgggaagatagaccatctacacctactatactgggttatgaagtgatggaagaaagagctaaatttactttaaaagagatgtttccaggttttcgactagcacttcctccaaaacgctggtttaaagataattacaatgctgactttttagaagacagacaattaggattacaagcgtttcttcaaaatttagtagctcacaaggacattgctaactgccttgcagtgagagaatttctttgtttggatgatccaccgggtccatttgatagcctagaagaaagcagggcattctgtgaaactttagaagagacaaactaccgcttacagaaagaactacttgaaaaacaaaaggagatggaatcactaaagaaactgctcagtgagaagcaacttcatatagacactttagagaacagaatcagaacattgtctttagaacctgaagaatcactggatgtgtcagaaacagaaggtgaacagatcctaaaggtggagtcctctgcacttgaggttgatcaagatgtcctggatgaagaatctagagctgataataaaccatgcttaagttttagtgaacctgaaaatgctgtatcagagatagaagtagcagaagtggcatatgatgctgaagaagactaatgtatcacaagcagttccctccatttagactattcaaaaatttagaagagtggcaaatactattttaaaagaagaaccaagaactgtaaaacatatagaaaagagcaagaatgcacatgtataaagtttacataaagaagtttttttaagttattgagataggaaatatattcactgctgcttttaattgtattttatccaattacatttaatacactaaaaaaaatcttgttggaattctgttatcaaggcccacattcttaaatactgtgcataaattattatggtgttttgcctatatattgctccaaactactgtgtatatatgtatgtgtgttaaatcaccaattatattaatcaaatggaaattaattgcatgttactatctgggtgatatattcttctttatatctctgacatgacatattttcattaatagtttaaatcagtgaccatcataataaagataaaatttagttgagtttttaatgtttacatgtttacatctctaaataaaatttgcttatttgaaatgttaatgctctttagaaaaatgactttctagtaccaaaggaaaactacttgaaagagctgtaatcatatagctaaagtgataagatagccttgattttaaaagctgattcattaatatcaaaatactttaataagtgtcacagttattaatatgttacatttgtttagtttccacgtaatctttatctctacctagatttagtgagtttgcctctttcagaatactacctccttttgttaaggcatattctttcgaaaatatagattctaaataaataggggcttatacaaaaaagaaaataaaaagccatatatactgcaaagttcctaactggcttgactcctgacattgcatttttatttctatttgtgtgaagatgttgttatactgtattatggctgattttctttttaatatatttagccaagtgatgcactttatgataattaaactcttttgtgccaagtttaattggtggatttttttagtaagtagagttaggagaaagaattatgtagtgcctttactatttcactttctacaaaagtctcctagggtctttgagtcagctttatgaaaaaatgtttgtttatttcagctttgtgtacagtcattaaaagtgccttgtttcatttttataggatgaagttatttattttctattttcactgttttgcatattgctgttaataagcattgtaatcatgctggcattttgcaatcccagtcggtatgctttctaaaaactgagggaaacttactggggaaatagaataacaatctccatttttttctttactatctaaaagtttatcggtatcttgatgtatatatatattaaggtgtggctgtttaaaattctaatgacatatatcaacacattcaatggctgttgttaacctttgaagtaaaaaggagatcactttttaccaaataaccaaaaatttttagtctgtcaaagtgcacaggtatgttctcagaacatttttcacaatgtgtatcagaaatatgtttgctatccttagagacagaaatgaatataataaattgatctgcttatttattaaaattattattctagacttacaaaaggcttaaaaagaacaatcatttaatcagtaccattctgtatcttatataacagatctttgccaaattctagatattatagtgttgcctgtctgttctaaagcgaaccagccactttttcaatctggctttttggaagattgtatttaaagttcttcaaggatgaagaaaaaaatctgttaattaggtaaaccactattatttatatttataatttacttttttttacttttataatgcattttactcccagtattatgttcatttaataaattattttttcactacaaca

SEQ ID NO: 184963 - DNA, 1853 bp, Homo sapiens
  Payload ID: 16416
  Gene Symbol: SNX16
  Gene Name: sorting nexin 16
  Uniprot ID: P57768
  ENST ID: ENST00000345957
  CDS Start-End: 280-1314
acacagcagggatcttgggcccgggcagagactggctgaggcggggagcagctgcttttggggcgggggtgtcacgtgaggcttctcgctgctgagggaggaggcgaaaagctgcggttaaggagagtccggtttaaccgtcaccgggaagcgcgctcgttcgggatcgccgagggggctgagatagtgaattcctaagaagaaaataatggattgcatattagttgttctctaagtggactcaacagtgtgcaagcttgttggaaaagccaaaagaagatggcaactccttatgtcccagttcctatgcccataggaaactctgcttccagttttacaacaaacagaaatcaaagaagttcttcttttggcagtgtctcaacaagctcaaattcttctaagggccagttagaagactcaaatatgggtaattttaaacagacaagtgttcctgatcaaatggataatacttcatctgtctgtagcagtcccctcattaggactaaatttacaggtacagcttcttccattgagtattctactagaccaagagacactgaagaacaaaatccggaaacagtgaattgggaagatagaccatctacacctactatactgggttatgaagtgatggaagaaagagctaaatttactgtatataaaatactagtaaagaaaaccccagaagaaagctgggtagttttcagaagatacactgacttctctaggcttaatgacaaattaaaagagatgtttccaggttttcgactagcacttcctccaaaacgctggtttaaagataattacaatgctgactttttagaagacagacaattaggattacaagcgtttcttcaaaatttagtagctcacaaggacattgctaactgccttgcagtgagagaatttctttgtttggatgatccaccgggtccatttgatagcctagaagaaagcagggcattctgtgaaactttagaagagacaaactaccgcttacagaaagaactacttgaaaaacaaaaggagatggaatcactaaagaaactgctcagtgagaagcaacttcatatagacactttagagaacagaatcagaacattgtctttagaacctgaagaatcactggatgtgtcagaaacagaaggtgaacagatcctaaaggtggagtcctctgcacttgaggttgatcaagatgtcctggatgaagaatctagagctgataataaaccatgcttaagttttagtgaacctgaaaatgctgtatcagagatagaagtagcagaagtggcatatgatgctgaagaagactaatgtatcacaagcagttccctccatttagactattcaaaaatttagaagagtggcaaatactattttaaaagaagaaccaagaactgtaaaacatatagaaaagagcaagaatgcacatgtataaagtttacataaagaagtttttttaagttattgagataggaaatatattcactgctgcttttaattgtattttatccaattacatttaatacactaaaaaaaatcttgttggaattctgttatcaaggcccacattcttaaatactgtgcataaattattatggtgttttgcctatatattgctccaaactactgtgtatatatgtatgtgtgttaaatcaccaattatattaatcaaatggaaattaattgcatgttactatctgggtgatatattcttctttatatctctgacatgacatattttcattaatagtttaaatcagtgaccatcataataaagataaaatttagttgagtttttaatgtttacatgtttacatctctaaataaaatttgcttatttgaaatgttaa

SEQ ID NO: 184964 - DNA, 3452 bp, Homo sapiens
  Payload ID: 16416
  Gene Symbol: SNX16
  Gene Name: sorting nexin 16
  Uniprot ID: P57768
  ENST ID: ENST00000396330
  CDS Start-End: 508-1542
gcccgggcagagactggctgaggcggggagcagctgcttttggggcgggggtgtcacgtgaggcttctcgctgctgagggaggaggcgaaaagctgcggttaaggagagtccggtttaaccgtcaccgggaagcgcgctcgttcgggatcgccgagggggctgagtactgtcaagatgataagcatggaataaagcttcagaagggtctttaccaatctttctcctaccaacttttacatacatgaaatcaggttaaaatgaactttacagaaatacttcacaagggaataaagtagaggaaaaagggataacatgtaacatggagtcaaggaaaaagagtgtgaagtagttttgctctctctatcttgcaaataggagtccttaaagacaactgggagaaggggtttgagatagtgaattcctaagaagaaaataatggattgcatattagttgttctctaagtggactcaacagtgtgcaagcttgttggaaaagccaaaagaagatggcaactccttatgtcccagttcctatgcccataggaaactctgcttccagttttacaacaaacagaaatcaaagaagttcttcttttggcagtgtctcaacaagctcaaattcttctaagggccagttagaagactcaaatatgggtaattttaaacagacaagtgttcctgatcaaatggataatacttcatctgtctgtagcagtcccctcattaggactaaatttacaggtacagcttcttccattgagtattctactagaccaagagacactgaagaacaaaatccggaaacagtgaattgggaagatagaccatctacacctactatactgggttatgaagtgatggaagaaagagctaaatttactgtatataaaatactagtaaagaaaaccccagaagaaagctgggtagttttcagaagatacactgacttctctaggcttaatgacaaattaaaagagatgtttccaggttttcgactagcacttcctccaaaacgctggtttaaagataattacaatgctgactttttagaagacagacaattaggattacaagcgtttcttcaaaatttagtagctcacaaggacattgctaactgccttgcagtgagagaatttctttgtttggatgatccaccgggtccatttgatagcctagaagaaagcagggcattctgtgaaactttagaagagacaaactaccgcttacagaaagaactacttgaaaaacaaaaggagatggaatcactaaagaaactgctcagtgagaagcaacttcatatagacactttagagaacagaatcagaacattgtctttagaacctgaagaatcactggatgtgtcagaaacagaaggtgaacagatcctaaaggtggagtcctctgcacttgaggttgatcaagatgtcctggatgaagaatctagagctgataataaaccatgcttaagttttagtgaacctgaaaatgctgtatcagagatagaagtagcagaagtggcatatgatgctgaagaagactaatgtatcacaagcagttccctccatttagactattcaaaaatttagaagagtggcaaatactattttaaaagaagaaccaagaactgtaaaacatatagaaaagagcaagaatgcacatgtataaagtttacataaagaagtttttttaagttattgagataggaaatatattcactgctgcttttaattgtattttatccaattacatttaatacactaaaaaaaatcttgttggaattctgttatcaaggcccacattcttaaatactgtgcataaattattatggtgttttgcctatatattgctccaaactactgtgtatatatgtatgtgtgttaaatcaccaattatattaatcaaatggaaattaattgcatgttactatctgggtgatatattcttctttatatctctgacatgacatattttcattaatagtttaaatcagtgaccatcataataaagataaaatttagttgagtttttaatgtttacatgtttacatctctaaataaaatttgcttatttgaaatgttaatgctctttagaaaaatgactttctagtaccaaaggaaaactacttgaaagagctgtaatcatatagctaaagtgataagatagccttgattttaaaagctgattcattaatatcaaaatactttaataagtgtcacagttattaatatgttacatttgtttagtttccacgtaatctttatctctacctagatttagtgagtttgcctctttcagaatactacctccttttgttaaggcatattctttcgaaaatatagattctaaataaataggggcttatacaaaaaagaaaataaaaagccatatatactgcaaagttcctaactggcttgactcctgacattgcatttttatttctatttgtgtgaagatgttgttatactgtattatggctgattttctttttaatatatttagccaagtgatgcactttatgataattaaactcttttgtgccaagtttaattggtggatttttttagtaagtagagttaggagaaagaattatgtagtgcctttactatttcactttctacaaaagtctcctagggtctttgagtcagctttatgaaaaaatgtttgtttatttcagctttgtgtacagtcattaaaagtgccttgtttcatttttataggatgaagttatttattttctattttcactgttttgcatattgctgttaataagcattgtaatcatgctggcattttgcaatcccagtcggtatgctttctaaaaactgagggaaacttactggggaaatagaataacaatctccatttttttctttactatctaaaagtttatcggtatcttgatgtatatatatattaaggtgtggctgtttaaaattctaatgacatatatcaacacattcaatggctgttgttaacctttgaagtaaaaaggagatcactttttaccaaataaccaaaaatttttagtctgtcaaagtgcacaggtatgttctcagaacatttttcacaatgtgtatcagaaatatgtttgctatccttagagacagaaatgaatataataaattgatctgcttatttattaaaattattattctagacttacaaaaggcttaaaaagaacaatcatttaatcagtaccattctgtatcttatataacagatctttgccaaattctagatattatagtgttgcctgtctgttctaaagcgaaccagccactttttcaatctggctttttggaagattgtatttaaagttcttcaaggatgaagaaaaaaatctgttaattaggtaaaccactattatttatatttataatttacttttttttacttttataatgcattttactcccagtattatgttcatttaataaattattttttcact

SEQ ID NO: 184965 - DNA, 742 bp, Homo sapiens
  Payload ID: 16416
  Gene Symbol: SNX16
  Gene Name: sorting nexin 16
  ENST ID: ENST00000519119
  CDS Start-End: 524-742
acagcagggatcttgggcccgggcagagactggctgaggcggggagcagctgcttttggggcgggggtgtcacgtgaggcttctcgctgctgagggaggaggcgaaaagctgcggttaaggagagtccggtttaaccgtcaccgggaagcgcgctcgttcgggatcgccgagggggctgagtactgtcaagatgataagcatggaataaagcttcagaagggtctttaccaatctttctcctaccaacttttacatacatgaaatcaggttaaaatgaactttacagaaatacttcacaagggaataaagtagaggaaaaagggataacatgtaacatggagtcaaggaaaaagagtgtgaagtagttttgctctctctatcttgcaaataggagtccttaaagacaactgggagaaggggtttgagatagtgaattcctaagaagaaaataatggattgcatattagttgttctctaagtggactcaacagtgtgcaagcttgttggaaaagccaaaagaagatggcaactccttatgtcccagttcctatgcccataggaaactctgcttccagttttacaacaaacagaaatcaaagaagttcttcttttggcagtgtctcaacaagctcaaattcttctaagggccagttagaagactcaaatatgggtacagcttcttccattgagtattctactagaccaagagacactgaagaacaaaatccggaaacagtgaat

SEQ ID NO: 184966 - DNA, 691 bp, Homo sapiens
  Payload ID: 16416
  Gene Symbol: SNX16
  Gene Name: sorting nexin 16
  ENST ID: ENST00000518183
  CDS Start-End: 439-691
gctgctgagggaggaggcgaaaagctgcggttaaggagagtccggtttaaccgtcaccgggaagcgcgctcgttcgggatcgccgagggggctgagtactgtcaagatgataagcatggaataaagcttcagaagggtctttaccaatctttctcctaccaacttttacatacatgaaatcaggttaaaatgaactttacagaaatacttcacaagggaataaagtagaggaaaaagggataacatgtaacatggagtcaaggaaaaagagtgtgaagtagttttgctctctctatcttgcaaataggagtccttaaagacaactgggagaaggggtttgagatagtgaattcctaagaagaaaataatggattgcatattagttgttctctaagtggactcaacagtgtgcaagcttgttggaaaagccaaaagaagatggcaactccttatgtcccagttcctatgcccataggaaactctgcttccagttttacaacaaacagaaatcaaagaagttcttcttttggcagtgtctcaacaagctcaaattcttctaagggccagttagaagactcaaatatgggtaattttaaacagacaagtgttcctgatcaaatggataatacttcatctgtctgtagcagtcccctcattaggactaaatttacaggtacagcttcttccattg

SEQ ID NO: 184967 - DNA, 880 bp, Homo sapiens
  Payload ID: 16416
  Gene Symbol: SNX16
  Gene Name: sorting nexin 16
  ENST ID: ENST00000519817
  CDS Start-End: 604-880
gtgcgtctgggaggcgctgggcgcgcaccggtcagcggaggcgggagagtctgtgatcccagggagctgcgggtctcgccgcctgcagtgcggaagacccgtgaccggcgcagaccccggccttaccttccgagggtcgaactgtgcctggtatttgcctctttcctcccgcccacggggttgctcagagtcgggccacctcacctgaggttttccagagtgagaatgaactgagcgtcctgggagcaactccgcatcaggtactgtcaagatgataagcatggaataaagcttcagaagggtctttaccaatctttctcctaccaacttttacatacatgaaatcaggttaaaatgaactttacagaaatacttcacaagggaataaagtagaggaaaaagggataacatgtaacatggagtcaaggaaaaagagtgtgaagtagttttgctctctctatcttgcaaataggagtccttaaagacaactgggagaaggggtttgagatagtgaattcctaagaagaaaataatggattgcatattagttgttctctaagtggactcaacagtgtgcaagcttgttggaaaagccaaaagaagatggcaactccttatgtcccagttcctatgcccataggaaactctgcttccagttttacaacaaacagaaatcaaagaagttcttcttttggcagtgtctcaacaagctcaaattcttctaagggccagttagaagactcaaatatgggtaattttaaacagacaagtgttcctgatcaaatggataatacttcatctgtctgtagcagtcccctcattaggactaaatttacaggtacagcttcttccattgagtattctactagaccaagagaca

SEQ ID NO: 184968 - DNA, 669 bp, Homo sapiens
  Payload ID: 16416
  Gene Symbol: SNX16
  Gene Name: sorting nexin 16
  ENST ID: ENST00000520618
  CDS Start-End: 182-669
aggaggcgaaaagctgcggttaaggagagtccggtttaaccgtcaccgggaagcgcgctcgttcgggatcgccgagggggctgagatagtgaattcctaagaagaaaataatggattgcatattagttgttctctaagtggactcaacagtgtgcaagcttgttggaaaagccaaaagaagatggcaactccttatgtcccagttcctatgcccataggaaactctgcttccagttttacaacaaacagaaatcaaagaagttcttcttttggcagtgtctcaacaagctcaaattcttctaagggccagttagaagactcaaatatgggtaattttaaacagacaagtgttcctgatcaaatggataatacttcatctgtctgtagcagtcccctcattaggactaaatttacaggtacagcttcttccattgagtattctactagaccaagagacactgaagaacaaaatccggaaacagtgaattgggaagatagaccatctacacctactatactgggttatgaagtgatggaagaaagagctaaatttactgcattctgtgaaactttagaagagacaaactaccgcttacagaaagaactacttgaaaaacaaaaggagatggaatcactaaagaaactgctcagtgagaagcaacttcatat

SEQ ID NO: 184969 - DNA, 804 bp, Homo sapiens
  Payload ID: 16416
  Gene Symbol: SNX16
  Gene Name: sorting nexin 16
  ENST ID: ENST00000521810
  CDS Start-End: 194-804
gatgactacaagtcccatgatgcaaagtatgagcacggaccaatgttggtcgcagttccttctgggaattgtagtcttctcctgtttggcaaactagatagtgaattcctaagaagaaaataatggattgcatattagttgttctctaagtggactcaacagtgtgcaagcttgttggaaaagccaaaagaagatggcaactccttatgtcccagttcctatgcccataggaaactctgcttccagttttacaacaaacagaaatcaaagaagttcttcttttggcagtgtctcaacaagctcaaattcttctaagggccagttagaagactcaaatatgggtaattttaaacagacaagtgttcctgatcaaatggataatacttcatctgtctgtagcagtcccctcattaggactaaatttacaggtacagcttcttccattgagtattctactagaccaagagacactgaagaacaaaatccggaaacagtgaattgggaagatagaccatctacacctactatactgggttatgaagtgatggaagaaagagctaaatttactgtatataaaatactagtaaagaaaaccccagaagaaagctgggtagttttcagaagatacactgacttctctaggcttaatgacaaattaaaagagatgtttccaggttttcgactagcacttcctccaaaacgctggtttaaagataattacaatgctgactttttagaagacagacaattaggattacaagcgtttcttcaaaatttagtagctcacaaggacattgctaactg

SEQ ID NO: 184970 - DNA, 682 bp, Homo sapiens
  Payload ID: 16416
  Gene Symbol: SNX16
  Gene Name: sorting nexin 16
  ENST ID: ENST00000523757
  CDS Start-End: 159-682
ggagagtccggtttaaccgtcaccgggaagcgcgctcgttcgggatcgccgagggggctgagatagtgaattcctaagaagaaaataatggattgcatattagttgttctctaagtggactcaacagtgtgcaagcttgttggaaaagccaaaagaagatggcaactccttatgtcccagttcctatgcccataggaaactctgcttccagttttacaacaaacagaaatcaaagaagttcttcttttggcagtgtctcaacaagctcaaattcttctaagggccagttagaagactcaaatatgggtacagcttcttccattgagtattctactagaccaagagacactgaagaacaaaatccggaaacagtgaattgggaagatagaccatctacacctactatactgggttatgaagtgatggaagaaagagctaaatttactgtatataaaatactagtaaagaaaaccccagaagaaagctgggtagttttcagaagatacactgacttctctaggcttaatgacaaattaaaagagatgtttccaggttttcgactagcacttcctccaaaacgctggtttaaagataattacaatgctgactttttagaagacagacaattaggattacaagcgtttcttcaaaatttagtagctcacaaggacattgctaactg

SEQ ID NO: 184971 - DNA, 577 bp, Homo sapiens
  Payload ID: 16416
  Gene Symbol: SNX16
  Gene Name: sorting nexin 16
  ENST ID: ENST00000521773
  CDS Start-End: 469-577
caaccttgatgtctggcgggcggcaaggggctccgcgggagagtggagaggcgccgcaggaagcccagccaccttcaggccaccgccgaccccactgtgcgtctgggaggcgctgggcgcgcaccgtactgtcaagatgataagcatggaataaagcttcagaagggtctttaccaatctttctcctaccaacttttacatacatgaaatcaggttaaaatgaactttacagaaatacttcacaagggaataaagtagaggaaaaagggataacatgtaacatggagtcaaggaaaaagagtgtgaagtagttttgctctctctatcttgcaaataggagtccttaaagacaactgggagaaggggtttgagatagtgaattcctaagaagaaaataatggattgcatattagttgttctctaagtggactcaacagtgtgcaagcttgttggaaaagccaaaagaagatggcaactccttatgtcccagttcctatgcccataggaaactctgcttccagttttacaacaaacagaaatcaaagaagttcttcttttggcagtgtctcaacaagct

SEQ ID NO: 184972 - DNA, 1918 bp, Homo sapiens
  Payload ID: 16416
  Gene Symbol: SNX16
  Gene Name: sorting nexin 16
  ENST ID: ENST00000615066
  CDS Start-End: 113-1144
ggagaaggggtttgagatagtgaattcctaagaagaaaataatggattgcatattagttgttctctaagtggactcaacagtgtgcaagcttgttggaaaagccaaaagaagatggcaactccttatgtcccagttcctatgcccataggaaactctgcttccagttttacaacaaacagaaatcaaagaagttcttcttttggcagtgtctcaacaagctcaaattcttctaagggccagttagaagactcaaatatgggtaattttaaacagacaagtgttcctgatcaaatggataatacttcatctgtctgtagcagtcccctcattaggactaaatttacaggtacagcttcttccattgagtattctactagaccaagagacactgaagaacaaaatccggaaacagtgaattgggaagatagaccatctacacctactatactgggttatgaagtgatggaagaaagagctaaatttactgtatataaaatactagtaaagaaaaccccagaagaaagctgggtagttttcagaagatacactgacttctctaggcttaatgacaaattaaaagagatgtttccaggttttcgactagcacttcctccaaaacgctggtttaaagataattacaatgctgactttttagaagacagacaattaggattacaagcgtttcttcaaaatttagtagctcacaaggacattgctaactgccttgcagtgagagaatttctttgtttggatgatccaccgggtccatttgatagcctagaagaaagcagggcattctgtgaaactttagaagagacaaactaccgcttacagaaagaactacttgaaaaacaaaaggagatggaatcactaaagaaactgctcagtgagaagcaacttcatatagacactttagagaacagaatcagaacattgtctttagaacctgaagaatcactggatgtgtcagaaacagaaggtgaacagatcctaaaggtggagtcctctgcacttgaggttgatcaagatgtctggatgagatctagagctgataataaaccatgcttaagttttagtgaacctgaaaatgctgtatcagagatagaagtagcagaagtggcatatgatgctgaagaagactaatgtatcacaagcagttccctccatttagactattcaaaaatttagaagagtggcaaatactattttaaaagaagaaccaagaactgtaaaacatatagaaaagagcaagaatgcacatgtataaagtttacataaagaagtttttttaagttattgagataggaaatatattcactgctgcttttaattgtattttatccaattacatttaatacactaaaaaaaatcttgttggaattctgttatcaaggcccacattcttaaatactgtgcataaattattatggtgttttgcctatatattgctccaaactactgtgtatatatgtatgtgtgttaaatcaccaattatattaatcaaatggaaattaattgcatgttactatctgggtgatatattcttctttatatctctgacatgacatattttcattaatagtttaaatcagtgaccatcataataaagataaaatttagttgagtttttaatgtttacatgtttacatctctaaataaaatttgcttatttgaaatgttaatgctctttagaaaaatgactttctagtaccaaaggaaaactacttgaaagagctgtaatcatatagctaaagtgataagatagccttgattttaaaagctgattcattaatatcaaaatactttaataagtgtcacagttattaatatgttacatttgtttagtttccacgtaatctttatctctacctagatttagtgagtttgcctctttcagaatactacctccttttgtta

SEQ ID NO: 184973 - DNA, 2044 bp, Homo sapiens
  Payload ID: 16417
  Gene Symbol: SNX17
  Gene Name: sorting nexin 17
  Uniprot ID: Q15036
  ENST ID: ENST00000233575
  CDS Start-End: 223-1635
ccctatccggacaggtggctcttgccctttagactacagttcccagcatgcccaggcgattgcgtcccagaaccgacgtcccaccgccttcccacatcggatcgcagggctcccaaaatggcgagtgaggctgcggggactcgctgagcagcggagggggagcgtgcagagccgctgcggccctcacagtccggagcccggccgtgccgtgccgtagggaacatgcacttttccattcccgaaaccgagtcccgcagcggggacagcggcggctccgcctacgtggcctataacattcacgtgaatggagtcctgcactgtcgggtgcgctacagccagctcctggggctgcacgagcagcttcggaaggagtatggggccaatgtgcttcctgcattccccccaaagaagcttttctctctgactcctgctgaggtagaacagaggagagagcagttagagaagtacatgcaagctgttcggcaagacccattgcttgggagcagcgagactttcaacagtttcctgcgtcgggcacaacaggagacacagcaggtccccacagaggaagtgtccttggaagtgctgctcagcaacgggcagaaagttctggtcaacgtgctaacttcagatcagactgaggatgtcctggaggctgtagctgcaaagctggatcttccagatgacttgattggatactttagtctattcttagttcgagaaaaagaggatggagccttttcttttgtacggaagttgcaagagtttgagctgccttatgtgtctgtcaccagccttcggagtcaagagtataagattgtgctaaggaagagttattgggactctgcctatgatgacgatgtcatggagaaccgggttggcctgaacctgctttatgctcagacggtatcagatattgagcgtgggtggatcttggtcaccaaggaacagcaccggcaactcaaatctctgcaagagaaagtctccaagaaggagttcctgagactggcccagacgctgcggcactatggctacttgcgctttgatgcctgtgtggctgacttcccagaaaaggactgtcctgtggtggtgagcgcgggcaacagtgagctcagcctgcagctccgcctgcctggccagcaactccgagaaggctccttccgggtcacccgcatgcgatgctggcgggtcacctcctctgtaccattgcccagtggaagcacgagcagcccaggccggggccggggtgaggtgcgcctggaactggcttttgaatacctcatgagcaaggaccggctacagtgggtcaccatcactagcccccaggctatcatgatgagcatctgcttgcagtccatggttgatgaactgatggtgaagaaatctggcggcagtatcaggaagatgctgcgccggcgggtggggggtactctgagacgctcagacagccagcaagcagtgaagtccccaccactgcttgagtcacctgatgccacccgggagtctatggtcaaactctcaagtaagctgagtgccgtgagcttgcggggaattggcagtcccagcacagatgccagtgccagtgatgtccacggcaatttcgccttcgagggcattggagatgaggatctgtaatctccactgcttggatgtctgccctctaccccagaggaatttacagaaacttgccctgtgcctgtgtcccccatgctaggggcggaggggtcttttccttcttctttcctacctaccccttttctcttggccaggggcctcgtatcctacctttccttgtcccctgggctggctgcacagaggattgccccttctcttttcagagctggccctcgatgccaaattagcatttagtattttgcacaaagtctaagggaccatggctgcctgccttggggaggaaccatatctccctctgggccgcttctggcctcttggagccatgggccaaaggccaaggggatgggcagaggtctgtgtttggtctggcccagttccccatcattaaactcagcctgactgctgccta

SEQ ID NO: 184974 - DNA, 1955 bp, Homo sapiens
  Payload ID: 16417
  Gene Symbol: SNX17
  Gene Name: sorting nexin 17
  ENST ID: ENST00000440760
  CDS Start-End: 128-289
atcggatcgcagggctcccaaaatggcgagtgaggctgcggggactcgctgagcagcggagggggagcgtgcagagccgctgcggccctcacagtccggagcccggccgtgccgtgccgtagggaacatgcacttttccattcccgaaaccgagtcccgcagcggggacagcggcggctccgcctacgtggcctataacattcacgtgaatggagtcctgcactgtcgggtgcgctacagccagctcctggggctgcacgagcaggtgggactagcacccctgccttgagacagcttcaagcccttccctacacgtggacatcagtgtctccctttacccgctcttcttgttcccgtaggctgtagttcccctttaatcactgccacaggttcggcaagacccattgcttgggagcagcgagactttcaacagtttcctgcgtcgggcacaacaggagacacagcaggtccccacagaggaagtgtccttggaagtgctgctcagcaacgggcagaaagttctggtcaacgtgctaacttcagatcagactgaggatgtcctggaggctgtagctgcaaagctggatcttccagatgacttgattggatactttagtctattcttagttcgagaaaaagaggatggagccttttcttttgtacggaagttgcaagagtttgagctgccttatgtgtctgtcaccagccttcggagtcaagagtataagattgtgctaaggaagagttattgggactctgcctatgatgacgatgtcatggagaaccgggttggcctgaacctgctttatgctcagacggtatcagatattgagcgtgggtggatcttggtcaccaaggaacagcaccggcaactcaaatctctgcaagagaaagtctccaagaaggagttcctgagactggcccagacgctgcggcactatggctacttgcgctttgatgcctgtgtggctgacttcccagaaaaggactgtcctgtggtggtgagcgcgggcaacagtgagctcagcctgcagctccgcctgcctggccagcaactccgagaaggctccttccgggtcacccgcatgcgatgctggcgggtcacctcctctgtaccattgcccagtggaagcacgagcagcccaggccggggccggggtgaggtgcgcctggaactggcttttgaatacctcatgagcaaggaccggctacagtgggtcaccatcactagcccccaggctatcatgatgagcatctgcttgcagtccatggttgatgaactgatggtgaagaaatctggcggcagtatcaggaagatgctgcgccggcgggtggggggtactctgagacgctcagacagccagcaagcagtgaagtccccaccactgcttgagtcacctgatgccacccgggagtctatggtcaaactctcaagtaagctgagtgccgtgagcttgcggggaattggcagtcccagcacagatgccagtgccagtgatgtccacggcaatttcgccttcgagggcattggagatgaggatctgtaatctccactgcttggatgtctgccctctaccccagaggaatttacagaaacttgccctgtgcctgtgtcccccatgctaggggcggaggggtcttttccttcttctttcctacctaccccttttctcttggccaggggcctcgtatcctacctttccttgtcccctgggctggctgcacagaggattgccccttctcttttcagagctggccctcgatgccaaattagcatttagtattttgcacaaagtctaagggaccatggctgcctgccttggggaggaaccatatctccctctgggccgcttctggcctcttggagccatgggccaaaggccaaggggatgggcagaggtctgtgtttggtctggcccagttccccatcattaaactcagcctgactgctgcct

SEQ ID NO: 184975 - DNA, 1638 bp, Homo sapiens
  Payload ID: 16417
  Gene Symbol: SNX17
  Gene Name: sorting nexin 17
  ENST ID: ENST00000453453
  CDS Start-End: 80-289
ctgagcagcggagggggagcgtgcagagccgctgcggccctcacagtccggagcccggccgtgccgtgccgtagggaacatgcacttttccattcccgaaaccgagtcccgcagcggggacagcggcggctccgcctacgtgttcggcaagacccattgcttgggagcagcgagactttcaacagtttcctgcgtcgggcacaacaggagacacagcaggtccccacagaggaagtgtccttggaagtgctgctcagcaacgggcagaaagttctggtcaacgtgctaacttcagatcagactgaggatgtcctggaggctgtagctgcaaagctggatcttccagatgacttgattggatactttagtctattcttagttcgagaaaaagaggatggagccttttcttttgtacggaagttgcaagagtttgagctgccttatgtgtctgtcaccagccttcggagtcaagagtataagattgtgctaaggaagagacggtatcagatattgagcgtgggtggatcttggtcaccaaggaacagcaccggcaactcaaatctctgcaagagaaagtctccaagaaggagttcctgagactggcccagacgctgcggcactatggctacttgcgctttgatgcctgtgtggctgacttcccagaaaaggactgtcctgtggtggtgagcgcgggcaacagtgagctcagcctgcagctccgcctgcctggccagcaactccgagaaggctccttccgggtcacccgcatgcgatgctggcgggtcacctcctctgtaccattgcccagtggaagcacgagcagcccaggccggggccggggtgaggtgcgcctggaactggcttttgaatacctcatgagcaaggaccggctacagtgggtcaccatcactagcccccaggctatcatgatgagcatctgcttgcagtccatggttgatgaactgatggtgaagaaatctggcggcagtatcaggaagatgctgcgccggcgggtggggggtactctgagacgctcagacagccagcaagcagtgaagtccccaccactgcttgagtcacctgatgccacccgggagtctatggtcaaactctcaagtaagctgagtgccgtgagcttgcggggaattggcagtcccagcacagatgccagtgccagtgatgtccacggcaatttcgccttcgagggcattggagatgaggatctgtaatctccactgcttggatgtctgccctctaccccagaggaatttacagaaacttgccctgtgcctgtgtcccccatgctaggggcggaggggtcttttccttcttctttcctacctaccccttttctcttggccaggggcctcgtatcctacctttccttgtcccctgggctggctgcacagaggattgccccttctcttttcagagctggccctcgatgccaaattagcatttagtattttgcacaaagtctaagggaccatggctgcctgccttggggaggaaccatatctccctctgggccgcttctggcctcttggagccatgggccaaaggccaaggggatgggcagaggtctgtgtttggtctggcccagttccccatcattaaactcagcctgactgctgccta

SEQ ID NO: 184976 - DNA, 2007 bp, Homo sapiens
  Payload ID: 16417
  Gene Symbol: SNX17
  Gene Name: sorting nexin 17
  ENST ID: ENST00000427123
  CDS Start-End: 117-380
gggctcccaaaatggcgagtgaggctgcggggactcgctgagcagcggagggggagcgtgcagagccgctgcggccctcacagtccggagcccggccgtgccgtgccgtagggaacatgcacttttccattcccgaaaccgagtcccgcagcggggacagcggcggctccgcctacgtggcctataacattcacgtgaatggagtcctgcactgtcgggtgcgctacagccagctcctggggctgcacgagcagcttcggaaggagtatggggccaatgtgcttcctgcattccccccaaagaagcttttctctctgactcctgctgaggtagaacagaggagagagcagttagagaagtacatgcaagctgttctatagactggactcacctagatggcagccaagggtggggcaggtgaagaatttatgcaaacagtgagtgagttcggcaagacccattgcttgggagcagcgagactttcaacagtttcctgcgtcgggcacaacaggagacacagcaggtccccacagaggaagtgtccttggaagtgctgctcagcaacgggcagaaagttctggtcaacgtgctaacttcagatcagactgaggatgtcctggaggctgtagctgcaaagctggatcttccagatgacttgattggatactttagtctattcttagttcgagaaaaagaggatggagccttttcttttgtacggaagttgcaagagtttgagctgccttatgtgtctgtcaccagccttcggagtcaagagtataagattgtgctaaggaagagttattgggactctgcctatgatgacgatgtcatggagaaccgggttggcctgaacctgctttatgctcagacggtatcagatattgagcgtgggtggatcttggtcaccaaggaacagcaccggcaactcaaatctctgcaagagaaagtctccaagaaggagttcctgagactggcccagacgctgcggcactatggctacttgcgctttgatgcctgtgtggctgacttcccagaaaaggactgtcctgtggtggtgagcgcgggcaacagtgagctcagcctgcagctccgcctgcctggccagcaactccgagaaggctccttccgggtcacccgcatgcgatgctggcgggtcacctcctctgtaccattgcccagtggaagcacgagcagcccaggccggggccggggtgaggtgcgcctggaactggcttttgaatacctcatgagcaaggaccggctacagtgggtcaccatcactagcccccaggctatcatgatgagcatctgcttgcagtccatggttgatgaactgatggtgaagaaatctggcggcagtatcaggaagatgctgcgccggcgggtggggggtactctgagacgctcagacagccagcaagcagtgaagtccccaccactgcttgagtcacctgatgccacccgggagtctatggtcaaactctcaagtaagctgagtgccgtgagcttgcggggaattggcagtcccagcacagatgccagtgccagtgatgtccacggcaatttcgccttcgagggcattggagatgaggatctgtaatctccactgcttggatgtctgccctctaccccagaggaatttacagaaacttgccctgtgcctgtgtcccccatgctaggggcggaggggtcttttccttcttctttcctacctaccccttttctcttggccaggggcctcgtatcctacctttccttgtcccctgggctggctgcacagaggattgccccttctcttttcagagctggccctcgatgccaaattagcatttagtattttgcacaaagtctaagggaccatggctgcctgccttggggaggaaccatatctccctctgggccgcttctggcctcttggagccatgggccaaaggccaaggggatgggcagaggtctgtgtttggtctggcccagttccccatcattaaactcagcctgactgct

SEQ ID NO: 184977 - DNA, 2400 bp, Homo sapiens
  Payload ID: 16417
  Gene Symbol: SNX17
  Gene Name: sorting nexin 17
  Uniprot ID: Q15036
  ENST ID: ENST00000537606
  CDS Start-End: 249-1586
aatgagggccaactccactttgggctccctatccggacaggtggctcttgccctttagactacagttcccagcatgcccaggcgattgcgtcccagaaccgacgtcccaccgccttcccacatcggatcgcagggctcccaaaatggcgagtgaggctgcggggactcgctgagcagcggagggggagcgtgcagagccgctgcggccctcacagtccggagcccggccgtgccgtgccgtagggaacatgcacttttccattcccgaaaccgagtcccgcagcggggacagcggcggctccgcctacgtgcttcggaaggagtatggggccaatgtgcttcctgcattccccccaaagaagcttttctctctgactcctgctgaggtagaacagaggagagagcagttagagaagtacatgcaagctgttcggcaagacccattgcttgggagcagcgagactttcaacagtttcctgcgtcgggcacaacaggagacacagcaggtccccacagaggaagtgtccttggaagtgctgctcagcaacgggcagaaagttctggtcaacgtgctaacttcagatcagactgaggatgtcctggaggctgtagctgcaaagctggatcttccagatgacttgattggatactttagtctattcttagttcgagaaaaagaggatggagccttttcttttgtacggaagttgcaagagtttgagctgccttatgtgtctgtcaccagccttcggagtcaagagtataagattgtgctaaggaagagttattgggactctgcctatgatgacgatgtcatggagaaccgggttggcctgaacctgctttatgctcagacggtatcagatattgagcgtgggtggatcttggtcaccaaggaacagcaccggcaactcaaatctctgcaagagaaagtctccaagaaggagttcctgagactggcccagacgctgcggcactatggctacttgcgctttgatgcctgtgtggctgacttcccagaaaaggactgtcctgtggtggtgagcgcgggcaacagtgagctcagcctgcagctccgcctgcctggccagcaactccgagaaggctccttccgggtcacccgcatgcgatgctggcgggtcacctcctctgtaccattgcccagtggaagcacgagcagcccaggccggggccggggtgaggtgcgcctggaactggcttttgaatacctcatgagcaaggaccggctacagtgggtcaccatcactagcccccaggctatcatgatgagcatctgcttgcagtccatggttgatgaactgatggtgaagaaatctggcggcagtatcaggaagatgctgcgccggcgggtggggggtactctgagacgctcagacagccagcaagcagtgaagtccccaccactgcttgagtcacctgatgccacccgggagtctatggtcaaactctcaagtaagctgagtgccgtgagcttgcggggaattggcagtcccagcacagatgccagtgccagtgatgtccacggcaatttcgccttcgagggcattggagatgaggatctgtaatctccactgcttggatgtctgccctctaccccagaggaatttacagaaacttgccctgtgcctgtgtcccccatgctaggggcggaggggtcttttccttcttctttcctacctaccccttttctcttggccaggggcctcgtatcctacctttccttgtcccctgggctggctgcacagaggattgccccttctcttttcagagctggccctcgatgccaaattagcatttagtattttgcacaaagtctaagggaccatggctgcctgccttggggaggaaccatatctccctctgggccgcttctggcctcttggagccatgggccaaaggccaaggggatgggcagaggtctgtgtttggtctggcccagttccccatcattaaactcagcctgactgctgcctacctctggttccctctcactgcccctgcttcccccatcacagcatggactactatgctaagggtaaggccaaattgcctgccattgccaattcagcatagacatggctttgttagtgtttcctttattataaagcactgaaataagttaaataaacaggtgggaggctgggcagtcccccagccggtttgtccacagcccctgggggcagtggaggtgaatacagggcccttctcactgagctcgtgaagtgcctcagtcaaggcaaggtcccctggtccatatgggcccccccgcccatggggttgggctggtccttatagtgcctacgttagtctgtgtggagcccctggccagcgggggagaaaaaggtggcttctggtccgtctgtataaaacatggggaag

SEQ ID NO: 184978 - DNA, 2152 bp, Homo sapiens
  Payload ID: 16418
  Gene Symbol: SNX18
  Gene Name: sorting nexin 18
  Uniprot ID: Q96RF0
  ENST ID: ENST00000326277
  CDS Start-End: 195-2081
agtcggcgctgcgaagtggaggcgctgcgagcggagccgcgcggagggcgcgaccggctggtccgggcagcgtgggtttgccgccttcggggctccagtccgcgcgccagggctcgagcagtaccgcgggcccctcaggtgggcctcggctcgggacgccgggagtcgggaccgccagtcggggcgccgggaccatggcgctgcgcgcccgggcgctgtacgacttcaggtcggagaacccaggagagatctcgctgcgagagcacgaggtgctgagcctgtgcagcgagcaggacatcgagggctggctcgagggggtcaacagccgcggcgaccgcggcctcttcccggcctcctatgtgcaggtgatccgcgcccccgagcctggcccggcgggagacggcggcccgggcgccccggcccgctacgccaatgtgccccccgggggcttcgagcccctgcctgtcgcgccccccgcctccttcaagccgccgcctgacgccttccaggcgctgctgcagccacagcaggcgccgcctccgagcaccttccagccgcccggcgcgggcttcccgtacggcgggggcgccctgcagccgtcgcctcagcagctctacggcggctaccaggccagccaaggcagcgatgatgactgggacgacgagtgggacgacagctccacggtggcggacgagccgggcgctctgggcagcggagcatacccggacctcgacggctcgtcttcggcgggtgtgggcgcagccggccgctaccgcctgtccacgcgctccgacctgtccctgggttcccgcggcggctcggtccccccgcagcaccacccgtcggggcccaagagctcggccaccgtgagccgcaacctcaatcgcttctccaccttcgtcaagtccggcggggaggccttcgtgctgggggaggcgtcaggcttcgtgaaggacggggacaagctgtgcgtggtgctggggccctatggccccgagtggcaggagaacccctacccgttccagtgcaccatcgacgaccccaccaagcagaccaagttcaagggcatgaagagctacatctcctacaagctggtgcccacgcacacgcaggtgccggtgcatcggcgctacaagcacttcgactggctgtacgcgcgcctggcggagaagttcccggtcatctccgtgccccacctgcccgagaagcaggccaccggccgcttcgaggaggacttcatctctaagcgcaggaagggcctgatctggtggatgaaccacatggccagccacccagtgctggcgcagtgcgacgtcttccagcacttcctgacgtgccccagcagcaccgacgagaaagcctggaagcagggcaagaggaaggccgagaaggacgagatggtgggcgccaacttcttcctgacccttagcacgccccccgccgctgcccttgacctgcaggaggtggagagcaagatcgacggcttcaagtgcttcaccaagaagatggacgacagcgcgctgcagctcaaccacacggccaacgagttcgcgcgcaagcaggtgaccggcttcaaaaaggagtatcagaaggtgggccagtccttccgcggcctcagccaggcctttgagctggaccagcaggccttctcggtgggcctgaaccaggctatcgccttcaccggagatgcctatgacgccattggcgagctcttcgcggagcagcccaggcaggacctggatcccgtcatggacctattagcgctgtatcaggggcatctggctaacttcccggacatcatccacgttcagaaaggtaaagcctggcccttagagcaggtgatatggagtgtattgtgcaggctgaaaggggcgactttgacagcagtaccactgtgggtttcagaatcatattctacaggtgaggaagcgagcagagacgtggacgcctgggtcttttccctagagtgtaagttggattgctcgacaggcagcttcctcctcgagtatcttgcattagggaatgagtactctttctcgaaggttcaaagagtacctttgatgacagtgctatcattttagagtttgaatagttgagtaatgagctgctcaaatctgtaatcttgagacgagggtagaattagaaggggacc

SEQ ID NO: 184979 - DNA, 5375 bp, Homo sapiens
  Payload ID: 16418
  Gene Symbol: SNX18
  Gene Name: sorting nexin 18
  Uniprot ID: Q96RF0
  ENST ID: ENST00000343017
  CDS Start-End: 195-1970
agtcggcgctgcgaagtggaggcgctgcgagcggagccgcgcggagggcgcgaccggctggtccgggcagcgtgggtttgccgccttcggggctccagtccgcgcgccagggctcgagcagtaccgcgggcccctcaggtgggcctcggctcgggacgccgggagtcgggaccgccagtcggggcgccgggaccatggcgctgcgcgcccgggcgctgtacgacttcaggtcggagaacccaggagagatctcgctgcgagagcacgaggtgctgagcctgtgcagcgagcaggacatcgagggctggctcgagggggtcaacagccgcggcgaccgcggcctcttcccggcctcctatgtgcaggtgatccgcgcccccgagcctggcccggcgggagacggcggcccgggcgccccggcccgctacgccaatgtgccccccgggggcttcgagcccctgcctgtcgcgccccccgcctccttcaagccgccgcctgacgccttccaggcgctgctgcagccacagcaggcgccgcctccgagcaccttccagccgcccggcgcgggcttcccgtacggcgggggcgccctgcagccgtcgcctcagcagctctacggcggctaccaggccagccaaggcagcgatgatgactgggacgacgagtgggacgacagctccacggtggcggacgagccgggcgctctgggcagcggagcatacccggacctcgacggctcgtcttcggcgggtgtgggcgcagccggccgctaccgcctgtccacgcgctccgacctgtccctgggttcccgcggcggctcggtccccccgcagcaccacccgtcggggcccaagagctcggccaccgtgagccgcaacctcaatcgcttctccaccttcgtcaagtccggcggggaggccttcgtgctgggggaggcgtcaggcttcgtgaaggacggggacaagctgtgcgtggtgctggggccctatggccccgagtggcaggagaacccctacccgttccagtgcaccatcgacgaccccaccaagcagaccaagttcaagggcatgaagagctacatctcctacaagctggtgcccacgcacacgcaggtgccggtgcatcggcgctacaagcacttcgactggctgtacgcgcgcctggcggagaagttcccggtcatctccgtgccccacctgcccgagaagcaggccaccggccgcttcgaggaggacttcatctctaagcgcaggaagggcctgatctggtggatgaaccacatggccagccacccagtgctggcgcagtgcgacgtcttccagcacttcctgacgtgccccagcagcaccgacgagaaagcctggaagcagggcaagaggaaggccgagaaggacgagatggtgggcgccaacttcttcctgacccttagcacgccccccgccgctgcccttgacctgcaggaggtggagagcaagatcgacggcttcaagtgcttcaccaagaagatggacgacagcgcgctgcagctcaaccacacggccaacgagttcgcgcgcaagcaggtgaccggcttcaaaaaggagtatcagaaggtgggccagtccttccgcggcctcagccaggcctttgagctggaccagcaggccttctcggtgggcctgaaccaggctatcgccttcaccggagatgcctatgacgccattggcgagctcttcgcggagcagcccaggcaggacctggatcccgtcatggacctattagcgctgtatcaggggcatctggctaacttcccggacatcatccacgttcagaaaggtaaagcctggcccttagagcaggtgatatggagtgtattgtgcaggctgaaaggggcgactttgacagcagtaccactgtgggtttcagaatcatattctacaggtgaggaagcgagcagagacgtggacgcctgggtcttttccctagagtgagctcttaccaaagtcaaggagagtaggcgacacgtggaggaagggaagatggaggtgcagaaggctgacggcattcaggatcgctgtaacactatttcttttgccactttggctgaaattcaccacttccatcaaattcgagtgagagactttaaatcacagatgcagcatttcttacaacaacaaataatatttttccaaaaagttacccagaagttggaagaagctcttcacaaatatgatagtgtttaatgactggacgttggattatggactttttcagttcaaggataatttctacagcagaataaaaactgctgtcaaagagctattgccagctatcagtggtggtacaaggacggttttgtgttcatctgaaacccagctgaatttataattatgtaggaaataaacagttaatatggttatataatagaaacagtaccacacattgtaactaaattatactatgtatgcctacactaccattgtaacttttggaataatgattatactatttgccttattgctttttgaagtatgggtattttagtgcatactttgtagacctcaaaacccatgaagggtctcaaagaagctggctggatacaagcctgctgtggatgcctttttactctcatagattgggattacctaaattcaacctattctctgtttacaaactccaactagagcagctatgcgaccttgtgcctttagactcttggtttttcatttctccccgtcccttccccacctttttaaagtaagccacagcttttctgattgaaagagtgaaaggccagtgcatataatgacaaactgatgataaccttatattggcagtagggggtggggggggcggtggggtgggacgatcagctgtcatcaatttgcacagcaagtattatctcctgataagatgctggtgaatgcaggggagtgagattcattgctcatctttggatatgaagtctgttagggaagaaacagtgccactattcccttagatgcaacagtagcatagcctcttcacccaggcgtcccaaaagcttggcgtgaagatttcagcaaacatgtcttacaacatgaggaggaggagtctaaatcagtcaggggataaaagtatcgaatcattgacaacacacacttggctttagttcttaggagggttttgtttttgtttttgtttttaggttgaagattttcttttaatattcagttttttgaaaaaaaatggatctacactgttaactgattgagactccactgtgattcacttgtttacttaaaaacttttcagggatgtctgtaaatttcagtgttaatatgtcatgaaaagtggtgtggattgatctaaggagggaccagaaataatttttgctattccaaatactgaaggaaaaagataattgatttatactatgttttaaaaaaaaaaaaggtattgatgagccccccccccccaggacatttaaccttaaaatttattttaaatgtattcttttattattataagggaaatacagatggctgataaataccaaaaagattcaaaagcagcttaatttaaaaagcacaaagagattctggcttacagtgccccaatctcaatgtttttatagttgctgagctaactaatgtgattattgagtttacagatttaaaaattgtcactgttagagtatctactgtttttatgaagtcaaacttatgctgcctcagaaatccctgggtactgaaatggtaacatggaagtgaagaggtcactttgaaatattggtgagtcacaaagattaaagaaaaggatcagtttgcagatactcagaaaaggttattgaaataattactgaacagcacattttctctctaaaaagtagtttcatatgggttgtatttttaagatcagattatcattttgatatttggtcaaaattttgtaccttaggttacttagagccagatttaacatcatgaacattatgtggctttgtctttactacagatatgtggaactgtaaccaaatatgttgtctctaaaacttgttgattgcaaaatacagttctataaacaaaacccatatgtatatataaatgttaattttgcggaagtctggaaattataactatagcatttaagtttgagtctgtattggacaaataagcaccatgcttttcaaatgatttaaaaattacttttatttgcctctttattttgatggtggttggatttttttttttttaatagtaaaatcactaaacttgtgcaatggtagcatggaaattatctgaggtatattgtatgattgtactttagccagggtggacatagcttaaattataaaaactaaagatgaaagtacaaggaagtataagttatacttatgtaagtataaattcatgctgcctacttctaagagaaatttcattcttcataaccacataacattataatgccactgattcatacgggatttacattaattctatgggggaggacactagaattattagtgttcattttcatctaagatctttattctctaacgttcttggtcctattgaaacattgcagtatgcaaaactactgcaatgttaaacccaagagaaaagccattatcatgtgtatgctggtcatcatgatcagtgtggtacaatttttaaaaataaactatcatgcccttcatgccattatttgtctttatttctatgatttataatcctgatatgtgatgtgtttgtaacacagggtgtgcacttgagcctggttttactgtttttattagacagagttgtttatatgctgtaactgtaacgcagcgagactggttctacagccatgtgtcgtaatcttgttccccgtccaagctgttgtatctgaaggtacccagtttgcacccaggatgagggaacgcattcaaaagtgaaatgtaaagccagtgcacgaatattatagtaattgagattttcccaggcttcactgatacagttgttttgcatttattcacaataatacagcagattcttaaatgccgatttttaattgtcttaaattttgctgctgttctcataattaaggacttgaaaaatgttttagtctgtcaagtatgtaaagtttgtgtaaaaacttttaaatgtcattcttaagttcattgccatagccattttccatttatgtcttcattttccaaaaatcaaatgccatgtctgatacctttaagtccataagcattcaattttctcatttccaccttcatctttggttaacagaataagtaaaacagggtattatttatttgtagtctagaaatgttgaatattgttttatttccttcaaaatgttatgattagtgcagatcagccatgtttatctttttaaaaaataaacaggttgctttatttctt

SEQ ID NO: 184980 - DNA, 5218 bp, Homo sapiens
  Payload ID: 16418
  Gene Symbol: SNX18
  Gene Name: sorting nexin 18
  Uniprot ID: Q96RF0
  ENST ID: ENST00000381410
  CDS Start-End: 191-2065
ggcgctgcgaagtggaggcgctgcgagcggagccgcgcggagggcgcgaccggctggtccgggcagcgtgggtttgccgccttcggggctccagtccgcgcgccagggctcgagcagtaccgcgggcccctcaggtgggcctcggctcgggacgccgggagtcgggaccgccagtcggggcgccgggaccatggcgctgcgcgcccgggcgctgtacgacttcaggtcggagaacccaggagagatctcgctgcgagagcacgaggtgctgagcctgtgcagcgagcaggacatcgagggctggctcgagggggtcaacagccgcggcgaccgcggcctcttcccggcctcctatgtgcaggtgatccgcgcccccgagcctggcccggcgggagacggcggcccgggcgccccggcccgctacgccaatgtgccccccgggggcttcgagcccctgcctgtcgcgccccccgcctccttcaagccgccgcctgacgccttccaggcgctgctgcagccacagcaggcgccgcctccgagcaccttccagccgcccggcgcgggcttcccgtacggcgggggcgccctgcagccgtcgcctcagcagctctacggcggctaccaggccagccaaggcagcgatgatgactgggacgacgagtgggacgacagctccacggtggcggacgagccgggcgctctgggcagcggagcatacccggacctcgacggctcgtcttcggcgggtgtgggcgcagccggccgctaccgcctgtccacgcgctccgacctgtccctgggttcccgcggcggctcggtccccccgcagcaccacccgtcggggcccaagagctcggccaccgtgagccgcaacctcaatcgcttctccaccttcgtcaagtccggcggggaggccttcgtgctgggggaggcgtcaggcttcgtgaaggacggggacaagctgtgcgtggtgctggggccctatggccccgagtggcaggagaacccctacccgttccagtgcaccatcgacgaccccaccaagcagaccaagttcaagggcatgaagagctacatctcctacaagctggtgcccacgcacacgcaggtgccggtgcatcggcgctacaagcacttcgactggctgtacgcgcgcctggcggagaagttcccggtcatctccgtgccccacctgcccgagaagcaggccaccggccgcttcgaggaggacttcatctctaagcgcaggaagggcctgatctggtggatgaaccacatggccagccacccagtgctggcgcagtgcgacgtcttccagcacttcctgacgtgccccagcagcaccgacgagaaagcctggaagcagggcaagaggaaggccgagaaggacgagatggtgggcgccaacttcttcctgacccttagcacgccccccgccgctgcccttgacctgcaggaggtggagagcaagatcgacggcttcaagtgcttcaccaagaagatggacgacagcgcgctgcagctcaaccacacggccaacgagttcgcgcgcaagcaggtgaccggcttcaaaaaggagtatcagaaggtgggccagtccttccgcggcctcagccaggcctttgagctggaccagcaggccttctcggtgggcctgaaccaggctatcgccttcaccggagatgcctatgacgccattggcgagctcttcgcggagcagcccaggcaggacctggatcccgtcatggacctattagcgctgtatcaggggcatctggctaacttcccggacatcatccacgttcagaaaggagctcttaccaaagtcaaggagagtaggcgacacgtggaggaagggaagatggaggtgcagaaggctgacggcattcaggatcgctgtaacactatttcttttgccactttggctgaaattcaccacttccatcaaattcgagtgagagactttaaatcacagatgcagcatttcttacaacaacaaataatatttttccaaaaagttacccagaagttggaagaagctcttcacaaatatgatagtgtttaatgactggacgttggattatggactttttcagttcaaggataatttctacagcagaataaaaactgctgtcaaagagctattgccagctatcagtggtggtacaaggacggttttgtgttcatctgaaacccagctgaatttataattatgtaggaaataaacagttaatatggttatataatagaaacagtaccacacattgtaactaaattatactatgtatgcctacactaccattgtaacttttggaataatgattatactatttgccttattgctttttgaagtatgggtattttagtgcatactttgtagacctcaaaacccatgaagggtctcaaagaagctggctggatacaagcctgctgtggatgcctttttactctcatagattgggattacctaaattcaacctattctctgtttacaaactccaactagagcagctatgcgaccttgtgcctttagactcttggtttttcatttctccccgtcccttccccacctttttaaagtaagccacagcttttctgattgaaagagtgaaaggccagtgcatataatgacaaactgatgataaccttatattggcagtagggggtggggggggcggtggggtgggacgatcagctgtcatcaatttgcacagcaagtattatctcctgataagatgctggtgaatgcaggggagtgagattcattgctcatctttggatatgaagtctgttagggaagaaacagtgccactattcccttagatgcaacagtagcatagcctcttcacccaggcgtcccaaaagcttggcgtgaagatttcagcaaacatgtcttacaacatgaggaggaggagtctaaatcagtcaggggataaaagtatcgaatcattgacaacacacacttggctttagttcttaggagggttttgtttttgtttttgtttttaggttgaagattttcttttaatattcagttttttgaaaaaaaatggatctacactgttaactgattgagactccactgtgattcacttgtttacttaaaaacttttcagggatgtctgtaaatttcagtgttaatatgtcatgaaaagtggtgtggattgatctaaggagggaccagaaataatttttgctattccaaatactgaaggaaaaagataattgatttatactatgttttaaaaaaaaaaaaggtattgatgagccccccccccccaggacatttaaccttaaaatttattttaaatgtattcttttattattataagggaaatacagatggctgataaataccaaaaagattcaaaagcagcttaatttaaaaagcacaaagagattctggcttacagtgccccaatctcaatgtttttatagttgctgagctaactaatgtgattattgagtttacagatttaaaaattgtcactgttagagtatctactgtttttatgaagtcaaacttatgctgcctcagaaatccctgggtactgaaatggtaacatggaagtgaagaggtcactttgaaatattggtgagtcacaaagattaaagaaaaggatcagtttgcagatactcagaaaaggttattgaaataattactgaacagcacattttctctctaaaaagtagtttcatatgggttgtatttttaagatcagattatcattttgatatttggtcaaaattttgtaccttaggttacttagagccagatttaacatcatgaacattatgtggctttgtctttactacagatatgtggaactgtaaccaaatatgttgtctctaaaacttgttgattgcaaaatacagttctataaacaaaacccatatgtatatataaatgttaattttgcggaagtctggaaattataactatagcatttaagtttgagtctgtattggacaaataagcaccatgcttttcaaatgatttaaaaattacttttatttgcctctttattttgatggtggttggatttttttttttttaatagtaaaatcactaaacttgtgcaatggtagcatggaaattatctgaggtatattgtatgattgtactttagccagggtggacatagcttaaattataaaaactaaagatgaaagtacaaggaagtataagttatacttatgtaagtataaattcatgctgcctacttctaagagaaatttcattcttcataaccacataacattataatgccactgattcatacgggatttacattaattctatgggggaggacactagaattattagtgttcattttcatctaagatctttattctctaacgttcttggtcctattgaaacattgcagtatgcaaaactactgcaatgttaaacccaagagaaaagccattatcatgtgtatgctggtcatcatgatcagtgtggtacaatttttaaaaataaactatcatgcccttcatgccattatttgtctttatttctatgatttataatcctgatatgtgatgtgtttgtaacacagggtgtgcacttgagcctggttttactgtttttattagacagagttgtttatatgctgtaactgtaacgcagcgagactggttctacagccatgtgtcgtaatcttgttccccgtccaagctgttgtatctgaaggtacccagtttgcacccaggatgagggaacgcattcaaaagtgaaatgtaaagccagtgcacgaatattatagtaattgagattttcccaggcttcactgatacagttgttttgcatttattcacaataatacagcagattcttaaatgccgatttttaattgtcttaaattttgctgctgttctcataattaaggacttgaaaaatgttttagtctgtcaagtatgtaaagtttgtgtaaaaacttttaaatgtcattcttaagttcattgccatagccattttccatttatgtcttcattttccaaaaatcaaatgccatgtctgatacctttaagtccataagcattcaattttctcatttccaccttcatctttggttaacagaataagtaaaacagggtattatttatttgtagtctagaaatgttgaatattgttttatttccttcaaaatgttatgattagtgcagatcagccatgtttatctttttaaaaaataaacaggttgctttatttctt

SEQ ID NO: 184981 - DNA, 6535 bp, Homo sapiens
  Payload ID: 16419
  Gene Symbol: SNX19
  Gene Name: sorting nexin 19
  Uniprot ID: Q92543
  ENST ID: ENST00000265909
  CDS Start-End: 571-3549
atgcctcgctcccgtcgacgtcgacccggaagctgtcgccggcggccggccggcggtcagccttcacacaggcccggctgcggagcgcagtcgcccaggtttacggcggcagagggccgaggctcccggagaggaccgcgatgagtccacttcaggtcggggctgagtgtgggcgcgcggttcccggcggcgtgtgacccagtcttcgccggccgctgcccgctgcgtgtgtaagtgtccgtgggccccagggccttgcagcgcccgccccgaggccccgaagaggccttccgcctggggcagtgtgaaggccacagagttttcctccaaagccacacctcagctggaaggggcgagttggagggctctgttagtggtagccatggggagacgcggagctgcagctgtcgctttgcagtgcctgtaggactttgagggcctggagccccggttccctgaacagcacccagatcgccccatatctgagacacagttcatgccccccttccctaactctgaagtaaaatcttgagggctgtcatctggggaagccaccttgtccgttcagccatgaagacagaaacagtgccaccgttccaggaaactccagctggatcgagctgtcacctcaataacctgttgagtagccggaagctgatggctgtgggggtcttgcttggctggctcctggtcatacaccttctggtcaacgtgtggctgctgtgccttctgtcggcattgctagtggtgctgggaggatggctgggctccagcctcgctggagtggcttcaggtcgactgcatctggaacgcttcatcccgttggccacctgtcctccatgccctgaggcagaaaggcagctggaacgggagatcaaccgcaccatccagatgattattcgagattttgtgttatcttggtaccgttccgtgagccaggagccagcctttgaggaagaaatggaggcagccatgaaagggttggtccaggagcttcggagaaggatgagcgtgatggacagtcatgctgttgcccagagtgttctgactctctgcggttgtcacctgcagagctacattcaggcaaaggaggccactgcagggaagaatggtccagttgagccttcccacctctgggaggcttactgccgggcgactgccccacatcctgctgtgcacagccccagtgctgaagtcacctatacgcgtggcgttgtgaatttgttgcttcaagggctggtgcccaagccccacttggagactcgtaccggacgccatgtagtggtcgaactcatcacatgcaatgtaatcttaccactgatcagcaggctgtcagatcctgactggatccaccttgtactcgtgggtatcttttccaaggccagagatccagcaccctgcccagccagtgcccccgaacagccctcagtgccgacatctctgccactgattgctgaggtagagcagcttccagaagggagagcttctccagtagcagccccagtattcctaagttacagtgagccagagggttctgcaggcccctctccagaggttgaagaaggccacgaagctgtagagggagatttgggtgggatgtgtgaagaaagaaaagtaggaaacaactcatctcatttcctacagccaaatgttcgaggtcccctgttcttatgtgaagactcagagctggagtctccgctgtctgaactgggcaaagaaaccatcatgctcatgactccaggcagctttctctctgacaggattcaggatgccctgtgtgccctagagagttcccaggctctggaacccaaagatggtgaggcatctgaaggagcagaggctgaggagggtccagggacagaaacagagacaggcctgccggtctccacactgaattcctgcccagagatccatattgacacagcagacaaggagatagaacaaggagatgttaccgcctctgttacagctttgctggaggggccagaaaagacctgcccctcacggccgtcatgcttagagaaggatctcaccaatgatgtgagctcccttgatcctactctgccaccagttctgctttcctcctctccacctggtcctctcagctcagccaccttcagctttgagcccctaagcagtcccgatggtccagttatcatccagaaccttcgtatcactggcaccattacagcccgagagcacagtggcactggattccacccatacacactctatactgtgaagtacgagacagcccttgacggtgaaaacagcagcggcctgcagcagctggcctaccacactgtgaatcgtcgctatcgggagttcttgaatctgcagacccgtctggaggagaaaccagatctacgaaagttcatcaaaaatgtgaagggtcctaaaaagctctttccagatcttccattgggaaacatggacagtgacagagtagaagcccgtaagagcctcctagaatcattcctaaagcaactctgtgccattccggagatcgctaacagtgaggaggtgcaggagttccttgctctgaacacagatgctcgtattgcctttgtcaagaaaccatttatggtctctagaatagacaagatggtggtgagtgccattgtggacaccttgaagacagcgtttcctcgctctgaaccccagagccccacagaggagctgagtgaggccgagaccgaaagcaagccccagacagaaggcaagaaggctagcaagtctaggctgaggttctcatccagtaaaatttctccagcactaagtgtgactgaagcacaagacaagattctttattgtctccaggaaggcaatgtggagtctgagactctatccatgtctgcgatggaatcttttattgaaaaacagacaaagttactggaaatgcagccaacaaaagccccagaaaaagatcctgaacaacctcccaaaggacgtgtggacagttgcgtgtcagatgcagccgtgccagcccaagaccccagcaacagcgatccaggaacagagacagagttagctgacacagccctggatctgctcctcttgctactaacagaacagtggaaatggctatgtaccgaaaacatgcaaaagtttcttcgtcttatctttgggaccctagttcaaaggtggctagaggtgcaggtagctaatttaacaagtccacagcgctgggtgcagtacctcctgcttcttcaggagtccatctggcctggtggagttttgcctaagtttccacggcccgtaaggacccaagagcagaaactggctgctgagaaacaggctttgcagagcctgatgggagtcctcccagatctcgtagtagaaattcttggggtgaacaaatgccggctgagctggggtctagtcctggagtcactacaacaacccctcatcaacaggcatttgatttactgccttggggacatcatcctggaattcttggatctcagtgcctctgttgaggagtctgctgctaccacctctgcctcagataccccaggcaactctaagaggatgggtgtctcctcttagctggttattcacgccttcttcccaggtcagggaagtagagttactcggccaccagagaccagtcaggaagcccgtgccctcttcaagtaggctacagctaagaaggcctaggttctcggtggctcacttctctcccacttctgctccatttgtagcaggtgacaggggtctgtgtgtcccagttgtatgcacgtttatttccctgttccttttgtgatgttgggattgttgctggtgagtagatcctgtttcctttgggaaaagaagctgtgaggtagaggaatgaaccccttttgcttctccttttgccatcctccctgagattgtttgccagaatcctggccctgtgcacacatgtgcttaatccaccagcacacaagctctagatagaacaggaaaaaaactgtggccagatttccttggaggagaaaacaaccttctcagctctctgttcctacccggaaactaaaaattcattcagggccattctcaaaaaccagactcctgggtctaatctagtttcccaacagttccagaagaagaaggagggaagaaaatttttcaaggaacttcttgctcatgtgttgctgtttcccaacacatcagccttatggaagatgtcatgaggctgcttgcctgggaggctacactttcctttccagaagacttcaaagctgactgccaaagcttctggtaaatccaccccacccttcacaccctttcctgaaaggcatttataccacccattttatttattggctttgctcccaaccccctgccctagagcaattgagtttttgaatttttgaccctctctctgtcttcagcaaaactgcatgacaagctgcatattcagcctcagtttttccaaggagaatggaaagcacttgcctcctgtcttaagaatgcacaaagagtaggactagcaaggctgggggatgaaatctcccttcctaagtctttgacagagaacttttattattctgaacagataagattagcaaacttacaaggaatagcttcttatttcccattccttacggttataatcagtcctttaacaacaccagcatgaaggcaaaggtgttttgtcagactgcaacatctattagaaaggcaaggcaactgggaattgctggagaaggataaatcaggaggaattgctggtagaaaaggctgcagacagtcacagggaagtgctgtatattaaatgcatgtgaatagctggcaaaaagatgtcaaggatgtcactgggagccctttggcttcacactcgcctgttagcgccttgctttcgctgaattaccagagcctaccactcggaggaaggtcttggagttagactgatgagaaggcaatggggtgtcaaaaacaagtgtcaaagttctcttagattctgaagtcggtgatgagcacacaattaaagtggtttgtggaagaaagttgtaaaatctttttacttttttgcccctctggaggcttttaaccctaaattgtgtctgatgtattcgggaggcttaggtgtgcaattcttgcccaaaggcaaggagatgaatgagatgtctcatggcctcttctagccttaaaagttgaccattacagtgactttatggctccaaagttcttgaagcatctccagccctagactttgacaagaaaaggtagctcagcatctctactttccgtgagtacctgcaggagtccagccaatgtattagagctgatcattaagctccttcagtgagggctaagatcctattctcgatgagcatagggggacagccttgttttatgccacttttctctccccatacctaccttcccctcatgtgtacttagccacctgtgttgctttgaatctgctgccagttctggctcaaatgtggcacaaaatcagtacatcagacacaccatgaaatccctgtggctataaattctaaggaatcttttgacacttccagcccaaagaacttatttttatttcgtattatataagagtccccacctctactccacgtaccccaaaaagataagctgtcctcagatcctccttctacccaggagggaaataatggatattgccaagggaacaatcagaactcatctggctttgaaaacgacctgccaagtttggctagcaggttcagacaacaagagagtaacaattggtagagagccacaggtagaaaagatactcccagctgacagggtgataaaaggcagggaagaattgggcctgtgctgatccaggaaggttttattgtttgcttgttttttgtatttactcgtgactaaattttattcatttaagtcagaattttgatatttgaaataagactactttcccttttcttactatctataaaaaagacgaggcagggatgctgtgttctttctgtcaaattctaaatgtgatctttgccattgcttatttgaattcaagaaagctatactttttcatcacatataactcacagtttcatttttgcattgttggattagacttaataaaacctaaatggaaaataaattcctaaatctgagcctaggagcatgtataaattttatttttattattattatacattaagttctagggaacatgtgcacaacatgcaggtttgttgcatatgtatacatgtgccgtgttggtgtgctgcacccgttaactcgtcatttacattaggtatatctcctgatgctatcccttccccctcccccgacctcacaacaggccccagtgtgtgatgttcaccttcctgtgtccaagtgttctcattgttcaattcccacctatgagtgagagcatgtataaattttaaaatcaatacaagctactccaatttccattttggaaatttccagtttacaaggtgattttcttattgttgtaaagaaacacataatgtgagatctaccctcttaagtgtacagtacattatttatttattttgagacggtacattattaactagaagcagcacag

SEQ ID NO: 184982 - DNA, 888 bp, Homo sapiens
  Payload ID: 16419
  Gene Symbol: SNX19
  Gene Name: sorting nexin 19
  ENST ID: ENST00000426933
  CDS Start-End: 35-517
aaattggtgggaaatatactttagctctaatataatgctggccccgaaagatttctcggagaggattcagccttcctgggagggaggctggtgtgcaaatgcagcatcaaggtggctagaggtgcaggtagctaatttaacaagtccacagcgctgggtgcagtacctcctgcttcttcaggagtccatctggcctggtggagttttgcctaagtttccacggcccgtaaggacccaagagcagaaactggctgctgagaaacaggctttgcagagcctgatgggagtcctcccagatctcgtagtagaaattcttggggtgaacaaatgccggctgagctggggtctagtcctggagtcactacaacaacccctcatcaacaggcatttgatttactgccttggggacatcatcctggaattcttggatctcagtgcctctgttgaggagtctgctgctaccacctctgcctcagataccccaggcaactctaagaggatgggtgtctcctcttagctggttattcacgccttcttcccaggtcagggaagtagagttactcggccaccagagaccagtcaggaagcccgtgccctcttcaagtaggctacagctaagaaggcctaggttctcggtggctcacttctctcccacttctgctccatttgtagcaggtgacaggggtctgtgtgtcccagttgtatgcacgtttatttccctgttccttttgtgatgttgggattgttgctggtgagtagatcctgtttcctttgggaaaagaagctgtgaggtagaggaatgaaccccttttgcttctccttttgccatcctccctgagattgtttgccagaatcctggccctgtgcacacatgtgcttaatccacca

SEQ ID NO: 184983 - DNA, 1562 bp, Homo sapiens
  Payload ID: 16419
  Gene Symbol: SNX19
  Gene Name: sorting nexin 19
  ENST ID: ENST00000530356
  CDS Start-End: 415-1533
agccttcacacaggcccggctgcggagcgcagtcgcccaggtttacggcggcagagggccgaggctcccggagaggaccgcgatgagtccacttcaggtcggggctgagtgtgggcgcgcggttcccggcggcgtgtgacccagtcttcgccggccgctgcccgctgcgtgtgattcaggatgccctgtgtgccctagagagttcccaggctctggaacccaaagatgtacgagacagcccttgacggtgaaaacagcagcggcctgcagcagctggcctaccacactgtgaatcgtcgctatcgggagttcttgaatctgcagacccgtctggaggagaaaccagatctacgaaagttcatcaaaaatgtgaagggtcctaaaaagctctttccagatcttccattgggaaacatggacagtgacagagtagaagcccgtaagagcctcctagaatcattcctaaagcaactctgtgccattccggagatcgctaacagtgaggaggtgcaggagttccttgctctgaacacagatgctcgtattgcctttgtcaagaaaccatttatggtctctagaatagacaagatggtggtgagtgccattgtggacaccttgaagacagcgtttcctcgctctgaaccccagagccccacagaggagctgagtgaggccgagaccgaaagcaagccccagacagaaggcaagaaggctagcaagtctaggctgaggttctcatccagtaaaatttctccagcactaagtgtgactgaagcacaagacaagattctttattgtctccaggaaggcaatgtggagtctgagactctatccatgtctgcgatggaatcttttattgaaaaacagacaaagttactggaaatgcagccaacaaaagccccagaaaaagatcctgaacaacctcccaaaggacgtgtggacagttgcgtgtcagatgcagccgtgccagcccaagaccccagcaacagcgatccaggaacagagacagagttagctgacacagccctggatctgctcctcttgctactaacagaacagtggaaatggctatgtaccgaaaacatgcaaaagtttcttcgtcttatctttgggaccctagttcaaaggtggctagaggtgcaggtagctaatttaacaagtccacagcgctgggtgcagtacctcctgcttcttcaggagtccatctggcctggtggagttttgcctaagtttccacggcccgtaaggacccaagagcagaaactggctgctgagaaacaggctttgcagagcctgatgggagtcctcccagatctcgtagtagaaattcttggggtgaacaaatgccggctgagctggggtctagtcctggagtcactacaacaacccctcatcaacaggcatttgatttactgccttggggacatcatcctggaattcttggatctcagtgcctctgttgaggagtctgctgctaccacctctgcctcagataccccaggcaactctaagaggatgggtgtctcctcttagctggttattcacgccttcttcccaggtca

SEQ ID NO: 184984 - DNA, 1656 bp, Homo sapiens
  Payload ID: 16419
  Gene Symbol: SNX19
  Gene Name: sorting nexin 19
  ENST ID: ENST00000534726
  CDS Start-End: 494-1192
cactattggttttggcttcttttcccatggcgttgtttgttttactcctcaaggaaaaagatttttatggccatggaaaaaaggaaagatagttggcactaagtcattagctggtattcgaccttcctactggataaggctttgctagatagcctggcccctctccttgtcctgttgcataaagtgctgtgaggcgactgcttgcttggcggtttccatctgtggatgtggatggactgaccctgcacctctgacccctgcagatggtggtgagtgccattgtggacaccttgaagacagcgtttcctcgctctgaaccccagagccccacagaggagctgagtgaggccgagaccgaaagcaagccccagacagaaggtctaggctgaggttctcatccagtaaaatttctccagcactaagtgtgactgaagcacaagacaagattctttattgtctccaggaaggcaatgtggagtctgagactctatccatgtctgcgatggaatcttttattgaaaaacagacaaagttactggaaatgcagccaacaaaagccccagaaaaagatcctgaacaacctcccaaaggacgtgtggacagttgcgtgtcagatgcagccgtgccagcccaagaccccagcaacagcgatccaggaacagagacagagttagctgacacagccctggatctgctcctcttgctactaacagaacagtggaaatggctatgtaccgaaaacatgcaaaagtttcttcgtcttatctttgggaccctagttcaaaggtggctagaggtgcaggtagctaatttaacaagtccacagcgctgggtgcagtacctcctgcttcttcaggagtccatctggcctggtggagttttgcctaagtttccacggcccgtaaggacccaagagcagaaactggctgctgagaaacaggctttgcagagcctgatgggagtcctcccagatctcgtagtagaaattcttggggtgaacaaatgccggctgagctggggtctagtcctggagtcactacaacaacccctcatcaacaggcatttgatttactgccttggggacatcatcctggaattcttggatctcagtgcctctgttgaggagtctgctgctaccacctctgcctcagataccccaggcaactctaagaggatgggtgtctcctcttagctggttattcacgccttcttcccaggtcagggaagtagagttactcggccaccagagaccagtcaggaagcccgtgccctcttcaagtaggctacagctaagaaggcctaggttctcggtggctcacttctctcccacttctgctccatttgtagcaggtgacaggggtctgtgtgtcccagttgtatgcacgtttatttccctgttccttttgtgatgttgggattgttgctggtgagtagatcctgtttcctttgggaaaagaagctgtgaggtagaggaatgaaccccttttgcttctccttttgccatcctccctgagattgtttgccagaatcctggccctgtgcacacatgtgcttaatccaccagcacacaagctctagatagaacaggaaaaaaactgtggccagatttccttggaggagaaaacaaccttctcagctctctgttcctacccggaa

SEQ ID NO: 184985 - DNA, 1506 bp, Homo sapiens
  Payload ID: 16419
  Gene Symbol: SNX19
  Gene Name: sorting nexin 19
  ENST ID: ENST00000528555
  CDS Start-End: 359-1477
agccttcacacaggcccggctgcggagcgcagtcgcccaggtttacggcggcagagggccgaggctcccggagaggaccgcgatgagtccacttcaggtcggggctgagtgtgggcgcgcggttcccggcggcgtgtgacccagtcttcgccggccgctgcccgctgcgtgttacgagacagcccttgacggtgaaaacagcagcggcctgcagcagctggcctaccacactgtgaatcgtcgctatcgggagttcttgaatctgcagacccgtctggaggagaaaccagatctacgaaagttcatcaaaaatgtgaagggtcctaaaaagctctttccagatcttccattgggaaacatggacagtgacagagtagaagcccgtaagagcctcctagaatcattcctaaagcaactctgtgccattccggagatcgctaacagtgaggaggtgcaggagttccttgctctgaacacagatgctcgtattgcctttgtcaagaaaccatttatggtctctagaatagacaagatggtggtgagtgccattgtggacaccttgaagacagcgtttcctcgctctgaaccccagagccccacagaggagctgagtgaggccgagaccgaaagcaagccccagacagaaggcaagaaggctagcaagtctaggctgaggttctcatccagtaaaatttctccagcactaagtgtgactgaagcacaagacaagattctttattgtctccaggaaggcaatgtggagtctgagactctatccatgtctgcgatggaatcttttattgaaaaacagacaaagttactggaaatgcagccaacaaaagccccagaaaaagatcctgaacaacctcccaaaggacgtgtggacagttgcgtgtcagatgcagccgtgccagcccaagaccccagcaacagcgatccaggaacagagacagagttagctgacacagccctggatctgctcctcttgctactaacagaacagtggaaatggctatgtaccgaaaacatgcaaaagtttcttcgtcttatctttgggaccctagttcaaaggtggctagaggtgcaggtagctaatttaacaagtccacagcgctgggtgcagtacctcctgcttcttcaggagtccatctggcctggtggagttttgcctaagtttccacggcccgtaaggacccaagagcagaaactggctgctgagaaacaggctttgcagagcctgatgggagtcctcccagatctcgtagtagaaattcttggggtgaacaaatgccggctgagctggggtctagtcctggagtcactacaacaacccctcatcaacaggcatttgatttactgccttggggacatcatcctggaattcttggatctcagtgcctctgttgaggagtctgctgctaccacctctgcctcagataccccaggcaactctaagaggatgggtgtctcctcttagctggttattcacgccttcttcccaggtca

SEQ ID NO: 184986 - DNA, 3096 bp, Homo sapiens
  Payload ID: 16419
  Gene Symbol: SNX19
  Gene Name: sorting nexin 19
  Uniprot ID: Q92543
  ENST ID: ENST00000533214
  CDS Start-End: 511-2922
ccttcacacaggcccggctgcggagcgcagtcgcccaggtttacggcggcagagggccgaggctcccggagaggaccgcgatgagtccacttcaggtcggggctgagtgtgggcgcgcggttcccggcggcgtgtgacccagtcttcgccggccgctgcccgctgcgtgtgtaagtgtccgtgggccccagggccttgcagcgcccgccccgaggccccgaagaggccttccgcctggggcagtgtgaaggccacagagttttcctccaaagccacacctcagctggaaggggcgagttggagggctctgttagtggtagccatggggagacgcggagctgcagctgtcgctttgcagtgcctgtaggactttgagggcctggagccccggttccctgaacagcacccagatcgccccatatctgagacacagttcatgccccccttccctaactctgaagtaaaatcttgagggctgtcatctggggaagccaccttgtccgttcagccatgaagacagaaacagtgccaccgttccaggaaactccagctggatcgagctgtcacctcaataacctgttgagtagccggaagctgatggctgtgggggtcttgcttggctggctcctggtcatacaccttctggtcaacgtgtggctgctgtgccttctgtcggcattgctagtggtgctgggaggatggctgggctccagcctcgctggagtggcttcaggtcgactgcatctggaacgcttcatcccgttggccacctgtcctccatgccctgaggcagaaaggcagctggaacgggagatcaaccgcaccatccagatgattattcgagattttgtgttatcttggtaccgttccgtgagccaggagccagcctttgaggaagaaatggaggcagccatgaaagggttggtccaggagcttcggagaaggatgagcgtgatggacagtcatgctgttgcccagagtgttctgactctctgcggttgtcacctgcagagctacattcaggcaaaggaggccactgcagggaagaatggtccagttgagccttcccacctctgggaggcttactgccgggcgactgccccacatcctgctgtgcacagccccagtgctgaagtcacctatacgcgtggcgttgtgaatttgttgcttcaagggctggtgcccaagccccacttggagactcgtaccggacgccatgtagtggtcgaactcatcacatgcaatgtaatcttaccactgatcagcaggctgtcagatcctgactggatccaccttgtactcgtgggtatcttttccaaggccagagatccagcaccctgcccagccagtgcccccgaacagccctcagtgccgacatctctgccactgattgctgaggtagagcagcttccagaagggagagcttctccagtagcagccccagtattcctaagttacagtgagccagagggttctgcaggcccctctccagaggttgaagaaggccacgaagctgtagagggagatttgggtgggatgtgtgaagaaagaaaagtaggaaacaactcatctcatttcctacagccaaatgttcgaggtcccctgttcttatgtgaagactcagagctggagtctccgctgtctgaactgggcaaagaaaccatcatgctcatgactccaggcagctttctctctgacaggattcaggatgccctgtgtgccctagagagttcccaggctctggaacccaaagatggtgaggcatctgaaggagcagaggctgaggagggtccagggacagaaacagagacaggcctgccggtctccacactgaattcctgcccagagatccatattgacacagcagacaaggagatagaacaaggagatgttaccgcctctgttacagctttgctggaggggccagaaaagacctgcccctcacggccgtcatgcttagagaaggatctcaccaatgatgtgagctcccttgatcctactctgccaccagttctgctttcctcctctccacctggtcctctcagctcagccaccttcagctttgagcccctaagcagtcccgatggtccagttatcatccagaaccttcgtatcactggcaccattacagcccgagagcacagtggcactggattccacccatacacactctatactgtgaagtacgagacagcccttgacggtgaaaacagcagcggcctgcagcagctggcctaccacactgtgaatcgtcgctatcgggagttcttgaatctgcagacccgtctggaggagaaaccagatctacgaaagttcatcaaaaatgtgaagggtcctaaaaagctctttccagatcttccattgggaaacatggacagtgacagagtagaagcccgtaagagcctcctagaatcattcctaaagcaactctgtgccattccggagatcgctaacagtgaggaggtgcaggagttccttgctctgaacacagatgctcgtattgcctttgtcaagaaaccatttatggtctctagaatagacaagatggtggtgagtgccattgtggacaccttgaagacagcgtttcctcgctctgaaccccagagccccacagaggagctgagtgaggccgagaccgaaagcaagccccagacagaaggcaagaaggctagcaagtctaggctgaggttctcatccagtaaaatttctccagcactaagtgtgactgaagcacaagacaagattctttattgtctccaggaaggcaatgtgacaaagttactggaaatgcagccaacaaaagccccagaaaaagatcctgaacaacctcccaaaggacgtgtggacagttgcgtgtcagatgcagccgtgccagcccaagaccccagcaacagcgatccagctgagcatgccatgtgttgaactccagtgttggaggtgctgtgttggggcacagagatgagtagtacatagttgccacagcggaatcaagcagcagaacagggcacaaacacaggaagttctaatccagcaggatgagatcatgctgataatattgataactcattaaacttatttttggcatgctttggcata

SEQ ID NO: 184987 - DNA, 2128 bp, Homo sapiens
  Payload ID: 16420
  Gene Symbol: SNX2
  Gene Name: sorting nexin 2
  Uniprot ID: O60749
  ENST ID: ENST00000379516
  CDS Start-End: 109-1668
aggccggccgggggcggggaggctggcgggtcggcgcgggcccagccgtgcgtgctcacgtgacgggtccgcgaggcccagctcgcgcagtcgttcgggtgagcgaagatggcggccgagagggaacctcctccgctgggggacgggaagcccaccgactttgaggatctggaggacggagaggacctgttcaccagcactgtctccaccctagagtcaagtccatcatctccagaaccagctagtcttcctgcagaagatattagtgcaaactccaatggcccaaaacccacagaagttgtattagatgatgacagagaagatctttttgcagaagccacagaagaagtttctttggacagccctgaaagggaacctatcctatcctcggaaccttctcctgcagtcacacctgtcactcctactacactcattgctcctagaattgaatcaaagagtatgtctgctcccgtgatctttgatagatccagggaagagattgaagaagaagcaaatggagacatttttgacatagaaattggtgtatcagatccagaaaaagttggtgatggcatgaatgcctatatggcatatagagtaacaacaaagacatctctttccatgttcagtaagagtgaattttcagtgaaaagaagattcagcgactttcttggtttgcacagcaaattagcaagcaaatatttacatgttggttatattgtgccaccagctccagaaaagagtatagtagggatgaccaaggtcaaagtgggtaaagaagactcatcatccactgagtttgtagaaaaacggagagcagctcttgaaaggtatcttcaaagaacagtaaaacatccaactttactacaggatcctgatttaaggcagttcttggaaagttcagagctgcctagagcagttaatacacaggctctgagtggagcaggaatattgaggatggtgaacaaggctgccgacgctgtcaacaaaatgacaatcaagatgaatgaatcggatgcatggtttgaagaaaagcagcagcaatttgagaatctggatcagcaacttaggaaacttcatgtcagtgttgaagccttggtctgtcatagaaaagaactttcagccaacacagctgcctttgctaaaagtgctgccatgttaggtaattctgaggatcatactgctttatctagagctttgtctcagcttgcagaggttgaggagaagatagaccagttacatcaagaacaagcttttgctgacttttatatgttttcagaactacttagtgactacattcgtcttattgctgcagtgaaaggtgtgtttgaccatcgaatgaagtgctggcagaaatgggaagatgctcaaattactttgctcaaaaaacgtgaagctgaagcaaaaatgatggttgctaacaaaccagataaaatacagcaagctaaaaatgaaataagagagtgggaggcgaaagtgcaacaaggggaaagagattttgaacagatatctaaaacgattcgaaaagaagtgggaagatttgagaaagaacgagtgaaggattttaaaaccgttatcatcaagtacttagaatcactagttcaaacacaacaacagctgataaaatactgggaagcattcctacctgaagccaaagccattgcctagcaataagattgttgccgttaagaagaccttggatgttgttccagttatgctggattccacagtgaaatcatttaaaaccatctaaataaaccactatatattttatgaattacatgtggttttatatacacacacacacacacacacacacacacacacacactctgacattttattacaagctgcatgtcctgaccctctttgaattaagtggactgtggcatgacattctgcaatactttgctgaattgaacactattgtgtcttaaatacttgcactaaatagtgcactgcaagaccagaaaattttacaatattttttctttacaatatgttctgtagtatgtttaccctctttatgaagtgaattaccaatgctttgaataatgttcacttatacattcctgtacagaaattacgattttgtgattacagtaataaaatgatattccttgtgaaa

SEQ ID NO: 184988 - DNA, 2119 bp, Homo sapiens
  Payload ID: 16420
  Gene Symbol: SNX2
  Gene Name: sorting nexin 2
  Uniprot ID: O60749
  ENST ID: ENST00000514949
  CDS Start-End: 804-2012
accctagaggtgagaccgcgtcgctgcgggtgctgcgctgcgtagctgccgcgcgtctcacctttcccctgccccgacttgtccctccccatcccccgtgtttgcaaggaccgtcttggggtgacacctgtgacgcgagccccacctccggtgcctgtcagagggatgtgcttgggctgagcgcagggcctcctcaggagagcagcctgcggcccgcgggtgccgacctaatcctcagaggggccagaaccgaaccgagcattgcagcggcgctttcccagctcagctggccttcctcggtgtctcttgcacgtcctcctcttcaagccggagaagggcttgctctgcatcccagtaaacctccaccgagctcttttgaaggggtgctcgcttttcctttccagagggagggtgtgccgctgccaggggagcgcaatgaagtgagcgctgaggggccgagggtctgtggggaacgaatgggtgcactttcccaggaatggcccttcacggactgctggttcctcttgagggagctgcttctgatttggactgttaaatagtcaagtccatcatctccagaaccagctagtcttcctgcagaagatattagtgcaaactccaatggcccaaaacccacagaagttgtattagatgatgacagagaagatctttttgcagaagccacagaagaagtttctttggacagccctgaaagggaacctatcctatcctcggaaccttctcctgcagtcacacctgtcactcctactacactcattgctcctagaattgaatcaaagagtatgtctgctcccgtgatctttgatagatccagggaagagattgaagaagaagcaaatggagacatttttgacatagaaattggtgtatcagatccagaaaaagttggtgatggcatgaatgcctatatggcatatagagtaacaacaaagacatctctttccatgttcagtaagagtgaattttcagtgaaaagaagattcagcgactttcttggtttgcacagcaaattagcaagcaaatatttacatgttggttatattgtgccaccagctccagaaaagagtatagtagggatgaccaaggtcaaagtgggtaaagaagactcatcatccactgagtttgtagaaaaacggagagcagctcttgaaaggtatcttcaaagaacagtaaaacatccaactttactacaggatcctgatttaaggcagttcttggaaagttcagagctgcctagagcagttaatacacaggctctgagtggagcaggaatattgaggatggtgaacaaggctgccgacgctgtcaacaaaatgacaatcaagatgaatgaatcggatgcatggtttgaagaaaagcagcagcaatttgagaatctggatcagcaacttaggaaacttcatgtcagtgttgaagccttggtctgtcatagaaaagaactttcagccaacacagctgcctttgctaaaagtgctgccatgttaggtaattctgaggatcatactgctttatctagagctttgtctcagcttgcagaggttgaggagaagatagaccagttacatcaagaacaagcttttgctgacttttatatgttttcagaactacttagtgactacattcgtcttattgctgcagtgaaaggtgtgtttgaccatcgaatgaagtgctggcagaaatgggaagatgctcaaattactttgctcaaaaaacgtgaagctgaagcaaaaatgatggttgctaacaaaccagataaaatacagcaagctaaaaatgaaataagagagtgggaggcgaaagtgcaacaaggggaaagagattttgaacagatatctaaaacgattcgaaaagaagtgggaagatttgagaaagaacgagtgaaggattttaaaaccgttatcatcaagtacttagaatcactagttcaaacacaacaacagctgataaaatactgggaagcattcctacctgaagccaaagccattgcctagcaataagattgttgccgttaagaagaccttggatgttgttccagttatgctggattccacagtgaaatcatttaaaaccatctaaataaaccactatatattttatg

SEQ ID NO: 184989 - DNA, 819 bp, Homo sapiens
  Payload ID: 16420
  Gene Symbol: SNX2
  Gene Name: sorting nexin 2
  ENST ID: ENST00000505934
  CDS Start-End: 23-819
gcagtcgttcgggtgagcgaagatggcggccgagagggaacctcctccgctgggggacgggaagcccaccgactttgaggatctggaggacggagaggacctgttcaccagcactgtctccaccctagagtcaagtccatcatctccagaaccagctagtcttcctgcagaagatattagtgcaaactccaatggcccaaaacccacagaagttgtattagatgatgacagagaagatctttttgcagccacagaagaagtttctttggacagccctgaaagggaacctatcctatcctcggaaccttctcctgcagtcacacctgtcactcctactacactcattgctcctagaattgaatcaaagagtatgtctgctcccgtgatctttgatagatccagggaagagattgaagaagaagcaaatggagacatttttgacatagaaattggtgtatcagatccagaaaaagttggtgatggcatgaatgcctatatggcatatagagtaacaacaaagacatctctttccatgttcagtaagagtgaattttcagtgaaaagaagattcagcgactttcttggtttgcacagcaaattagcaagcaaatatttacatgttggttatattgtgccaccagctccagaaaagagtatagtagggatgaccaaggtcaaagtgggtaaagaagactcatcatccactgagtttgtagaaaaacggagagcagctcttgaaaggtatcttcaaagaacagtaaaacatccaactttactacaggatcctgatttaaggcagttcttggaaagttcagaggt

SEQ ID NO: 184990 - DNA, 763 bp, Homo sapiens
  Payload ID: 16420
  Gene Symbol: SNX2
  Gene Name: sorting nexin 2
  ENST ID: ENST00000512394
  CDS Start-End: 26-256
cgcgcagtcgttcgggtgagcgaagatggcggccgagagggaacctcctccgctgggggacgggaagcccaccgactttgaggatctggaggacggagaggacctgttcaccagcactgtctccaccctagagtcaagtccatcatctccagaaccagctagtcttcctgcagaagatattagtgcaaactccaatggcccaaaacccacagaagttgtattagatgatgacagagaagatctttttgcagattgaagaagaagcaaatggagacatttttgacatagaaattggtgtatcagatccagaaaaagttggtgatggcatgaatgcctatatggcatatagagtaacaacaaagacatctctttccatgttcagtaagagtgaattttcagtgaaaagaagattcagcgactttcttggtttgcacagcaaattagcaagcaaatatttacatgttggttatattgtgccaccagctccagaaaagagtatagtagggatgaccaaggtcaaagtgggtaaagaagactcatcatccactgagtttgtagaaaaacggagagcagctcttgaaaggtatcttcaaagaacagtaaaacatccaactttactacaggatcctgatttaaggcagttcttggaaagttcagagctgcctagagcagttaatacacaggctctgagtggagcaggaatattgaggatggtgaacaaggctgccgacgctgtcaacaaaatgacaatcaagatgaatga

SEQ ID NO: 184991 - DNA, 3304 bp, Homo sapiens
  Payload ID: 16421
  Gene Symbol: SNX20
  Gene Name: sorting nexin 20
  Uniprot ID: Q7Z614
  ENST ID: ENST00000300590
  CDS Start-End: 174-563
gggcgatcagaagcaggtcacacagcctgtttcctgttttcaaacggggaacttagaaagtggcagcccctcggcttgtcgccggagctgagaaccaagagctcgaaggggccatatgacactcctcccggacccctggacacacacagccctggagactggagccttggagcatggcaagtccagagcaccctgggagccctggctgcatgggacccataacccagtgcacggcaaggacccagcaggaagcaccagccactggccccgacctcccgcacccaggacctgacgggcacttagacacacacagtggcctgagctccaactccagcatgaccacgcgggagcttcagcagtactggcagaaccagaaatgccgctggaagcacgtcaaactgctctttgagatcgcttcagctcgcatcgaggagagaaaagtctctaagtttgtgatggggaaatcaaggcctggagagatgacttatccagggtcacgtggcgagacagggacagcaccagaaccagacccgagatgtccacgtcaaagtgacatgctctgagaggcagcacacacagaataaccctgcatccaaattccaggaagctcttaggggtcatccagctgggcctaggggtgcagggtcagtgctgaggcctgggcagggccgctagcctccctgagctttctggcttcaggctgggaggcacagttcagggtggactgtgaccccttggcctagaatgcccttagctctgctctctagtggctgtccccatagctggaactctgttttggagtggcaaaaccagttccacctgctggtaggggtaggttggctcccaacacatccccagcaggcctctcttgggctcaaaagccaagctgtgcccagccacgtctccaaatgcttcctggcccccatgcagcaactgcatttagctgccttcccagaatttcctgcatgctcacacagcccttccctctggggcccaacaatgccacagcctgttctatcaatcaccagctgttttcctttgagcagtctccttttacttatgcacatttacttgaaaaagaaacttcctattactatcctaaatggaaactcagaatcacttgctataattagaaagtagctacaaaaataaacacaatgaaaccgatcactgttattacaccctaacccgcttttacctgagacaggccctgagcctgaggccgctggtagacttttgttaaaagagagagagacagagacagagaaataagcattagagacctgcaatcaccaagctgagacttctctttgatttactcagaaggactggaaaatgttgtcctgcaaaaggaggtaagtttctcaccacgtagcgctgatcatcccgtgttgcccgtgcgttgctgcagaccatctggggtcttgcccaagcaccctggagactttgctccctggtttcctggtcaccaactcgagtgttcagccctgtgtgctctccagctcctaagtcgtgggcctggtttcagctttgattgcccactcttggctttcaacccgtaggctccggctcctgacgccacaccctgatatcaagaccctcagatggagcgagcgttctgggctggtcgaagcctgaagccgcagtatgtccttgagtgggtccccccctacccatctagctgttgcccccatggtaagatcaagaaaatgccctcccctccaaaagtccccacgccgagccctcatctgtcagctcccaggctcggccccctcactagctccaggctgggaggcacagttcagggcagactgtggcccctcagcatagcatggacttagctctgctctctagtggctgtccccatagctagaactctgttttggagcagcaaaactagttccacctgctggtagggctaagttgactcccaacatgtccccagcgtgttggtgttgggaaccttgatctagctgctcgttttctcagtaaccaaagatccctggcactcctacgatgtctcaggccttatctagagctggggatacagcagtgaccaggacagaactggtccctgcctcacggaagtgaagtgtcaggaggccactcccaaagcaaatggaagctgggacagaatgatgtcctcagccaggtggtcagggaaggcttctcagagggggcgctgttcaaagaatcacagagcatacaaaggagctggccctgggagcacagagaggggagaattttaggcaaagaggtagcaggagcacagccctgaggcaggaaactacccccccaccaccctcggcatcctcagttctggtttgcacccagaaagggggtaggtccaggacacacccggactgatgtgtcacactggctgtgccagctgagagagtgggctccaggcaccactaacagagaagccttgcaaggcaggtccatgcaccgcccgcctccagttaccactcattgcaaaggaaatgagctgggagcctgtgtgtgggccgtgcagacccttttggttacaagccacaaaaacccaggttaatctgatgaggaaggaatttattatctgtaaagtccaggagcaggctagctttacaccaagcaggatccaaggacccacacttgtcacctcatatctctctctctctcccactttcgctttctctgtctcttcttagttctgctttcctccactgtgccttcgctctcagagagagctctcccctggcagtgacaagatggctgcagcagctccagcaacctcagaggactcccccatccagggtccttgtgagctcctcatctgtaggatgtgcagtaaacactcacgtgtcctttcctgaggagcccagtggctggggtgggggctgaggggcagcccctatgccctcacagtgcagcaaccttggttagctcacccatcagggcagacttgggcagaaatcatgtcttggcatattgttttgtaatctgctttttaaattgtcactatatattatgagcatttccctataatatacaatattcttccacattatgtttaatggtttcattgtattctaatgcatattctatagttattttaaccaccccacaatgttgcaaaatgtccttatttgggacaacactgctgcaaacactttgacccatatgtcctttttgtgtgcactcttatggcaacttctaacggtggcatttctgaatcatagacacttttttgacttctacatattttatttttttagttgacaaaaactgtatttatgaatcataaacacttaatgattttgctatt

SEQ ID NO: 184992 - DNA, 2904 bp, Homo sapiens
  Payload ID: 16421
  Gene Symbol: SNX20
  Gene Name: sorting nexin 20
  Uniprot ID: Q7Z614
  ENST ID: ENST00000330943
  CDS Start-End: 173-1123
ggcgatcagaagcaggtcacacagcctgtttcctgttttcaaacggggaacttagaaagtggcagcccctcggcttgtcgccggagctgagaaccaagagctcgaaggggccatatgacactcctcccggacccctggacacacacagccctggagactggagccttggagcatggcaagtccagagcaccctgggagccctggctgcatgggacccataacccagtgcacggcaaggacccagcaggaagcaccagccactggccccgacctcccgcacccaggacctgacgggcacttagacacacacagtggcctgagctccaactccagcatgaccacgcgggagcttcagcagtactggcagaaccagaaatgccgctggaagcacgtcaaactgctctttgagatcgcttcagctcgcatcgaggagagaaaagtctctaagtttgtggtgtaccaaatcatcgtcatccagactgggagctttgacaacaacaaggccgtcctggaacggcgctattccgacttcgcgaagctccagaaagcgctgctgaagacgttcagggaggagatcgaagacgtggagtttcccaggaagcacctgactgggaacttcgctgaggagatgatctgtgagcgtcggcgcgccctgcaggagtacctgggcctgctctacgccatccgctgcgtgcgccgctcccgggagttcctggacttcctcacgcggccggagctgcgcgaggctttcggctgcctgcgggccggccagtacccgcgcgccctggagctgctgctgcgcgtgctgccgctgcaggagaagctcaccgcccactgccctgcggccgccgtcccggccctgtgcgccgtgctgctgtgccaccgcgacctcgaccgccccgccgaggccttcgcggccggagagagggccctgcagcgcctgcaggcccgggagggccatcgctactatgcgcctctgctggacgccatggtccgcctggcctacgcgctgggcaaggacttcgtgactctgcaggagaggctggaggagagccagctccggaggcccacgccccgaggcatcaccctgaaggagctcactgtgcgagaatacctgcactgagccggcctgggaccccgcagggacgctggagatttggggtcaccatggctcacagtgggctgtttggggttctttttttttatttttccttttcttttttgttatttgagacagtcttgctctgtcacccagactgaagtgcagtggctcaattatgtctcactgcagcctcaaactcctgggcacaagcaatcctcccacctcagcctcccaagtagctgggattacaggtgcacaccaccacaccaggctaatttttaattttttagtagagacagggtctctctgttgcccaggctggtctctaacttctgaccttaaatgatcttcctgcctcagcttcccaaaacactggggttacaagtgtgagccaccacccctggcctggggttcatttttaatgggaaaagccactgggggctctaactcgctgggtgactttggacaagcccctcctctggtcctcaatttctccatctgtattggacagaggtgctcctgggaccccttggaagcctctgcttgtgtcccacgtcctcttgatgccagggccacttcatctccaaaacacaaaaccaactgccaaaaccgtccagagcagtgtccaccccaccagtgtctttgtgggaagctggagaagaagtttacctcacacattctagacaaaacttagtccatttccttgaagacagttctctccagctgctccaaggcttttctctctgttccttccaccttggaattgctttaaaatatttccatccattatcctaatactatcttagtattctagcccttcccccttaccatgtagacctgacaaagcaaaacaaaagctcacctattgccctcaagaacagcctctacacacacacacacacacacacacacacacacacacacacacacggtgggagttgtatgccatccttttgaagggtgggaggaccctggaccagaaagcaataatggcataagattctgtgataccaggcatttttggcaagggaagttgccaacaatttttctggctgggatggcatagcacattgtctaggggtggattttcattcataaggcagctgttccctgaatggcttccctgggttatgtagaaacagcctggggaggaggtgatacaacatacttaatggggcctctgggcagaaaacagactgaatcctcaacactgccccttttgagggtctgtgatcctggaacttctctgatggactgggatgcccttaactgaggtctgctgtctggaaaggacaccacaggcccagaatgaaggggcatctggaccaatgacctagattcaacacagggcttggagctggtggtacaggctggttttggcccaatgtgtgttggaggctggaagcccctgaagacctaaactgcctggatgagcttattagggtgaattaatgagtctgtaatttgggaaccttaatgtgagacaccacttaaggagaggaacttggcccagcaagtgatcactctagaagtggacagctatgcactagactgcaccagaatctgttcaacagcgacaccttgtggtaaaaactgtagacgccccatcaggctggatgggaaactagaaacagactgtctcatctttggacagatatccctcaaatctcccaatctactccagggaaaagacacttcaagtgagagatattggacttcttgaaaatctaggcctatggaaaattaaagtgttaaatggaaaaattaaagagctatgagtctatttgtaatgatgaaacaga

SEQ ID NO: 184993 - DNA, 2156 bp, Homo sapiens
  Payload ID: 16421
  Gene Symbol: SNX20
  Gene Name: sorting nexin 20
  Uniprot ID: Q7Z614
  ENST ID: ENST00000423026
  CDS Start-End: 133-441
aaacggggaacttagaaagtggcagcccctcggcttgtcgccggagctgagaaccaagagctcgaaggggccatatgacactcctcccggacccctggacacacacagccctggagactggagccttggagcatggcaagtccagagcaccctgggagccctggctgcatgggacccataacccagtgcacggcaaggacccagcaggaagcaccagccactggccccgacctcccgcacccaggacctgacgggcacttagacacacacagtggcctgagctccaactccagcatgaccacgcgggagcttcagcagtactggcagaaccagaaatgccgctggaagcacgtcaaactgctctttgagatcgcttcagctcgcatcgaggagagaaaagtctctaagtttgtggctccggctcctgacgccacaccctgatatcaagaccctcagatggagcgagcgttctgggctggtcgaagcctgaagccgcagtatgtccttgagtgggtccccccctacccatctagctgttgcccccatggtaagatcaagaaaatgccctcccctccaaaagtccccacgccgagccctcatctgtcagctcccaggctcggccccctcactagctccaggctgggaggcacagttcagggcagactgtggcccctcagcatagcatggacttagctctgctctctagtggctgtccccatagctagaactctgttttggagcagcaaaactagttccacctgctggtagggctaagttgactcccaacatgtccccagcgtgttggtgttgggaaccttgatctagctgctcgttttctcagtaaccaaagatccctggcactcctacgatgtctcaggccttatctagagctggggatacagcagtgaccaggacagaactggtccctgcctcacggaagtgaagtgtcaggaggccactcccaaagcaaatggaagctgggacagaatgatgtcctcagccaggtggtcagggaaggcttctcagagggggcgctgttcaaagaatcacagagcatacaaaggagctggccctgggagcacagagaggggagaattttaggcaaagaggtagcaggagcacagccctgaggcaggaaactacccccccaccaccctcggcatcctcagttctggtttgcacccagaaagggggtaggtccaggacacacccggactgatgtgtcacactggctgtgccagctgagagagtgggctccaggcaccactaacagagaagccttgcaaggcaggtccatgcaccgcccgcctccagttaccactcattgcaaaggaaatgagctgggagcctgtgtgtgggccgtgcagacccttttggttacaagccacaaaaacccaggttaatctgatgaggaaggaatttattatctgtaaagtccaggagcaggctagctttacaccaagcaggatccaaggacccacacttgtcacctcatatctctctctctctcccactttcgctttctctgtctcttcttagttctgctttcctccactgtgccttcgctctcagagagagctctcccctggcagtgacaagatggctgcagcagctccagcaacctcagaggactcccccatccagggtccttgtgagctcctcatctgtaggatgtgcagtaaacactcacgtgtcctttcctgaggagcccagtggctggggtgggggctgaggggcagcccctatgccctcacagtgcagcaaccttggttagctcacccatcagggcagacttgggcagaaatcatgtcttggcatattgttttgtaatctgctttttaaattgtcactatatattatgagcatttccctataatatacaatattcttccacattatgtttaatggtttcattgtattctaatgcatattctatagttattttaaccaccccacaatgttgcaaaatgtccttatttgggacaacactgctgcaaacactttgacccatatgtcctttttgtgtgcactcttatggcaacttctaacggtggcatttctgaatcatagacacttttttgacttctacatattttatttttttagttgacaaaaactgtatttatgaatcataaacacttaatgattttgctatt

SEQ ID NO: 184994 - DNA, 2003 bp, Homo sapiens
  Payload ID: 16421
  Gene Symbol: SNX20
  Gene Name: sorting nexin 20
  Uniprot ID: Q7Z614
  ENST ID: ENST00000568993
  CDS Start-End: 123-512
cttagaaagtggcagcccctcggcttgtcgccggagctgagaaccaagagctcgaaggggccatatgacactcctcccggacccctggacacacacagccctggagactggagccttggagcatggcaagtccagagcaccctgggagccctggctgcatgggacccataacccagtgcacggcaaggacccagcaggaagcaccagccactggccccgacctcccgcacccaggacctgacgggcacttagacacacacagtggcctgagctccaactccagcatgaccacgcgggagcttcagcagtactggcagaaccagaaatgccgctggaagcacgtcaaactgctctttgagatcgcttcagctcgcatcgaggagagaaaagtctctaagtttgtgatggggaaatcaaggcctggagagatgacttatccagggtcacgtggcgagacagggacagcaccagaaccagacccgagatgtccacgtcaaagtgacatgctctgagaggcagcacacacagaataaccctgcatccaaattccaggaagctcttaggggtcatccagctgggcctaggggtgcagggtcagtgctgaggcctgggcagggccgctagcctccctgagctttctggcttcaggctgggaggcacagttcagggtggactgtgaccccttggcctagaatgcccttagctctgctctctagtggctgtccccatagctggaactctgttttggagtggcaaaaccagttccacctgctggtaggggtaggttggctcccaacacatccccagcaggcctctcttgggctcaaaagccaagctgtgcccagccacgtctccaaatgcttcctggcccccatgcagcaactgcatttagctgccttcccagaatttcctgcatgctcacacagcccttccctctggggcccaacaatgccacagcctgttctatcaatcaccagctgttttcctttgagcagtctccttttacttatgcacatttacttgaaaaagaaacttcctattactatcctaaatggaaactcagaatcacttgctataattagaaagtagctacaaaaataaacacaatgaaaccgatcactgttattacaccctaacccgcttttacctgagacaggccctgagcctgaggccgctggtagacttttgttaaaagagagagagacagagacagagaaataagcattagagacctgcaatcaccaagctgagacttctctttgatttactcagaaggactggaaaatgttgtcctgcaaaaggaggtaagtttctcaccacgtagcgctgatcatcccgtgttgcccgtgcgttgctgcagaccatctggggtcttgcccaagcaccctggagactttgctccctggtttcctggtcaccaactcgagtgttcagccctgtgtgctctccagctcctaagtcgtgggcctggtttcagctttgattgcccactcttggctttcaacccgtaggctccggctcctgacgccacaccctgatatcaagaccctcagatggagcgagcgttctgggctggtcgaagcctgaagccgcagtatgtccttgagtgggtccccccctacccatctagctgttgcccccatgttctgctttcctccactgtgccttcgctctcagagagagctctcccctggcagtgacaagatggctgcagcagctccagcaacctcagaggactcccccatccagggtccttgtgagctcctcatctgtaggatgtgcagtaaacactcacgtgtcctttcctgaggagcccagtggctggggtgggggctgaggggcagcccctatgccctcacagtgcagcaaccttggttagctcacccatcagggcagacttgggcagaaatcatgtcttggcatattgttttgtaatctgctttttaaattgtcactatatattatgagcatttccctataatatacaatattcttccacatta

SEQ ID NO: 184995 - DNA, 557 bp, Homo sapiens
  Payload ID: 16421
  Gene Symbol: SNX20
  Gene Name: sorting nexin 20
  ENST ID: ENST00000610485
  CDS Start-End: 27-485
agccctggagactggagccttggagcatggcaagtccagagcaccctgggagccctggctgcatgggacccataacccagtgcacggcaaggacccagcaggaagcaccagccactggccccgacctcccgcacccaggacctgacgggcacttagacacacacagtggcctgagctccaactccagcatgaccacgcgggagcttcagcagtactggcagaaccagaaatgccgctggaagcacgtcaaactgctctttgagatcgcttcagctcgcatcgaggagagaaaagtctctaagtttgtggtgtaccaaatcatcgtcatccagactgggagctttgacaacaacaaggccgtcctggaacggcgctattccgacttcgcgaagctccaggagaggctggaggagagccagctccggaggcccacgccccgaggcatcaccctgaaggagctcactgtgcgagaatacctgcactgagccggcctgggaccccgcagggacgctggagatttggggtcaccatggctcacagtgggctgtttggggttc

SEQ ID NO: 184996 - DNA, 3614 bp, Homo sapiens
  Payload ID: 16422
  Gene Symbol: SNX22
  Gene Name: sorting nexin 22
  Uniprot ID: Q96L94
  ENST ID: ENST00000325881
  CDS Start-End: 60-641
gctccgggagagttagggctccgagccgagcgcgcggagcagctggggccggggcgcggatgctggaagttcacatcccgtcggtggggcccgaggccgaggggcccaggcagagcccggagaaaagccacatggtgttccgagtggaggtgctgtgcagcgggcgcagacacacggtgccaaggcgctacagcgagttccacgcgctgcacaagcggatcaagaagctgtacaaagtgcccgacttcccctcgaaacgcctgcccaactggaggaccagagggttggaacagcgccggcagggcttggaggcttacatccagggcatcctgtacctgaaccaggaggtgcccaaggagttactggaattcctgagacttcggcacttccccacagaccccaaggctagcaactggggcaccctgagggagttcctgcctggcgacagcagctcccagcagcaccagcggcctgtcctgagcttccatgtggatccctatgtttgcaacccctccccagagtcgctgcccaacgtggtggtgaatggtgtgctccagggcctctacagcttcagcatcagcccagataaagcccagccaaaggcggcctgtcaccctgctcctctgccaccgatgccctgatcagtccagaggcctttggctgcctcctaagaaagtcatgtgcctctgtcctatgaactccatataaggctgggtcctcctttggcctggacccaggacttaattacccagtgcccagttgtgccacattcccactcaaggctcagaacttggctcgcattggtagctggaggtggtagaatttgtatgctcttagagcccaacagccaaggcagggtcaagaagataagtaataaaagaggaagtcagccaggcgcggtggctcatgcctgtaatcccagcactttgggaggccaagatgggtggatcacctgaagtcaggagttcgagaccagcctgaccaccatggagaaaccccgtctctactaaaaatacaaaattagccgggcattgtggtggtgcatgcctgtaatcccagctactcgggaagctgaggtaggagaatctcttttttttttttttttttttttttgagacggagtttcactcttgttgcccaggctggaatgcaatggcacgatctcggctcacggcaacccccgcttcccgggttcaagcaattctcctgcctcagcctctcgagtagctgggattacaggcatccgccaccatgcccggctaatttttgtatttttaatagagatgggtttcaccacgttggccaggctggtcttgtactcctgacgtcaggtgatccacccgcctcggcttcccaaagtgctgggattacgggcgtgagccaccgtgctcggcccaaggcaggagaatctcttgaagccaggaggcggaagttgtggtgagccgagatcgcgccactgcactccagcctgggcaacaagagtgaaactccgtctcaaaataaataaataataaaggaagaagtcagctgggtgcagaggctcatgcctgtaatcccaatactttaggaggccaaggcaggaggatgcttgggtctggaagtttgagaccagccagcgcaacatagtgagacctgtctctaccaaaaaaaaaaaaaaaaaaaaaaaatcaatttagaggtaggctatgaaaaagtacagatacatcccttaacatagactggagggtggtggcaaggggagcaaatgtggaggcccagtagctggcaaagtttagaagcagggggcaaaagctcctgcctgacttttcctgggtagctcctgggtcaaaatttcaggcaggatcccagggaaggggcaggcacccattgccacaggagagttgcaggcatgttgggatgtaggcctaggggaggtgctgcaggctcaagaaccaggcccacacattatatattaaaaaaaaaaaaacccacatttttttttattggtcagtgttggtaggagtttgttacaaaagtgagtccatgggcctgtggaatgtgaggggagtgggtccgctccaccagatgccagcaccggggccagtgcagctcagagccctgtggcggactacagggcctgcacagacggtcactcaaagaaagatgtccctgtgccctactccttggcgatggcaaagggcttctccacctcgatcttgccgcagtctgcgatgatcacatccttcaggggtttatcccggctgtctgtcttggtgctctccaccttccgcaccacctcctggaaaagaaaggtggaagcaggagggcatggtggatcaggaggtccaccgctcaggagaaaggccccagcgtatggctcaggagggctaagacccacaagtgatcaacagcacacaaaactggaggcaccaaaattctaacagactcctggccagagcagggagaatgcagatttgacgagggggtacaggaattttgttcctttgaagtaagacccaggttgggccaagggtgaggaggaggaagagggtgaccagggcatgtggcttctcagggacattgcgttcagctgcactctgtatacctcaggggtgggaccagcacgtcactgagtgaaggaggggagggaggctctggcagttgtgcagccttcctggctgggctctgagggggctggaagaatttagaaccttggaggcatggaggtacagggtttattctggacaggagcactgggctgcatctgtgggttgggtccttttgggaaagggatggacacatggagctcctgccctggggtctgtgttgaatccccggtgaggattgcccagtagtagcccttgcttccacaactcaccatgccctctagaactttgccaaacaccacatgcttgccatctagccaggctgtcttgactgtcgtgatgaagaactgggagccgttggtgtctttgcctgcgttggccatgctcacccagccaggcccgtagtgcttcagtttgaagttctcatcggggaagcgctcaccgtagatgctctttcctgggaaaaaagacagagcaggtcaggggcgctggattgcgccaaaccaagcagacattcggggccaggactgagggggcttaacctgtcctctgtgccaggctaggctggagtggactacaaggacataaaagcagcgtccttcctatcttctggcctcagagccaagccatgctgactgaggccaagtggggcatcaggccaggctgatgtggtgaacagctcacagaaggattactttgagaagatagttttgtggcttttaaataaggcgcatgttatcagctccccttagctatggcccaggcctgccacggagggactttggtggagggaagtgccgtgcaggatgcaggggagtcaacagggtcggaactctccagaaaaggaggactgctgtggctgaccagcctgttttcctatgagcacaaaagacacaggcatagctgcagaggagaaagcagccagagatgtgtggggaggggcagaaaagaggggctgccccttggattctggagagtcaaagcctcttaacaaggaatgaacaggaataaaagacagctgtgagtgtg

SEQ ID NO: 184997 - DNA, 1353 bp, Homo sapiens
  Payload ID: 16422
  Gene Symbol: SNX22
  Gene Name: sorting nexin 22
  Uniprot ID: Q96L94
  ENST ID: ENST00000558466
  CDS Start-End: 38-400
gagccgagcgcgcggagcagctggggccggggcgcggatgctggaagttcacatcccgtcggtggggcccgaggccgaggggcccaggcagagcccggagaaaagccacatggtgttccgagtggaggtgctgtgcagcgggcgcagacacacggtgccaaggcgctacagcgagttccacgcgctgcacaagcggatcaagaagctgtacaaagtgcccgacttcccctcgaaacgcctgcccaactggaggaccagagggttggaacagcgccggcagggcttggaggcttacatccagggcatcctgtacctgaaccaggaggtgcccaaggagttactggaattcctgagacttcggcacttccccacagaccccaaggctagcaactgggggtaaggggggccgatggcgggggccaggggctgtcagcagtgagcagcaccctgagggagttcctgcctggcgacagcagctcccagcagcaccagcggcctgtcctgagcttccatgtggatccctatgtttgcaacccctccccagagtcgctgcccaacgtggtggtgaatggtgtgctccagggcctctacagcttcagcatcagcccagataaagcccagccaaaggcggcctgtcaccctgctcctctgccaccgatgccctgatcagtccagaggcctttggctgcctcctaagaaagtcatgtgcctctgtcctatgaactccatataaggctgggtcctcctttggcctggacccaggacttaattacccagtgcccagttgtgccacattcccactcaaggctcagaacttggctcgcattggtagctggaggtggtagaatttgtatgctcttagagcccaacagccaaggcagggtcaagaagataagtaataaaagaggaatcagctgggtgcagaggctcatgcctgtaatcccaatactttaggaggccaaggcaggaggatgcttgggtctggaagtttgagaccagccagcgcaacatagtgagacctgtctctaccaaaaaaaaaaaaaaaaaaaaaaaatcaatttagaggtaggctatgaaaaagtacagatacatcccttaacatagactggagggtggtggcaaggggagcaaatgtggaggcccagtagctggcaaagtttagaagcagggggcaaaagctcctgcctgacttttcctgggtagctcctgggtcaaaatttcaggcaggatcccagggaaggggcaggcacccattgccacaggagagttgcaggcatgttgggatgtaggcctaggggaggtgctgcaggctcaagaaccaggcccacacattatatattaaaaaaaaaaaaa

SEQ ID NO: 184998 - DNA, 2158 bp, Homo sapiens
  Payload ID: 16423
  Gene Symbol: SNX24
  Gene Name: sorting nexin 24
  Uniprot ID: Q9Y343
  ENST ID: ENST00000261369
  CDS Start-End: 186-695
ggcccccggcacgcccagggcgcgggagcggccgggtcagcccgcagacctgagtccggcccgcagcctcggggccccgcgggcgcagcggggcgggaggcggggcggcccggccgtgggcggagcggcggccgcggccgtgagcctgcccccaactcgccctcagccggctggccggcgcggccatggaggtctacatcccgtcctttcgctatgaagagagcgacctggagcggggatacacggtgtttaagatagaagtgctaatgaatggaagaaaacattttgttgaaaagagatacagcgaatttcatgctttgcacaaaaagcttaagaaatgtataaaaactccagaaatcccttctaaacatgttaggaactgggtccccaaagtcttggaacagcgacgacaaggcttggaaacatacttacaggctgtcattttagaaaatgaagaacttcccaaactgtttcttgatttcctaaatgtgcgacacttgccctctctaccaaaggcagaaagttgtggatcttttgatgaaacagagtctgaagagtcaagcaaactgtcccaccagcctgtgctgctgttcctcagggatccatatgtcttgcctgcagccagcgattttccaaatgtggttattgaaggagtcctccatgggatattttaccctcatctacagcccaggtagaaatcctacatggctaaaagaagcagaagcaagtttcgaagtcacagtcaaggaaatcaatacctaccaatttaacctaaacgctatgatatataacagctctagctagtggtaaagtgcacagtcccagcttaattcagggcagggacatttccattagaatggtgctcttaaaaatagaaactgaaccggggcggtggtcaggctaaggccaagtgtttaagaagtagagtgtagctgccagcgtagaaacccatgaaaaggaggccacaggagattcctgggagcactgggtgtagcaaaacaaagccactctctgcttcagtcgcaccatttgctaattgaaaatcatatcctgaatcatactgagactgatcaactttggtagcttttttgttcagatcttatgacacactactcttctcaccgtgagattttctcagccagtgatagtacattctgaaatgctggcaccaggagacggccacagacacacactgctaaatgtgaagatggaactaaactggaaattaaattatactgacaatattatggcatttttaagatcatggcattttaatttacattagagtggagttgcatcatactcaggggttagcttccaaggtcagtacataggtaaaatgggctattaggatgatccttgaaagccctttagaagggtgccatgttggaaacctgtacatccacaacaagtagcttttcctcctatgttggaaaaaaagactgtttctttgtttgaagaccaagtgaagttgttggtgtttgtttaggggccattttgttaaaaaaaaaaaaaaaaaagcacataacttttaacactagaatcagcccgcaagatgcttgccccgctagtggcagatgtgaactgacaaggagtgaagcgcccacccagcggatggacagcacccacctgggtttactcaagggtgtgcattcattttaggtgggatcgccacaggatttcatgttattttccttacggcttccttttcactgacctcatttgttgagttaatgtaagttaaatgtgtttatgatataactccactgtacatcatcctttgagtagtaaaggataaaagcatatatactacctatatgtatgtgctgtatgtgggcatttcattgagatctaattaatagctagcctatttatggttattcgttttagtaagttctgtgggagcaaggtatttaaaatcaaaactaataactacatcatggtttttgattaggatctaaatattcaggttttaagcctgctgcaaacttttaaaatattatgatagattctgtactacatgtgggaaacaagcaagaactaaataatcaaatgttgtcaaccaaaagtaatagttgggtattggagatttttttaaaatgtttttatgttattagctatttggagttaaataaaaacagaacaaggaaacatttga

SEQ ID NO: 184999 - DNA, 1050 bp, Homo sapiens
  Payload ID: 16423
  Gene Symbol: SNX24
  Gene Name: sorting nexin 24
  ENST ID: ENST00000395451
  CDS Start-End: 30-638
tcgccctcagccggctggccggcgcggccatggaggtctacatcccgtcctttcgctatgaagagagcgacctggagcggggatacacggtggtaatagtttggcatagagccttccagacaaaaatggaatcatatgaagttattgttctggaaattgctttttcaaatggaagacttacatatcaggtgtttaagatagaagtgctaatgaatggaagaaaacattttgttgaaaagagatacagcgaatttcatgctttgcacaaaaagcttaagaaatgtataaaaactccagaaatcccttctaaacatgttaggaactgggtccccaaagtcttggaacagcgacgacaaggcttggaaacatacttacaggctgtcattttagaaaatgaagaacttcccaaactgtttcttgatttcctaaatgtgcgacacttgccctctctaccaaaggcagaaagttgtggatcttttgatgaaacagagtctgaagagtcaagcaaactgtcccaccagcctgtgctgctgttcctcagggatccatatgtcttgcctgcagccagcgattttccaaatgtggttattgaaggagtcctccatgggatattttaccctcatctacagcccaggtagaaatcctacatggctaaaagaagcagaagcaagtttcgaagtcacagtcaaggaaatcaatacctaccaatttaacctaaacgctatgatatataacagctctagctagtggtaaagtgcacagtcccagcttaattcagggcagggacatttccattagaatggtgctcttaaaaatagaaactgaaccggggcggtggtcaggctaaggccaagtgtttaagaagtagagtgtagctgccagcgtagaaacccatgaaaaggaggccacaggagattcctgggagcactgggtgtagcaaaacaaagccactctctgcttcagtcgcaccatttgctaattgaaaatcatatcctgaatcatactgagactgatcaactttggtagcttttttgttcagatcttatgaca

SEQ ID NO: 185000 - DNA, 608 bp, Homo sapiens
  Payload ID: 16423
  Gene Symbol: SNX24
  Gene Name: sorting nexin 24
  ENST ID: ENST00000511545
  CDS Start-End: 1-67
tgaagagagcgacctggagcggggatacacggtgagggtcttgcagtgttgcccaggcaggccctgaactcctggtctcaagcgatcctaccgcttcagcctcccaagatgctggcattacagccgtgtttaagatagaagtgctaatgaatggaagaaaacattttgttgaaaagagatacagcgaatttcatgctttgcacaaaaagcttaagaaatgtataaaaactccagaaatcccttctaaacatgttaggaactgggtccccaaagtcttggaacagcgacgacaaggcttggaaacatacttacaggctgtcattttagaaaatgaagaacttcccaaactgtttcttgatttcctaaatgtgcgacacttgccctctctaccaaaggcagaaagttgtggatcttttgatgaaacagagtctgaagagtcaagcaaactgtcccaccagcctgtgctgctgttcctcagggatccatatgtcttgcctgcagccagcgattttccaaatgtggttattgaaggagtcctccatgggatattttaccctcatctacagcccaggtagaaatcctacatggctaaaagaagcagaagcaag

SEQ ID NO: 185001 - DNA, 588 bp, Homo sapiens
  Payload ID: 16423
  Gene Symbol: SNX24
  Gene Name: sorting nexin 24
  Uniprot ID: Q9Y343
  ENST ID: ENST00000506996
  CDS Start-End: 9-488
gcgcggccatggaggtctacatcccgtcctttcgctatgaagagagcgacctggagcggggatacacggtgtttaagatagaagtgctaatgaatggaagaaaacattttgttgaaaagagatacagcgaatttcatgctttgcacaaaaagcttaagaaatgtataaaaactccagaaatcccttctaaacatgttaggaactgggtccccaaagtcttggaacagcgacgacaaggcttggaaacatacttacaggctgtcattttagaaaatgaagaacttcccaaactgtttcttgatttcctaaatgtgcgacacttgccctctctaccaaaggcagaaagttgtggatcttttgatgaaacagagtctgaagagtcaagcaaactgtcccaccagcctgtgctgctgttcctcagggatccatatgtcttgcctgcagccagcggtaatcaaacctgtcatctgctaacagctctttactgatctgaccctgcaccacataaaccacgtttttaatacaggtctaacagagtgacattggtcccgggcttaataatctgccaataaaccagtgctcttggta

SEQ ID NO: 185002 - DNA, 1563 bp, Homo sapiens
  Payload ID: 16423
  Gene Symbol: SNX24
  Gene Name: sorting nexin 24
  Uniprot ID: Q9Y343
  ENST ID: ENST00000513881
  CDS Start-End: 117-596
cggggccccgcgggcgcagcggggcgggaggcggggcggcccggccgtgggcggagcggcggccgcggccgtgagcctgcccccaactcgccctcagccggctggccggcgcggccatggaggtctacatcccgtcctttcgctatgaagagagcgacctggagcggggatacacggtgtttaagatagaagtgctaatgaatggaagaaaacattttgttgaaaagagatacagcgaatttcatgctttgcacaaaaagcttaagaaatgtataaaaactccagaaatcccttctaaacatgttaggaactgggtccccaaagtcttggaacagcgacgacaaggcttggaaacatacttacaggctgtcattttagaaaatgaagaacttcccaaactgtttcttgatttcctaaatgtgcgacacttgccctctctaccaaaggcagaaagttgtggatcttttgatgaaacagagtctgaagagtcaagcaaactgtcccaccagcctgtgctgctgttcctcagggatccatatgtcttgcctgcagccagcggtaatcaaacctgtcatctgctaacagctctttactgatctgaccctgcaccacataaaccacgtttttaatacagattttccaaatgtggttattgaaggagtcctccatgggatattttaccctcatctacagcccaggtagaaatcctacatggctaaaagaagcagaagcaagtttcgaagtcacagtcaaggaaatcaatacctaccaatttaacctaaacgctatgatatataacagctctagctagtggtaaagtgcacagtcccagcttaattcagggcagggacatttccattagaatggtgctcttaaaaatagaaactgaaccggggcggtggtcaggctaaggccaagtgtttaagaagtagagtgtagctgccagcgtagaaacccatgaaaaggaggccacaggagattcctgggagcactgggtgtagcaaaacaaagccactctctgcttcagtcgcaccatttgctaattgaaaatcatatcctgaatcatactgagactgatcaactttggtagcttttttgttcagatcttatgacacactactcttctcaccgtgagattttctcagccagtgatagtacattctgaaatgctggcaccaggagacggccacagacacacactgctaaatgtgaagatggaactaaactggaaattaaattatactgacaatattatggcatttttaagatcatggcattttaatttacattagagtggagttgcatcatactcaggggttagcttccaaggtcagtacataggtaaaatgggctattaggatgatccttgaaagccctttagaagggtgccatgttggaaacctgtacatccacaacaagtagcttttcctcctatgttggaaaaaaagactgtttctttgtttgaagaccaagtgaagttgttggtgtttgtttaggggccattttgttaaaaaaaaaaaaaaaaaagcacataacttttaacactagaatcagcccgcaaga

SEQ ID NO: 185003 - DNA, 554 bp, Homo sapiens
  Payload ID: 16423
  Gene Symbol: SNX24
  Gene Name: sorting nexin 24
  ENST ID: ENST00000503149
  CDS Start-End: 1-207
gtgtttaagatagaagtgctaatgaatggaagaaaacattttgttgaaaagagatacagcgaatttcatgctttgcacaaaaagcttaagaaatgtataaaaactccagaaatcccttctaaacatgttaggaactgggtccccaaagtcttggaacagcgacgacaaggcttggaaacatacttacagagaaatgtgggtgcttaatcaagaaaaataatttcttctgttgatttggcttatttggagaaaagataattgtgtaaaggctgtcattttagaaaatgaagaacttcccaaactgtttcttgatttcctaaatgtgcgacacttgccctctctaccaaaggcagaaagttgtggatcttttgatgaaacagagtctgaagagtcaagcaaactgtcccaccagcctgtgctgctgttcctcagggatccatatgtcttgcctgcagccagcgattttccaaatgtggttattgaaggagtcctccatgggatattttaccctcatctacagcccaggtagaaatcctacatggctaaaagaagca

SEQ ID NO: 185004 - DNA, 3264 bp, Homo sapiens
  Payload ID: 16424
  Gene Symbol: SNX25
  Gene Name: sorting nexin 25
  Uniprot ID: Q9H3E2
  ENST ID: ENST00000264694
  CDS Start-End: 241-2763
gcggggctgagctccgtcctgttcaggctcagcctgtacctgagctgcgcggcggccgccttcctgctggggatcctgtttgccctcgtctgccggagcccgcgcgcccagccgcccgacttcgccgccgcctggagccggctggccgcgacctcagccgcccgccgcccgccggggagtcctgtgtatggaaactcacatgagtcagctcagtctagaagggtagtaatttctcataatatggataaagctctgaaagaagtgttcgactacagttatagagattacattctgtcctggtatggaaacctcagcagagatgagggacaactttaccatctgctcttggaagacttttgggaaattgccagacagctgcaccacagactgagtcacgtggatgtggttaaagttgtctgcaatgatgttgtgaggactttactcactcatttctgtgacctgaaagctgccaatgccagacatgaagaacagccaagaccttttgtgttgcacgcatgcttgaggaactcagatgatgaagtaagatttctacaaacgtgttctcgggttctggtgttttgtctcctcccctcaaaggatgtgcagtctctcagcttacgtataatgcttgcagaaattctcacaacaaaagtcttgaagccggtagtggagttactgagtaatccagattacattaaccaaatgctgcttgcccagctggcgtacagagagcaaatgaatgagcatcacaagagagcctacacctatgccccctcttacgaggacttcatcaagctcattaacagcaactctgatgtggagttcttgaagcaactaaggtatcaaattgtagtggaaataatccaggcgactacaattagcagctttccccaactgaagaggcacaaaggtaaagaaactgcggcaatgaaagctgatctcctgagggccaggaacatgaagaggtacatcaaccaactgactgtggcaaagaagcagtgtgagaagagaatccgaatcctgggaggccctgcctatgaccagcaagaggatggggccctggatgagggggaagggcctcaaagccagaagattcttcagtttgaagatatcttggccaatacgttctaccgagagcactttggaatgtacatggaaaggatggacaaaagagctctgattagtttttgggaatctgtggaacatttaaagaatgctaacaagaatgaaattccacaattagttggtgaaatttatcagaatttctttgtggagagcaaagaaatatctgtggaaaaatcactttacaaagaaattcagcagtgtcttgtaggaaataaaggtattgaagtattctacaaaatccaggaagatgtttatgagaccctaaaggataggtattacccttcatttattgtcagtgacctgtatgagaaattgttgataaaagaggaagaaaaacatgcctcacagatgatttccaacaaggatgagatgggcccaagagatgaggctggtgaggaagccgtggatgatggtaccaatcagatcaatgaacaagccagttttgctgtaaacaaactgcgagaactaaatgagaaacttgaatataaaaggcaagctctaaattctattcaaaatgcaccaaaacctgacaagaagattgtttccaagttgaaggatgaaataatcctaatagagaaagaacgcacagaccttcagctgcacatggcaagaacggattggtggtgtgaaaaccttggcatgtggaaagcctccatcaccagtggagaggttacagaagagaatggtgagcaattgccatgttactttgtcatggtaagcctacaagaagttggaggagttgaaactaagaactggacggtccccagaaggctcagcgagtttcagaatttacaccggaaactcagtgagtgcgtcccttctttaaaaaaagtccagttgccttctcttagcaagctgcctttcaaatctatagatcaaaagtttatggaaaagtcgaagaatcaattaaataagtttttacagaatctgctttcagatgaaagactgtgtcagagtgaagcactttatgccttcttgagcccttctcctgactacctcaaggttatcgacgtgcaggggaaaaaaaattctttttcattatcctcatttttggaaagacttcctcgcgacttcttctcccaccaggaggaggagacagaggaggacagtgacctgtcagattatggtgatgatgtggatgggaggaaagacgccttggctgaaccatgtttcatgttgattggggagatttttgaacttcgaggaatgtttaaatgggtgagaagaacattaattgccctcgttcaggtcacttttggaagaaccatcaacaaacaaatccgggacacagtcagctggattttcagtgagcaaatgttggtttactacatcaatattttccgggatgctttttggccaaatgggaagttggcaccaccgaccacaatcagaagcaaagagcaaagtcaggaaacaaaacagagagcacagcaaaagctgcttgaaaacattccagatatgcttcagagccttgttggacagcaaaatgcccgccacggtataataaaaatattcaatgcactgcaagaaacaagagccaacaagcatctgttatatgcgctgatggaactgctgctaattgaactgtgtcctgagctgagagttcatttagatcaacttaaagctggccaagtttgagactacacaaataaaccaccagaaaaatgtctgtgtaataatagacatgaaacattttcctcttttccacagagggcttaactgagaaccgtattgatttttattttagttacctccctctagttttatgtgaaattagtagaatcagggaggacgggacttatgctgtggtaggcaacagaaaaaaacttctattgattttaatttaatatgaatactttaaagatcaacataccgattgaaatacaaatgttaatatgtgagaacctaggaagtattttaaatatttatgaaaatattttgttttaaaatgaactatgaatattgtacagttaatttcctcactgaggactgtgaacattcttatattatttcatgtatattgaagaacattgttatgcaatgctttgtgtaaagttattgtgaagattttattgtctttatttttaccaaagatttcccatagtttgagcattcaaagcaataaaatataaaaatgaa

SEQ ID NO: 185005 - DNA, 1868 bp, Homo sapiens
  Payload ID: 16424
  Gene Symbol: SNX25
  Gene Name: sorting nexin 25
  ENST ID: ENST00000504959
  CDS Start-End: 1-428
atttaaagaatgctaacaagaatgaaattccacaattagttggtgaaatttatcagaatttctttgtggagagcaaagaaatatctgtggaaaaatcactttacaaagaaattcagcagtgtcttgtaggaaataaaggtattgaagtattctacaaaatccaggaagatgtttatgagaccctaaaggataggtattacccttcatttattgtcagtgacctgtatgagaaattgttgataaaagaggaagaaaaacatgcctcacagatgatttccaacaaggatgagatgggcccaagagatgaggctggtgaggaagccgtggatgatggtaccaatcagatcaatgaacaagccagttttgctgtaaacaaactgcgagaactaaatgagaaacttgaatataaaagattgtttccaagttgaaggatgaaataatcctaatagagaaagaacgcacagaccttcagctgcacatggcaagaacggattggtggtgtgaaaaccttggcatgtggaaagcctccatcaccagtggagaggttacagaagagaatggtgagcaattgccatgttactttgtcatggtaagcctacaagaagttggaggagttgaaactaagaactggacggtccccagaaggctcagcgagtttcagaatttacaccggaaactcagtgagtgcgtcccttctttaaaaaaagtccagttgccttctcttagcaagctgcctttcaaatctatagatcaaaagtttatggaaaagtcgaagaatcaattaaataagtttttacagaatctgctttcagatgaaagactgtgtcagagtgaagcactttatgccttcttgagcccttctcctgactacctcaaggttatcgacgtgcaggggaaaaaaaattctttttcattatcctcatttttggaaagacttcctcgcgacttcttctcccaccaggaggaggagacagaggaggacagtgacctgtcagattatggtgatgatgtggatgggaggaaagacgccttggctgaaccatgtttcatgttgattggggagatttttgaacttcgaggaatgtttaaatgggtgagaagaacattaattgccctcgttcaggtcacttttggaagaaccatcaacaaacaaatccgggacacagtcagctggattttcagtgagcaaatgttggtttactacatcaatattttccgggatgctttttggccaaatgggaagttggcaccaccgaccacaatcagaagcaaagagcaaagtcaggaaacaaaacagagagcacagcaaaagctgcttgaaaacattccagatatgcttcagagccttgttggacagcaaaatgcccgccacggtataataaaaatattcaatgcactgcaagaaacaagagccaacaagcatctgttatatggaacttcaacaaatacgcttctgtctcctagagaccatgattgaaattttctgaaataaggcctgaactttggaatttgtaaaagatcctcgggtgattttaacatgcagagaagcttgggaaccactgctgtaatatcagagtcagccaagggactcagaagactcccccactcaggctgaacaatctgtgttccacaaacactgctctaccaagtctgctatgatgtaattctgactcgtggatgtgatggacctaagatgtgcacagctttttggtttttctttttttaaaaaaaatctaaacttaagagttagtactcataatgatctcccttacaccccctccactaccacaccccttgctttttagtatttactttgagatgtgaaacgcatttgggatctaaataaattgatcacatggattaaaata

SEQ ID NO: 185006 - DNA, 3323 bp, Homo sapiens
  Payload ID: 16424
  Gene Symbol: SNX25
  Gene Name: sorting nexin 25
  Uniprot ID: Q9H3E2
  ENST ID: ENST00000504273
  CDS Start-End: 295-2817
ctgctcccggctgcctagggcggcgcgggtaggccccgttgttctcgtgcgttaatagggaaagctgccttgattatcttgtaattctctaccaaaccaagaataaaaaagaacggcggctgtgtgtttgtgatattttctatcagcaaatttcagttcataccactagttagttctgtggaccagaggctggtttcagaatggaaagacctttgccgagtggtaaacgagagtcctgtgtatggaaactcacatgagtcagctcagtctagaagggtagtaatttctcataatatggataaagctctgaaagaagtgttcgactacagttatagagattacattctgtcctggtatggaaacctcagcagagatgagggacaactttaccatctgctcttggaagacttttgggaaattgccagacagctgcaccacagactgagtcacgtggatgtggttaaagttgtctgcaatgatgttgtgaggactttactcactcatttctgtgacctgaaagctgccaatgccagacatgaagaacagccaagaccttttgtgttgcacgcatgcttgaggaactcagatgatgaagtaagatttctacaaacgtgttctcgggttctggtgttttgtctcctcccctcaaaggatgtgcagtctctcagcttacgtataatgcttgcagaaattctcacaacaaaagtcttgaagccggtagtggagttactgagtaatccagattacattaaccaaatgctgcttgcccagctggcgtacagagagcaaatgaatgagcatcacaagagagcctacacctatgccccctcttacgaggacttcatcaagctcattaacagcaactctgatgtggagttcttgaagcaactaaggtatcaaattgtagtggaaataatccaggcgactacaattagcagctttccccaactgaagaggcacaaaggtaaagaaactgcggcaatgaaagctgatctcctgagggccaggaacatgaagaggtacatcaaccaactgactgtggcaaagaagcagtgtgagaagagaatccgaatcctgggaggccctgcctatgaccagcaagaggatggggccctggatgagggggaagggcctcaaagccagaagattcttcagtttgaagatatcttggccaatacgttctaccgagagcactttggaatgtacatggaaaggatggacaaaagagctctgattagtttttgggaatctgtggaacatttaaagaatgctaacaagaatgaaattccacaattagttggtgaaatttatcagaatttctttgtggagagcaaagaaatatctgtggaaaaatcactttacaaagaaattcagcagtgtcttgtaggaaataaaggtattgaagtattctacaaaatccaggaagatgtttatgagaccctaaaggataggtattacccttcatttattgtcagtgacctgtatgagaaattgttgataaaagaggaagaaaaacatgcctcacagatgatttccaacaaggatgagatgggcccaagagatgaggctggtgaggaagccgtggatgatggtaccaatcagatcaatgaacaagccagttttgctgtaaacaaactgcgagaactaaatgagaaacttgaatataaaaggcaagctctaaattctattcaaaatgcaccaaaacctgacaagaagattgtttccaagttgaaggatgaaataatcctaatagagaaagaacgcacagaccttcagctgcacatggcaagaacggattggtggtgtgaaaaccttggcatgtggaaagcctccatcaccagtggagaggttacagaagagaatggtgagcaattgccatgttactttgtcatggtaagcctacaagaagttggaggagttgaaactaagaactggacggtccccagaaggctcagcgagtttcagaatttacaccggaaactcagtgagtgcgtcccttctttaaaaaaagtccagttgccttctcttagcaagctgcctttcaaatctatagatcaaaagtttatggaaaagtcgaagaatcaattaaataagtttttacagaatctgctttcagatgaaagactgtgtcagagtgaagcactttatgccttcttgagcccttctcctgactacctcaaggttatcgacgtgcaggggaaaaaaaattctttttcattatcctcatttttggaaagacttcctcgcgacttcttctcccaccaggaggaggagacagaggaggacagtgacctgtcagattatggtgatgatgtggatgggaggaaagacgccttggctgaaccatgtttcatgttgattggggagatttttgaacttcgaggaatgtttaaatgggtgagaagaacattaattgccctcgttcaggtcacttttggaagaaccatcaacaaacaaatccgggacacagtcagctggattttcagtgagcaaatgttggtttactacatcaatattttccgggatgctttttggccaaatgggaagttggcaccaccgaccacaatcagaagcaaagagcaaagtcaggaaacaaaacagagagcacagcaaaagctgcttgaaaacattccagatatgcttcagagccttgttggacagcaaaatgcccgccacggtataataaaaatattcaatgcactgcaagaaacaagagccaacaagcatctgttatatgcgctgatggaactgctgctaattgaactgtgtcctgagctgagagttcatttagatcaacttaaagctggccaagtttgagactacacaaataaaccaccagaaaaatgtctgtgtaataatagacatgaaacattttcctcttttccacagagggcttaactgagaaccgtattgatttttattttagttacctccctctagttttatgtgaaattagtagaatcagggaggacgggacttatgctgtggtaggcaacagaaaaaaacttctattgattttaatttaatatgaatactttaaagatcaacataccgattgaaatacaaatgttaatatgtgagaacctaggaagtattttaaatatttatgaaaatattttgttttaaaatgaactatgaatattgtacagttaatttcctcactgaggactgtgaacattcttatattatttcatgtatattgaagaacattgttatgcaatgctttgtgtaaagttattgtgaagattttattgtctttatttttaccaaagatttcccatagtttgagcattcaaagcaataaaatataaaaatgaatcaca

SEQ ID NO: 185007 - DNA, 3151 bp, Homo sapiens
  Payload ID: 16424
  Gene Symbol: SNX25
  Gene Name: sorting nexin 25
  Uniprot ID: Q9H3E2
  ENST ID: ENST00000618785
  CDS Start-End: 982-2652
ctgctcccggctgcctagggcggcgcgggtaggccccgttgttctcgtgcgttaatagggaaagctgccttgattatcttgtaattctctaccaaaccaagaataaaaaagaacggcggctgtgtgtttgtgatattttctatcagcaaatttcagttcataccactagttagttctgtggaccagaggctggtttcagaatggaaagacctttgccgagtggtaaacgagagtcctgtgtatggaaactcacatgagtcagctcagtctagaagggtagtaatttctcataatatggataaagctctgaaagaagtgttcgactacagttatagagattacattctgtcctggtatggaaacctcagcagagatgagggacaactttaccatctgctcttggaagacttttgggaaattgccagacagctgcaccacagactgagtcacgtggatgtggttaaagttgtctgcaatgatgttgtgaggactttactcactcatttctgtgacctgaaagctgccaatgccagacatgaagaacagccaagaccttttgtgttgcacgcatgcttgaggaactcagatgatgaagtaagatttctacaaacgtgttctcgggttctggtgttttgtctcctcccctcaaaggatgtgcagtctctcagcttacgtataatgcttgcagaaattctcacaacaaaagtcttgaagccggtagtggagttactgagtaatccagattacattaaccaaatgctgcttgcccagctggcgtacagagagcaaatgaatgagcatcacaagagagcctacacctatgccccctcttacgaggacttcatcaagctcattaacagcaactctgatgtggagttcttgaagcaactaaggtatcaaattgtagtggaaataatccaggcgactacaattagcagctttccccaactgaagaggcacaaaggtaaagaaactgcggcaatgaaagctgatctcctgagggccaggaacatgaagaggtacatcaaccaactgactgtggcaaagaagcagtgtgagaagagaatccgaatcctgggaggccctgcctatgaccagcaagaggatggggccctggatgagggggaagggcctcaaagccagaagattcttcagtttgaagatatcttggccaatacgttctaccgagagcactttggaatgtacatggaaaggatggacaaaagagctctgattagtttttgggaatctgtggaacatttaaagaatgctaacaagaatgaaattccacaattagttggtgaaatttatcagaatttctttgtggagagcaaagaaatatctgtggaaaaatcactttacaaagaaattcagcagtgtcttgtaggaaataaaggtattgaagtattctacaaaatccaggaagatgtttatgagaccctaaaggataggtattacccttcatttattgtcagtgacctgtatgagaaattgttgataaaagaggaagaaaaacatgcctcacagatgatttccaacaaggatgagatgggcccaagagatgaggctggtgaggaagccgtggatgatggtaccaatcagatcaatgaacaagccagttttgctgtaaacaaactgcgagaactaaatgagaaacttgaatataaaaggcaagctctaaattctattcaaaatgcaccaaaacctgacaagaagattgtttccaagttgaaggatgaaataatcctaatagagaaagaacgcacagaccttcagctgcacatggcaagaacggattggtggtgtgaaaaccttggcatgtggaaagcctccatcaccagtggagaggttacagaagagaatggtgagcaattgccatgttactttgtcatggtaagcctacaagaagttggaggagttgaaactaagaactggacggtccccagaaggctcagcgagtttcagaatttacaccggaaactcagtgagtgcgtcccttctttaaaaaaagtccagttgccttctcttagcaagctgcctttcaaatctatagatcaaaagtttatggaaaagtcgaagaatcaattaaataagtttttacaggaggagacagaggaggacagtgacctgtcagattatggtgatgatgtggatgggaggaaagacgccttggctgaaccatgtttcatgttgattggggagatttttgaacttcgaggaatgtttaaatgggtgagaagaacattaattgccctcgttcaggtcacttttggaagaaccatcaacaaacaaatccgggacacagtcagctggattttcagtgagcaaatgttggtttactacatcaatattttccgggatgctttttggccaaatgggaagttggcaccaccgaccacaatcagaagcaaagagcaaagtcaggaaacaaaacagagagcacagcaaaagctgcttgaaaacattccagatatgcttcagagccttgttggacagcaaaatgcccgccacggtataataaaaatattcaatgcactgcaagaaacaagagccaacaagcatctgttatatgcgctgatggaactgctgctaattgaactgtgtcctgagctgagagttcatttagatcaacttaaagctggccaagtttgagactacacaaataaaccaccagaaaaatgtctgtgtaataatagacatgaaacattttcctcttttccacagagggcttaactgagaaccgtattgatttttattttagttacctccctctagttttatgtgaaattagtagaatcagggaggacgggacttatgctgtggtaggcaacagaaaaaaacttctattgattttaatttaatatgaatactttaaagatcaacataccgattgaaatacaaatgttaatatgtgagaacctaggaagtattttaaatatttatgaaaatattttgttttaaaatgaactatgaatattgtacagttaatttcctcactgaggactgtgaacattcttatattatttcatgtatattgaagaacattgttatgcaatgctttgtgtaaagttattgtgaagattttattgtctttatttttaccaaagatttcccatagtttgagcattcaaagcaataaaatataaaaatg

SEQ ID NO: 185008 - DNA, 536 bp, Homo sapiens
  Payload ID: 16425
  Gene Symbol: SNX29
  Gene Name: sorting nexin 29
  ENST ID: ENST00000562510
  CDS Start-End: 1-210
caggagctcatcgatctccggggaccggtgcctggagatttgagtcaaacgtccgaagaccagagtttgtcggattttgaaatatcaaaccgggcgctgatcaacgtctggatcccctcagtgtttctccggggcaaagcagcaaatgcattccacgtgtatcagctatttaaaaatgtgaaaatcattcttagtctgtgggccgtatgaaaacagccagcaggccaggcgtccagcctggtttgagaggagtgcgtctggagggaacagtgtgtcagaggaagatggagcatctgcctaaatcctgccgggcctagggcctgcgtgggctttctctgtcatgctccttcctatggaagctgctcagtagatcctgctggggacatggcattgcggcactgagacatcagagcagggtcacctgtgtgctactagaggggcccacgctgttcctccctgactactctaccaacccctggccaaggcagcagagagagtctttgcgcagatactctgataaatcaaactacaatgga

SEQ ID NO: 185009 - DNA, 683 bp, Homo sapiens
  Payload ID: 16425
  Gene Symbol: SNX29
  Gene Name: sorting nexin 29
  ENST ID: ENST00000563308
  CDS Start-End: 1-527
ggggccactcggagtcgcccgagaagccactggaagggaacacctgcctctcccagatgcacagctgggctccgctgaaggtgctgcacaatgactccgacatcctcttccctgtcagtggcgtgggctcctacagcccagcagatgcccccctcggaagcctggagaacgggacaggaccagaggaccacgttctcccagatcctggacttcggtacagtgtggaagccagctctccaggccacggaagtcctctgagcagcctgttaccttctgcctcagtgccagagtccatgacaattagtgaactgcgccaggccactgtggccatgatgaacaggaaggatgagctggaggaggagaacagatcactgcgaaacctgctcgacggtgagatggagcactcagccgcgctccggcaagaggtggacaccttgaaaaggaaggtggctgaacaggaggagcggcagggcatgaaggtccaggcgctggccagctatctttgctattttgtgaggagattctaaccccacgtgagaaccatgtggtggagaaatggagggagagagaaatcaacagttcctgatagtctcatttgagctcctggatccagtctttcctgaagctgtgtttcctctggacttttcatgtatgtgagccaataaattgctttcattccttga

SEQ ID NO: 185010 - DNA, 8171 bp, Homo sapiens
  Payload ID: 16425
  Gene Symbol: SNX29
  Gene Name: sorting nexin 29
  Uniprot ID: Q8TEQ0
  ENST ID: ENST00000566228
  CDS Start-End: 70-2511
ggagctcggcagccgcagaagcggcagcggcggcggcgcggcgcaggcaccggcccggggagaggcaccatgagcggatcacagaacaatgacaaaagacaatttctgctggagcgactgctggatgcagtgaaacagtgccagatccgctttggagggagaaaggagattgcctcggattccgacagcagggtcacctgtctgtgtgcccagtttgaagccgtcctgcagcatggcttgaagaggagtcgaggattggcactcacagcggcagcgatcaagcaggcagcgggctttgccagcaaaaccgaaacagagcccgtgttctggtactacgtgaaggaggtcctcaacaagcacgagctgcagcgcttctactccctgcgccacatcgcctcagacgtgggccggggtcgcgcctggctgcgctgtgccctcaacgaacactccctggagcgctacctgcacatgctcctggccgaccgctgcaggctgagcactttttatgaagactggtcttttgtgatggatgaagaaaggtccagtatgcttcctaccatggcagcaggtctgaactccatactctttgcgattaacatcgacaacaaggatttgaacgggcagagtaagtttgctcccaccgtttcagacctcttaaaggagtcaacgcagaacgtgacctccttgctgaaggagtccacgcaaggagtgagcagcctgttcagggagatcacagcctcctctgccgtctccatcctcatcaaacctgaacaggagaccgaccccttgcctgtcgtgtccaggaatgtcagtgctgatgccaaatgcaaaaaggagcggaagaagaaaaagaaagtgaccaacataatctcatttgatgatgaggaagatgagcagaactctggggacgtgtttaaaaagacacctggggcaggggagagctcagaggacaactccgaccgctcctctgtcaatatcatgtccgcctttgaaagccccttcgggcctaactccaatggaagtcagagcagcaactcatggaaaattgattccctgtctttgaacggggagtttgggtaccagaagcttgatgtgaaaagcatcgatgatgaagatgtggatgaaaacgaagatgacgtgtatggaaactcatcaggaaggaagcacaggggccactcggagtcgcccgagaagccactggaagggaacacctgcctctcccagatgcacagctgggctccgctgaaggtgctgcacaatgactccgacatcctcttccctgtcagtggcgtgggctcctacagcccagcagatgcccccctcggaagcctggagaacgggacaggaccagaggaccacgttctcccagatcctggacttcggtacagtgtggaagccagctctccaggccacggaagtcctctgagcagcctgttaccttctgcctcagtgccagagtccatgacaattagtgaactgcgccaggccactgtggccatgatgaacaggaaggatgagctggaggaggagaacagatcactgcgaaacctgctcgacggtgagatggagcactcagccgcgctccggcaagaggtggacaccttgaaaaggaaggtggctgaacaggaggagcggcagggcatgaaggtccaggcgctggccagagagaacgaggtgctcaaagtccaactgaagaaatatgtaggagctgtccagatgctgaaaagagaaggtcaaacagctgaagtgccaaatctttggagtgttgatggagaagttacagtagctgaacagaagccgggagaaattgctgaagaactcgcaagctcctacgaaagaaagctcatcgaggtggcagagatgcatggcgagctgattgagttcaacgagcgcctgcacagggccctggtagccaaggaagccctcgtgtcccagatgaggcaggagctcatcgatctccggggaccggtgcctggagatttgagtcaaacgtccgaagaccagagtttgtcggattttgaaatatcaaaccgggcgctgatcaacgtctggatcccctcagtgtttctccggggcaaagcagcaaatgcattccacgtgtatcaggtctacatccggataaaagacgatgaatggaatatttatcgccggtatacagagttcaggagtttgcaccacaagttacaaaacaagtaccctcaagtgagggcctacaacttcccacccaaaaaggccattggaaacaaggatgccaagtttgtggaggaacggagaaagcagctccagaattacctgcgcagcgtcatgaacaaagtcatccagatggtccccgagttcgctgccagccccaagaaggagaccctcatccagctgatgcccttcttcgtcgacatcaccccgcccggagagcctgtgaacagccggcccaaagcagcttcccgcttccccaaactgtcccggggtcagccccgggagacccgcaacgtggagccccagagcggtgacctctgacctcgacaaaaccgcagccacgggccctgtgcgtggcaccagctgcgtccaccccagccactgccgctggcccctcacctcagcgtgacaaccacgtccacctggtgatcctgagagcacacgattcccaacagttacacaacaccccgattaaactaatcagtcttcgagccgcatgataccgtgacccgagagaccaaggcagcacctcgctggagagactgggacacacagtccttctgcttctggggtctaccctgggctgcaagggctgttcctccacctttctgtagttcagggctggcaggagggtgggcaccaggtcaggctgggtgcgccatggttgagaggcaaaggtgatcccctatataggaaggttcatgcagagccagcctctccactctttcccacgtggggactagaatgactattagcctctccttttgctttttaaggttattacctggcctaacctagggatggctggctttgcgggggggggggggggggggggcatggttcctttcactgcattttccaccaacagtcattagacacctggcactgtcacagctcacttttccagagggatattcctgtggctttggcaaggagccattagtgatgtgcaacttgagttcagagaacttcccctacctcccccatggctggcttcaggaaggaccagtgccctccatagcctgaggccacctaggccctcgccaggcttggagtggggggactcagacatctggcccagccatcagcagcaacctagtaacccggcgtcatccagcgtgtccaaagtagcattggccctacagtcatgagagacttgggtcagggaaccactgcagaaggttccagggttttcaaaccaggctccatgactatgaagttggacccagtgtggacacttaacagatcatgtgtctctccactaaaaacattttccatcccgtctgcccccgacattgtccttgataacagaactctgcatcccctaagacagagtcctctgttcctcccatgtcaggtggctctcagagtacagggaccttggcaggtggagaggaggatggggaccagcagctgggcagcccccagggctcctcctccagtgagctcacatcagagcacctcacagagcaatagccgtcctcagatgctcagcaaagttgtggcagtttgcatttctagggtaaactaactaggaaggatgtcgtgaaatggactatgcaagagtaagtttgtgtgtttcgccttaatctgaggcagagacacagcagaacctgaggagaaaagcaggtggaaggtgacggttagatggtaagccatgggcttgtcctggaactgcttcaactcagtggcttaaaatgagaactgcccaggtgagcatggagcatctcctaggctcgaggacatctctggagaatcatctggaaggtttatactgtgccttcccctcgtagcaaaaaggaagattgttcatggcctttaaggaaggctgagatcactcacacacagcgcccccccaccccagagaaaccgagtcagcctacatgacttccaaggggacctggggccagataagccctgccccggtgagaccaaatgagctggagcatgtatggaggtgcggaccctgcagtcagtttgcgagtgtggaggacccgagacatcctgtaaaggcaacttggtctccctcccactcacctgccaacattgctgcaatacacatggtttatctgaaattccaaggccagagtgcacatcagctcacatgactggcaactctaaatagagagccctaatggactgaggcaggaaacgtctaaaagctcaatctgctgtatgtcatgaccccttaggttgggtttatgccacatcggtcattttgaagtaggtgtttgatgccagctcagagactgtctcaggagtgcctccctggcctgggtagctaccctggaggtcatctccctgttctctgttggataaaggaacctcccccatctgtgacattcccttgggcccaggcttatgacctgcaccttttctgacacctgcccccaaagcacaggatgtgaattggtctctctccagataccccacgaggaagcaccttggacattctgcacatgataataatgcaacagtcccccattgctgagagatactaacccgtgagaaacaagtatgctctcagctggtattgaactggtgggagaaactgcctcctacttttataatactgaattattcacaaaaaacctggtctgctctccaaaatgagagcatgttcctgggagccacatggggaccatccccagctgcctgctcctggtacctcccccatgatcatgcacagaccgtagagtcgagtcatctcgcagatccagaccatctcctctcattctcactctaaaaatgctggtggcccgcacatgacagcaactccccgaagccttccctttggaatcccatagaatgttctgcaatgattgggtccatcttgctgctcagaagaatcccgtcctgctctctagtgtggtgggatgaacttcaggcaacaaacaactggcagggttcccagttcctggagttatggagcagaaacacccaggcctagcagaattgtggctgaaacctggtgcccaaattccacaccctggaaatgtgtcaactgcctgtcagcctggattcaattctgagggctaagccacgaccttatccatgagtggcgaagacacccctgaggaaaggattgcttgcacctcacatctgtcttcttctaagattactcggagattttcaaacaacatctgagaacagaagccccctcccctactcagagaggaacgagggtggcccacctctcaagggccttggattcctgggaccaccctttgctgggaggaagaatccacaccgaatccttctgtcttcatggcctgctgtgctgaaacagaacagcaggttccatctttcacatctttttttctcccccagatgaaagacgactcaggaacggtagggctgggcagaggtgtctctccttgagagacaacaaaagcttctaagggagggagcttaaaggctgctagaaacctagcccaaccatccactcctgatctgagacagaaccttctccgccactcttcctgcaatcagtgtgaaattccagcttctttgattcccacttagcagtatgctccaatcacgttgctggcaaggcattttagagtttggagctgaggttcaaagccccctgcatttctctactggcaggccctggtgaaggaagacactttcagggaagaggctcttacagtctatggtggtagccatcttcacatccagtcaccagttgcatctagggagctgctggctataaaagggatcatccagtggagttgtaaacaagggaaccatcttgcaagatctaggaagaggaaggggagggatgtggactgggtctgatcacagcccttggccctgcttcatactttggagcttattaagatcaattttgataaccatgtaatttcttagaaccatggcaggtagtattgtgctttaaaaaccagaggctcctgaaagtcgtttacaccaggtggattgataccatggctgtagctgatgcaactaacaagtactggggccagtgatcacaatccaggttggaaacaggagtgaagcccaccagcctgcctggttgatggacagcaggctctgccttctggaggcggcttatatcccaacagcctgaggcagggctctgtggcccaggccggcagtggctgcctctcttggttctgcatggtacattttgccaaccctgaggaccagttcttggggttccaggcctcggccttcctgctccacgtgctcaagcccccacagggggctgcgacaccatctggctcctcacagggaggtccagccatgttctctgggctcccagtgagccccctcccctccggctacccccagaatccatccttcattcctccaccaagctcctgtgtgagctgcagcacccacacgggggaagccctgcactccagcagcatcttccagccttggcacagaactgatggcaaaggaagggctgggttttcagcttctgggacccgaggaagaccccacctcactcctccttccccagtacatcagactggttaggaggcatcccagaaggggcagcctcatgcccaggtttcagccctaaaggtaatgattgtcttgactctgccttggcatttcgctcggaatcacggcagacttggagtgtttcttcaaggcaggcatctgcttatgagcaaggtcaaagatttttcaaaatattgtgcattaattcattaaagctactgttaaatatttgctgtttttagattggcgtccgtgctaattctgcagttgtagcactgtatattttatctcatttctgtgccaagaaagttcatctttatgtttttctaatacacaatcttgatcttgtttccaaaataaagcttcagctccttggtcaatagaagtaagggtgtagccatccagggtctcccggctctaggcagaccggatcccgcagttcatcccatggttgttgaaatgtacctcgatcagtcatctctggtattcctcactctagccatgagccattgccatcttatgggcccgatttgggtactctgaattatgtcatggagtagacagttacttctaaatcccagcaaccaagttgcgtatccttccttatagctagtttctatagagaagtgaaaaagaaatctggcttccttaataagatagttgagcctatgacattaaggagcagcgctgctggcggaagattctagattcactggtggtttaagaggcccagggatttagttcttactggtgcgtaagtgttttcccatcctaaccggaaaaccactcacccaggcttcccccacttcccctcaaattttctcagctctgccgctggtctccatgaacggcaaggggaaccaccactcattcactgtcagtgtaggtaagacagaggatgcccttgcaaaaattgggactgaggacagtagcacacggaatggtggatcgtacatttgcacccagagctactaaacgctcagtgaccccagagaccattaatttcccggagtgaaggggatgggggtagagctaattggaatttttattatccaggactcatcctaagaagaatgttggcctctcttcatccctggcttagccgtcaggtagaacgcttactcacctgacaccgacttcttagagaagcgagtcttttttgaatggaggagcgatggtaaccccactagggggcgcccatgatcggctcccagtgcacccccttaagggtaagcaggccacatatctagagtctgatagtctgtgtgtacataaggtctagaagtctgtggaaacgccctgaaacctgtagtattatcttaactaccctcttatgttaaggtttacataataggatttttaaacaaatgtgtttaattttttaagatctcttgtattaaaattttcttttggaataagctgtggaaattttgttacaacctggttgagatcaacctctttacaatgacacaaattgtgacattttataaattagatacttcagtgga

SEQ ID NO: 185011 - DNA, 1633 bp, Homo sapiens
  Payload ID: 16425
  Gene Symbol: SNX29
  Gene Name: sorting nexin 29
  ENST ID: ENST00000564791
  CDS Start-End: 1-849
ttgaaaaggaaggtggctgaacaggaggagcggcagggcatgaaggtccaggcgctggccagagagaacgaggtgctcaaagtccaactgaagaaatatgtaggagctgtccagatgctgaaaagagaaggtcaaacagctgaagtgccaaatctttggagtgttgatggagaagttacagtagctgaacagaagccgggagaaattgctgaagaactcgcaagctcctacgaaagaaagctcatcgaggtggcagagatgcatggcgagctgattgagttcaacgagcgcctgcacagggccctggtagccaaggaagccctcgtgtcccagatgaggcaggagctcatcgatctccggggaccggtgcctggagatttgagtcaaacgtccgaagaccagagtttgtcggattttgaaatatcaaaccgggcgctgatcaacgtctggatcccctcagtgtttctccggggcaaagcagcaaatgcattccacgtgtatcaggtctacatccggataaaagacgatgaatggaatatttatcgccggtatacagagttcaggagtttgcaccacaagttacaaaacaagtaccctcaagtgagggcctacaacttcccacccaaaaaggccattggaaacaaggatgccaagtttgtggaggaacggagaaagcagctccagaattacctgcgcagcgtcatgaacaaagtcatccagatggtccccgagttcgctgccagccccaagaaggagaccctcatccagctgatgcccttcttcgtggactggatctcactgtttggaaatggccgcgatagttcacgtgaggagttctcatcctcttagcggcatccccatggcccagggtgcacgggggaattagcctctcgcggagtcatcacgcatcgactgaattccctggtgaaaactgagttagccagttgttcctaagatactcctgatgctgagagtgtgagcaggaggcgctgccccatccgcaagtcagtgtcccccaccccctgcggggtccacagcccaggcatctccggtccagtgtttcccaaacattcgcgtgccgaattgtaaaaagtgcacgttaatgcgagcctgtcggtgtgacatgaatctcagccatgctggttgccatcagtcagcacggagagagaaaccttttgtgcctaattagcacgcagaacagaacacagggttcgatttatggacttttcaaaacgagaatttcagtgggagactgtggcaaatgacacagtgttgacactggaattttgactacatgttggtctagaccccagttgaaattaaacagctcttttaataaaagctctttggctttcctcactgttccaaatcccacagcccccttctccttcttcctttttgagcaggatgggattacaggtcggaatgtacggattgtttcattttggggtaatgatggatcagccacagccaagccttacccgtgctgacgaatctccatgtgatcgtgtcctttctccatgtgctgcccacagaaagcagcgagactgctgtctcagctggaaagctgagcctgagagatttctggttaaaaaaaaataaaaaataaaaatctcctgcctaaggaaataaa

SEQ ID NO: 185012 - DNA, 540 bp, Homo sapiens
  Payload ID: 16425
  Gene Symbol: SNX29
  Gene Name: sorting nexin 29
  ENST ID: ENST00000569801
  CDS Start-End: 71-361
tggagctcggcagccgcagaagcggcagcggcggcggcgcggcgcaggcaccggcccggggagaggcaccatgagcggatcacagaacaatgacaaaagacaatttctgctggagcgactgctggatgcagtgaaacagtgccagatccgctttggagggagaaaggagattgcctcggattccgacagcagggtcacctgtctgtgtgcccagtttgaagccgtcctgcagcatggcttgaagaggagtcgaggattggcactcacagcggcagcgatcaagcaggcagcgggctttgccagcaaaaccgaaacagatggagcctcactctgttgcccagtctggagtgcagtggcatgatctcagctcactgcaacctctgcctcccaggtgcaagtgattctccagcctcagccacctgagtagctgggactatagagcccgtgttctggtactacgtgaaggaggtcctcaacaagcacgagctgcagcgcttctactccctgcgccacatcgcctcagacgtgggccggggtcgc

SEQ ID NO: 185013 - DNA, 1755 bp, Homo sapiens
  Payload ID: 16426
  Gene Symbol: SNX3
  Gene Name: sorting nexin 3
  Uniprot ID: O60493
  ENST ID: ENST00000230085
  CDS Start-End: 340-828
agtccggccggaacctgtttgcgaccccgagtcccatgacaccgcttctcctcacaccccagtccgcagtgcccctccccagcctcggccgggcctcccgggagccgggcgtggcgttccagctagtgagccgtttctcccctgggctcggaggcggaagcttgaggggcgcggggaggagcttcgcgtgcggggtgaacgcccgctctacgtgctcgttctcttcgcgaccgctgcgcgcgagccccgtgtccccacggcgggcagcagcggcggcggcggcggctgaacgcggagggggcggagggagcccgcggcggcggcagcagctacagcgaaatggcggagaccgtggctgacacccggcggctgatcaccaagccgcagaacctgaatgacgcctacggaccccccagcaacttcctcgagatcgatgtgagcaacccgcaaacggtgggggtcggccggggccgcttcaccacttacgaaatcagggtcaagacaaatcttcctattttcaagctgaaagaatctactgttagaagaagatacagtgactttgaatggctgcgaagtgaattagaaagagagagcaaggtcgtagttcccccgctccctgggaaagcgtttttgcgtcagcttccttttagaggagatgatggaatatttgatgacaattttattgaggaaagaaaacaagggctggagcagtttataaacaaggtcgctggtcatcctctggcacagaacgaacgttgtcttcacatgtttttacaagatgaaataatagataaaagctatactccatctaaaataagacatgcctgaaatttggcaagaaggggcaaaaacgtgactattaatgattgataagcaccagtgaagaagttctaacttttagcatgctgcacagaaactggtataacatgccttcagtatactaacactcatatgctcagttttgttttgttttggcagttgacaagaagttaatttgctttagtaaaaatccctcattccagcctttctatataaatagctctttcttgctgttttaatgtggtgcacactatagcctcacaaacctgttattccagtgtaatctgcagtgtcgtaactaaagttactggcttggtcttatttgcacagtttttgcgtcttgtttgcttcttgcatctgattaactagaatatttctctttcccccttttaatttgtgatgtcacttgaccccatttatgtgtaggagcactacaccattggtttccaatactgcacacataagatacatacttgtgtgcagaaagtatcttcctccaggcttgtaatacccttcacatggaagattaatgagggaaatctttatattctgtataaaaacaaaagcaaatttatatactaaaatcatttgtctaaaaatttaagttgttttcaaataaaaattaaaatgcatttctgatatgcactgattgtgttgcctccagctttttttgctctctatgagtgactacttaagtcacttgttgagagggattatttactaattatatacttctcattcctgtaactccattccctttaaacagtggtgatatcaaatatacttccatccattgaatggggtatttttaacaacaacaaaagtgatatactaaaaaatgtattgcttaaggcttattgaatcattttgaagcactttgtgtatttgaaaactgctttataatctcatttattaaaaggactttcaaagataaaa

SEQ ID NO: 185014 - DNA, 890 bp, Homo sapiens
  Payload ID: 16426
  Gene Symbol: SNX3
  Gene Name: sorting nexin 3
  Uniprot ID: O60493
  ENST ID: ENST00000349379
  CDS Start-End: 324-746
gtttgcgaccccgagtcccatgacaccgcttctcctcacaccccagtccgcagtgcccctccccagcctcggccgggcctcccgggagccgggcgtggcgttccagctagtgagccgtttctcccctgggctcggaggcggaagcttgaggggcgcggggaggagcttcgcgtgcggggtgaacgcccgctctacgtgctcgttctcttcgcgaccgctgcgcgcgagccccgtgtccccacggcgggcagcagcggcggcggcggcggctgaacgcggagggggcggagggagcccgcggcggcggcagcagctacagcgaaatggcggagaccgtggctgacacccggcggctgatcaccaagccgcagaacctgaatgacgcctacggaccccccagcaacttcctcgagatcgatacaaatcttcctattttcaagctgaaagaatctactgttagaagaagatacagtgactttgaatggctgcgaagtgaattagaaagagagagcaaggtcgtagttcccccgctccctgggaaagcgtttttgcgtcagcttccttttagaggagatgatggaatatttgatgacaattttattgaggaaagaaaacaagggctggagcagtttataaacaaggtcgctggtcatcctctggcacagaacgaacgttgtcttcacatgtttttacaagatgaaataatagataaaagctatactccatctaaaataagacatgcctgaaatttggcaagaaggggcaaaaacgtgactattaatgattgataagcaccagtgaagaagttctaacttttagcatgctgcacagaaactggtataacatgccttcagtatactaacactcatatgctcagttttgttttgttt

SEQ ID NO: 185015 - DNA, 1537 bp, Homo sapiens
  Payload ID: 16426
  Gene Symbol: SNX3
  Gene Name: sorting nexin 3
  Uniprot ID: O60493
  ENST ID: ENST00000368979
  CDS Start-End: 326-667
ctgtttgcgaccccgagtcccatgacaccgcttctcctcacaccccagtccgcagtgcccctccccagcctcggccgggcctcccgggagccgggcgtggcgttccagctagtgagccgtttctcccctgggctcggaggcggaagcttgaggggcgcggggaggagcttcgcgtgcggggtgaacgcccgctctacgtgctcgttctcttcgcgaccgctgcgcgcgagccccgtgtccccacggcgggcagcagcggcggcggcggcggctgaacgcggagggggcggagggagcccgcggcggcggcagcagctacagcgaaatggcggagaccgtggctgacacccggcggctgatcaccaagccgcagaacctgaatgacgcctacggaccccccagcaacttcctcgagatcgatgtgagcaacccgcaaacggtgggggtcggccggggccgcttcaccacttacgaaatcagggtcaagacaaatcttcctattttcaagctgaaagaatctactgttagaagaagatacagtgactttgaatggctgcgaagtgaattagaaagagagagcaagccctgcctcagaatgacatcagaggcaaggagtcatggaaggacgtggtgtgctcagaatgatgaaaagttattttgtgactagaaagtcgtagttcccccgctccctgggaaagcgtttttgcgtcagcttccttttagaggagatgatggaatatttgatgacaattttattgaggaaagaaaacaagggctggagcagtttataaacaaggtcgctggtcatcctctggcacagaacgaacgttgtcttcacatgtttttacaagatgaaataatagataaaagctatactccatctaaaataagacatgcctgaaatttggcaagaaggggcaaaaacgtgactattaatgattgataagcaccagtgaagaagttctaacttttagcatgctgcacagaaactggtataacatgccttcagtatactaacactcatatgctcagttttgttttgttttggcagttgacaagaagttaatttgctttagtaaaaatccctcattccagcctttctatataaatagctctttcttgctgttttaatgtggtgcacactatagcctcacaaacctgttattccagtgtaatctgcagtgtcgtaactaaagttactggcttggtcttatttgcacagtttttgcgtcttgtttgcttcttgcatctgattaactagaatatttctctttcccccttttaatttgtgatgtcacttgaccccatttatgtgtaggagcactacaccattggtttccaatactgcacacataagatacatacttgtgtgcagaaagtatcttcctccaggcttgtaatacccttcacatggaagattaatgagggaaatctttatattctgtataaaaacaaaagcaaatttatatactaaaatcatttgtctaaaaatttaagttgttttcaaataaaaattaaaatgcatttctgatatgca

SEQ ID NO: 185016 - DNA, 1072 bp, Homo sapiens
  Payload ID: 16426
  Gene Symbol: SNX3
  Gene Name: sorting nexin 3
  Uniprot ID: O60493
  ENST ID: ENST00000426155
  CDS Start-End: 44-436
gggggcggagggagcccgcggcggcggcagcagctacagcgaaatggcggagaccgtggctgacacccggcggctgatcaccaagccgcagaacctgaatgacgcctacggaccccccagcaacttcctcgagatcgatgtgagcaacccgcaaacggtgggggtcggccggggccgcttcaccacttacgaaatcagggtcaaggtcgtagttcccccgctccctgggaaagcgtttttgcgtcagcttccttttagaggagatgatggaatatttgatgacaattttattgaggaaagaaaacaagggctggagcagtttataaacaaggtcgctggtcatcctctggcacagaacgaacgttgtcttcacatgtttttacaagatgaaataatagataaaagctatactccatctaaaataagacatgcctgaaatttggcaagaaggggcaaaaacgtgactattaatgattgataagcaccagtgaagaagttctaacttttagcatgctgcacagaaactggtataacatgccttcagtatactaacactcatatgctcagttttgttttgttttggcagttgacaagaagttaatttgctttagtaaaaatccctcattccagcctttctatataaatagctctttcttgctgttttaatgtggtgcacactatagcctcacaaacctgttattccagtgtaatctgcagtgtcgtaactaaagttactggcttggtcttatttgcacagtttttgcgtcttgtttgcttcttgcatctgattaactagaatatttctctttcccccttttaatttgtgatgtcacttgaccccatttatgtgtaggagcactacaccattggtttccaatactgcacacataagatacatacttgtgtgcagaaagtatcttcctccaggcttgtaatacccttcacatggaagattaatgagggaaatctttatattctgtataaaaacaaaagcaaatttatatactaaaatcatttgtctaaaaatttaagttgttttcaaataaaaattaaaatgcatttctgatatgca

SEQ ID NO: 185017 - DNA, 2457 bp, Homo sapiens
  Payload ID: 16427
  Gene Symbol: SNX31
  Gene Name: sorting nexin 31
  Uniprot ID: Q8N9S9
  ENST ID: ENST00000311812
  CDS Start-End: 152-1474
agatgtccccggccggcgagagcgggcgccggggttcgctctgagtcgcgtggcaggccgcgctgcgtccaccgctgccgagttcagagccgcgcaccgcccgccgccgcaggtcgggttcccagcgctactcccaagacaccgctcagccatgaagatgcatttctgtatcccggtgtcccagcagcggtccgacgcgctggggggccgctacgtgctgtactccgtgcacctggacgggttcctcttctgcagggtgcgctacagccagctgcacggttggaacgaacagctaaggcgggtctttggaaattgcctgccacccttcccaccaaagtactatctggcaatgaccacagctatggctgatgagaggagggaccaactggaacaatatttgcaaaatgtaaccatggacccaaacgtgttgagaagtgatgtcttcgttgagtttttaaaactggcgcagctgaatacatttgacatcgccaccaagaaagcttatctggacatatttctgcccaatgaacagagtattagaatcgaaattataacatcagacactgctgaaagagtcctagaggtggtgtcacacaaaattggactgtgtcgagagctcttgggctacttcggcctctttctcattcggtttggcaaggagggcaagctctctgttgtgaaaaaattggctgactttgaactcccttatgttagtcttggaagttctgaggtggaaaactgtaaggttggactccgaaagtggtatatggctccatccctcgactccgtgctgatggactgcagggtggcggtagatttgctctacatgcaggcaatacaggacattgaaaaaggatgggccaaacccacacaggcacagaggcagaaattagaagctttccagaaagaagacagtcaaacaaagtttttggagctggcccgggaggtacggcactatggatacctgcagctggatccttgtacctgtgactacccagaatcaggctctggagctgttctttctgttggcaataatgagatcagctgctgcatcaccctgcctgacagccagacccaggacatcgttttccagatgagcagggtgaagtgctggcaggtcactttccttggaactctgctggatacggatgggccccagagaactctcaaccagaacttagagctcagatttcaatacagtgaggatagttgctggcagtggtttgttatttacaccaaacaggcttttttgctgagtagctgcttgaaaaagatgatctcagaaaagatggtaaagctagctgctgagaatacagaaatgcagattgaagttccggaacaaagcaaaagtaaaaaataccacattcaacaaagccagcagaaagactattctagttttctatcaagaaaaagcaagattaagatagctaaagatgactgcgtttttgggaacataaaggaagaagatctctgaagaaagctctcatattttaaaatatccttggaggctatctcaagacagtgaaagaacttggggattcaggtgggctacctaccatcagtggaggaaatttgacctcttcccatttttttggcattaacatggactgtattcatcaaggtattataccacagcactctatggaaatctcaagattagaaaaaaaaaaagaaccaagttatagagttagtttttattttatttttgcacttcgtcatgacagtatagagtttgtttttaatgtctcataaatgacaagtggcaaattcaaatcaactcatataaaactcattctattttttctctaaaatagatctttatatggcttcatgaagtcttttatgtgttttgaatttacataaatgaaagtctcataaaatatcataaagatattttggatcgatttctaaagatgtgactcttcaacggaggagaatagggctctgagaaatggaatcactgaaaaagaaacctgggttctctgatctatccacacagaactagagcaaggaggtgatgaaatactgatctctttcctcacataagtctgagcctaccaatatggatgtactcaaagtgaaacgctgccctgttctctgcttgaccattgttataattttattctgtccttagagtactgaaggcagttcaataatcaacatgctatttggaatgttttaatttggaaagcaataaggctctgcacctgatatcagataccttataattctcttagctttaaaaatatgtatactttctcacaaggtttttccttatctagcttcatttctctcatggtaattaatgtaattatgtatagaattaagaccacaataagggagatgatcagaggaatctgtatagtgtaattagaaaaagtacaatattctaatgttctaactgggttgtatacctaattatataataaatacaaaataattccagtgaatataaaa

SEQ ID NO: 185018 - DNA, 1265 bp, Homo sapiens
  Payload ID: 16427
  Gene Symbol: SNX31
  Gene Name: sorting nexin 31
  Uniprot ID: Q8N9S9
  ENST ID: ENST00000428383
  CDS Start-End: 40-1065
aattagtgtcagaaaaaatcagggatatgggctttagggatgcttggaaatactgaaaactggaatacatttgacatcgccaccaagaaagcttatctggacatatttctgcccaatgaacagagtattagaatcgaaattataacatcagacactgctgaaagagtcctagaggtggtgtcacacaaaattggactgtgtcgagagctcttgggctacttcggcctctttctcattcggtttggcaaggagggcaagctctctgttgtgaaaaaattggctgactttgaactcccttatgttagtcttggaagttctgaggtggaaaactgtaaggttggactccgaaagtggtatatggctccatccctcgactccgtgctgatggactgcagggtggcggtagatttgctctacatgcaggcaatacaggacattgaaaaaggatgggccaaacccacacaggcacagaggcagaaattagaagctttccagaaagaagacagtcaaacaaagtttttggagctggcccgggaggtacggcactatggatacctgcagctggatccttgtacctgtgactacccagaatcaggctctggagctgttctttctgttggcaataatgagatcagctgctgcatcaccctgcctgacagccagacccaggacatcgttttccagatgagcagggtgaagtgctggcaggtcactttccttggaactctgctggatacggatgggccccagagaactctcaaccagaacttagagctcagatttcaatacagtgaggatagttgctggcagtggtttgttatttacaccaaacaggcttttttgctgagtagctgcttgaaaaagatgatctcagaaaagatggtaaagctagctgctgagaatacagaaatgcagattgaagttccggaacaaagcaaaagtaaaaaataccacattcaacaaagccagcagaaagactattctagttttctatcaagaaaaagcaagattaagatagctaaagatgactgcgtttttgggaacataaaggaagaagatctctgaagaaagctctcatattttaaaatatccttggaggctatctcaagacagtgaaagaacttggggattcaggtgggctacctaccatcagtggaggaaatttgacctcttcccatttttttggcattaacatggactgtattcatcaaggtattataccacagcactctatggaaatctcaagattagaaaaaaaaaaagaa

SEQ ID NO: 185019 - DNA, 705 bp, Homo sapiens
  Payload ID: 16427
  Gene Symbol: SNX31
  Gene Name: sorting nexin 31
  ENST ID: ENST00000520352
  CDS Start-End: 332-705
ctcaaaagccctgtgcattcaaaaaaggcttggttgggttatttccagttgtactgtcgagaaaagagctatttctgtcttttaactctcaaatacaaagatactgctcagtgggaatcaaacattcctaattttcatttatttatcttttcattttaattttggattggggggggtatctgcgcagctctgttagacggagtatattgcatggtgctgaggtctgggcttctgatggtcccgtcgttcaagtagcaaacgcgctgcgcgaaagctaaggcgggtctttggaaattgcctgccacccttcccaccaaagtactatctggcaatgaccacagctatggctgatgagaggagggaccaactggaacaatatttgcaaaatgtaaccatggacccaaacgtgttgagaagtgatgtcttcgttgagtttttaaaactggcgcagctgaatacatttgacatcgccaccaagaaagcttatctggacatatttctgcccaatgaacagagtattagaatcgaaattataacatcagacactgctgaaagagtcctagaggtggtgtcacacaaaattggactgtgtcgagagctcttgggctacttcggcctctttctcattcggtttggcaaggagggcaagctctctgttgtgaaaaaattggctgactttgaactcccttatgttagtcttggaag

SEQ ID NO: 185020 - DNA, 563 bp, Homo sapiens
  Payload ID: 16427
  Gene Symbol: SNX31
  Gene Name: sorting nexin 31
  ENST ID: ENST00000520743
  CDS Start-End: 263-563
gtgcattcaaaaaaggcttggttgggttatttccagttgtactgtcgagaaaagagctatttctgtcttttaactctcaaatacaaagatactgctcagtgggaatcaaacattcctaattttcatttatttatcttttcattttaattttggattggggggggtatctgcgcagctctgttagacggagtatattgcatggtgctgaggtctgggcttctgatggtcccgtcgttcaagtagcaaacgcgctgcgcgaaagatggagtctacctttgtcacccaggctggaatgcagtggggcgatcttggcttactgcaacctctgcctcccaggttcaagggattctcctgcctcagcctcccaagtagtccacttcattcttcacctctggaccttcaccagctgtactccgtgcacctggacgggttcctcttctgcagggtgcgctacagccagctgcacggttggaacgaacagctaaggcgggtctttggaaattgcctgccacccttcccaccaaagtactatctggcaatgaccacagctatggctgatgaga

SEQ ID NO: 185021 - DNA, 489 bp, Homo sapiens
  Payload ID: 16427
  Gene Symbol: SNX31
  Gene Name: sorting nexin 31
  ENST ID: ENST00000520661
  CDS Start-End: 79-489
acggagtatattgcatggtgctgaggtctgggcttctgatggtcccgtcgttcaagtagcaaacgcgctgcgcgaaagatggagtctacctttgtcacccaggctggaatgcagtggggcgatcttggcttactgcaacctctgcctcccaggttcaagggattctcctgcctcagcctcccaagtagtccacttcattcttcacctctggaccttcaccagctaaggcgggtctttggaaattgcctgccacccttcccaccaaagtactatctggcaatgaccacagctatggctgatgagaggagggaccaactggaacaatatttgcaaaatgtaaccatggacccaaacgtgttgagaagtgatgtcttcgttgagtttttaaaactggcgcagctgaatacatttgacatcgccaccaagaaagcttatctggacatatttctgcccaatgaacagagtattagaatcgaaattataacatca

SEQ ID NO: 185022 - DNA, 426 bp, Homo sapiens
  Payload ID: 16427
  Gene Symbol: SNX31
  Gene Name: sorting nexin 31
  ENST ID: ENST00000518342
  CDS Start-End: 1-146
agatgatctcagaaaagatggtaaagctagctgctgagaatacagaaatgcagaaagactattctagttttctatcaagaaaaagcaagattaagatagctaaagatgactgcgtttttgggaacataaaggaagaagatctctgaagaaagctctcatattttaaaatatccttggaggctatctcaagacagtgaaagaacttggggattcaggtgggctacctaccatcagtggaggaaatttgacctcttcccatttttttggcattaacatggactgtattcatcaaggtattataccacagcactctatggaaatctcaagattagaaaaaaaaaaagaaccaagttatagagttagtttttattttatttttgcacttcgtcatgacagtatagagtttgtttttaatgtctcataaat

SEQ ID NO: 185023 - DNA, 2003 bp, Homo sapiens
  Payload ID: 16428
  Gene Symbol: SNX32
  Gene Name: sorting nexin 32
  Uniprot ID: Q86XE0
  ENST ID: ENST00000308342
  CDS Start-End: 426-1637
gttggaaggaggggcccggaacggcggcacggggttgttgtgggggtcagtcccccggggactggagggagacgcggcacgcggcctctgcgaccctatgaactctgaccccagctcccacactgtcgcctatcaccggcccactctccgtgccgcgtgtcccttaaaagctggggcctgggacaggaacgacagacaatgcagccaatggcgtcacgcgcggtgccccgctacccaatcgaaaggcgtggctgagggaaacgcggtgggaaccgcccccgactccaggcgactccttggccgggcgggggagagcgtccccgtcagctgagagcatcctcactcggtcagttcctcgggcgagttacggggacgacctgcgggagcacgcgggcagtggccggacgctgaagcccaggagagcgatggagacgtatgcggaggttgggaaggagggcaagccttcctgtgcatcggtggatctgcagggagacagctccttacaggtggagatttctgacgcagtgagtgagcgggacaaggtgaaattcactgttcaaacaaagagctgcctccctcacttcgcccagaccgagttctcagtcgtgcggcagcacgaggagttcatctggctgcatgatgcctacgtggagaatgaggagtacgccggcctcatcatccccccagcccctccgaggccagactttgaggcttcgagggaaaagctacagaaattgggcgagggggacagctctgtcactcgggaagagtttgccaagatgaagcaggagctggaagcggagtacctggccatctttaagaagacagttgcgatgcacgaagtctttctgcagcgcctggcggcccaccccaccctgcgtcgagaccacaacttctttgtgtttttggaatatggacaggatctgagtgtccgggggaagaacaggaaggagctcctcggagggtttctgaggaatattgtgaagtccgcggatgaagccctcatcacgggcatgtcagggctcaaggaggtggatgacttctttgagcatgagaggaccttcctgttggagtatcacacccgtatccgagatgcctgcctgcgggccgaccgcgtcatgcgcgcccacaagtgcctggcagacgattatatccctatctcagctgcgctgagcagtctgggaacacaggaagtcaaccagctaaggacgagcttcctcaaattggcagagctctttgaacggctgaggaagctggagggccgggtggcttccgatgaggacctgaagctgtcagacatgctgaggtactacatgcgtgactcacaggcagccaaggacctgctgtaccggcggctgcgggcactggccgactacgagaatgccaacaaggcgctggacaaggcgcgcaccaggaaccgggaggtgcggcccgccgagagccaccagcagctgtgctgccaacgcttcgagcgcctctccgactccgccaagcaagagctcatggacttcaagtcccgccgggtctcctcttttcgaaagaatctcattgagctggcagagctggagctcaaacacgccaaggccagcaccctgattctccggaacacccttgttgccctaaagggggagccttagagtagccagagctcagccagaccctaatctgggatctccagtgaccagggtatcccagacccctctctccggcaagatgtctccttccctagcagtgccactagccacaccctcactctgccccacatcctctcagggaaagcccaaaccccctatcaccaccaccacaggtgccaggccctgcaagacacagggcagcatgggcatcataactggccacagtcagcagagccccagggaccctgacacctctccccaggaagctgaggaacagcctctaccctcacccatagccctgaaggaatcatagctcacttgatcccggcctgttctccttcgcaaataaaaaccctggttttgtagcaa

SEQ ID NO: 185024 - DNA, 8008 bp, Homo sapiens
  Payload ID: 16429
  Gene Symbol: SNX33
  Gene Name: sorting nexin 33
  Uniprot ID: Q8WV41
  ENST ID: ENST00000308527
  CDS Start-End: 1198-2922
ggaatcgcctttttgttttggagctgccttctcgctggcggagcggagggtctgcgagcgccggggaaggcaggctgggggcgcagcccgccccccactggccgggccccgcagggcggagaggaggacggacggacagacggctggccgcgccatctgctcgccggagctcactctccaaactccaaactgttgagtgtgtgcgtgcacgcgagggtggtgatcgggggtcgtaagtcccgggtgaggaaccggtttctgctggggttacctttggacggggttcctgggattcagagcagggtcagcgtcaggctcagaaactgctgaggaattaggcaaacaaaagagaccactcagcgagtggctagaagtcgcccgacagcctcgtcgcgccccctccttcctccggggttggggctggccacttctggggcggggagagggcgcccgagccggcgggggctccggctgcgcagccggggtcgaagagttggcggcctgttgtgtaagcctcagtccttgttttcccggcctggctcgttgtgaagccggacacatccacccttggactcgattcaggcggctgctgcttttctccttgcccctcttggattttccggatttttgaaaacccagtggcccaggagcaagaggaggaaggaggaaggggcagatctgcagaggaatgtgagagcctcccaaagcgagagccgccaaaagaatctgggagccagagggacagccgagccctgcccgggtttctggaatggtggtttcagagtgagtctcttctattttagaacgttgttccagtggaaagtgtcgaatttttcccctcgcagggcagatttctccaggtcacttgacttttcttctgggagtaggagttaggagagattcccctctaaccccccagaggctgctaagggaggaggagactgtggacatgagccctccctgctcacaagcatatgcccggagacctgatagggcagtttctgggccatggacattgctttgaagagggggagactggacagcatctgtgggtgctgagaccccaccttaggacctgagagattgaactgtgtaagcgccattcagctgcgagtgcattcttggactgccttgtgagcatccccggtctgggcaggaccctctccttcccatctttctataccacccagcccagccatggcactgaaaggccgagccctctatgactttcacagtgagaacaaggaggaaatcagcatccagcaggatgaggacctggtcatctttagcgagacctcactggatggctggctgcagggccagaacagccgtggggagacagggctctttcctgcctcttatgtggagatcgtccgttctggcatcagcaccaaccatgctgactactccagcagccctgcaggctctcccggagcccaggtgagcttgtacaacagccccagtgtggccagcccagctaggagtggtgggggcagtggcttcctctcaaaccagggtagctttgaggaggatgatgatgatgactgggatgactgggacgacggatgcacagtggtggaggagccacgggctggtgggctgggcaccaacgggcaccctcccctcaacctctcctaccctggtgcctaccccagccagcacatggccttccggcccaagccaccactggagcggcaggacagcctggcatctgccaagcgaggcagtgtggtgggccgtaacctcaaccgtttctcatgctttgtgcgttctggagtggaggccttcatcctgggtgatgtgcccatgatggccaagatcgctgagacatactccattgaaatgggccctcgtggcccccagtggaaggccaatccccacccatttgcctgctctgtggaggaccccacaaaacagaccaaattcaagggcatcaaaagctacatctcctacaagctcacacccacccatgctgcctcacccgtctaccggcgctacaaacactttgactggctctataaccgcctgctacacaagttcactgtcatctcggtgccccacctgcctgagaagcaggccactggccgcttcgaggaggacttcatcgaaaagcggaagcggagactcatcctctggatggaccacatgaccagccaccctgtgctctcccagtacgaaggcttccagcatttcctcagctgcctggatgacaagcagtggaagatgggcaaacgccgggcggagaaggatgagatggtgggtgccagcttcctgctcaccttccagatccccaccgagcaccaggacttgcaggacgtggaagatcgcgtggacactttcaaggccttcagtaagaagatggacgacagcgtcctgcagctcagcactgtggcatcagagctggtgcgtaaacatgtggggggcttccgcaaggaattccagaagctgggcagtgccttccaggccatcagtcattccttccagatggacccccccttttgctctgaggccctcaacagtgccatttctcacacgggccgtacctatgaagccatcggggagatgtttgctgagcagcccaagaatgacctcttccagatgctggacacactgtctctctaccagggcctgctctccaacttccctgacatcatccatctacaaaaaggcgccttcgccaaggtgaaggagagccaacgcatgagtgacgagggccgcatggtgcaggacgaggcagacggcattcgcaggcgctgccgcgtggtgggtttcgccctgcaggccgagatgaaccacttccaccagcgccgtgagctcgacttcaagcacatgatgcagaactacttgcgccagcagatcctcttctaccagcgggtgggccagcagctggagaagaccctgcgcatgtatgacaacctctgaccgcgtgtgcctgggccccctccttcccctgggcctggtcactgcagtgtaccccactttcccgacctccctataccagcagtgactgggggaggggtcagcggtgggggagataagcggcctgtcctgcctcctgggagaaggagctttcaaggagtcatgggtgcccctgggaaattccccactccttagaagtggggcacagcaggggtgagaatagagtcaggagccctcgaggccaaggcctgggctgccggtcagtcagtgaaggtcaggccagggtctcagcctcccctagagcctattttgcttgctcacctggccactgctgccttatccattcagcagacaccgaggcctgctgcacccttgggtcggatgctgggcacccagggctgtgacatgcctgctcttcaggagtcctcagtgaaggtcggggtcagacacagacagagtcaatgcagtatgactgatgtttaagtgagggatttctggaagctcatagaagggaccacagcattccactggtcagggaagactccatagagtaggcaacatttgggcagtgttttgaagaatgacaagggcctgccagacagtacatgggggagaaggactttcaggggagaggaacagcatgggcaaagttatggaggcatgcaaacatctccctcttctctcccttactttccaagcaagttaggtacgctttccatggggattctggcctgtgtggtaggaagggatctcccttgctcccatgttgctggctgtccgtacatcaccctgtcccctgcaggagggggctacaggccatctccctcctgtaggcctctgactcccctccacttttgggccctcagcttatctcgggcaggggaccattgcagcatcctcccctcctcggactcaaggtgctgaggtataagccctgggccccagatccctggtgacaccttcctggagaagactctcaaaagtgactgtatatttgagttcaccagcaataactccccacactcgaagcaggtccaaacccaggatctcagggtccttgggctctgtggcactgtcttcccaagatccttcctgttgcacaatgggaaacctaagaggaaaaagacaggggcctgcttgcccagccatgcgagggattccatgcccacctgccctctgtctgcctcgctggaatgtgggcccctgctccccgtcaggttgtgctgtctctgacctatgtttacatccccgaggggtttctgcctcctccccacccaggtcagggtgtggtccagcagcttgctgtggggtgctgacatgtgtcaccactgccccccttgcccccgggggggtcatggtctcctcctggatgctgctccttgaatcttttttcttgataaaccttttacaattaagataacacaagcatgactttttctgtttggatcccagaaaggcggagggcaggagaaggatagagccctaattgctcctgagagccattggatgagattctgaggtcgtggtgggcacaaattttccacagaacctcaaaagttcaggggagggctatgctggtggaaggtgccagcaggcaggaggagctagaggcggctgtggacccctgggtggatccatccctccctagaacgcactcttgtctctaaaacaggtggagtgctgcccaggggactggctgtactgccttgtgatctggggctgagggttgtatgaggaagggacaggacgctgtgccctaggacaattaatagatggtggctcctctccccaaggagccatgccctggccttgcccttgaaaagccctagtccaggggagggaagtgggggactcagaagctgtgtctcttccccaaaccgtcctgggtacccagccctgcggaggctcccacattggaaactgaagaggacgctggctgttgggggtgccctgatcaggatgagcggaccttgctcttggatctgttcatccacagatgagaggagggtactggttgagacttggctctcctttggaggcaatggggacttggtggagggagggcttccagggtcaaggccgtcagggaaggttggctagaccagggaccagggagcttgtgcaggaagatggagaagggccagcaggtgcggtgggggaaggggcgggcaggactccctgttcagggcatagcgtcctcagaggaacttctggaatgggtccccctggcccttggtcaacattaggtcagatttgggactttctgaggaattttcccctctctccaccctgccccattttctaacccatccgaggaacttcccgcccttaacctcttctcagctctgccatccatgtagccatctgcagaaggggctctgagcagtgggggctgggccaggccgaggcagggctggtgggaatgctcctcctaacccatggtgcctggaaagtcccctgctcatgcttcctgctctgggaacagtgttgtcctctgtgtgccttccttgagaggggaccacctcccaggccttccatcctcagggtgaggccatcagtctgatacttttctcaggagggacttggatccaggagaagcatcaggaagtggagtcttgggataatgccaggcctgctcctggtatcctgaggtctctgggctggggcaggtgtgtgtgtggcagggagggaggctgtcctggccctcctctctcttttctttctgcctctatgggggtgggggtattgggggaacttggggccgttctggggtagctaagcccctttcagcaggagattgggggaccagtgttgggggcatcctggtgatggccgattcctgcctcgtcacatgccaggcagatgttcccgactcggctggacccagctgcctcgtttcctcccttactttgctctgagggggtggaaaacaaggcttctctttctgccctggacagctaccagcacccggggtaggggatcccctggtcaccagtcttggcccagtacaggaaaaggaatccgctttgtggccacagatgggggctggggatggaagcagacctcagatcctgcatctcttcacccgctggacacaggagggctatgaaccactgtgccgtggctgcaccactggctggagcagagccaggcctgggagaggcaggtggccccatcggcccctgctctgcaccacccctcccagatgacagagccatatgtcttccacgtgtctacacactcacagactcacgaatgtaatcgctcagtctcacaacaagcacacgcagtcacacacctgcccacaggcacatacgccacataagcatgcctgtatgctcacacagtcatactgccacacgctattacacattcacagccacagccacacatgccttgccatccattcaaagcaccagtggctactttgtcagacacagccacaccacagtcctatgcacatggtcatagcctcacacagtgacacatactcgggcacacaccgccacaaagccatgcttgcacagagcaaaggtgtcataagcatctctgtgcctggactgcacctgcatgacctcccagggtccccacctcatcagagattaaggagagctttgcttggagacaccacccctggagggggtgtctccaagggggagtagagccagtcacaagcaccacatacaggcacacagcctgaggtctagggatgcaattgggatgactggataccaccaagttcagctccttattgaacagatgggcgcctgaggcccagggagcagtggtggctggccttatcacccagcagggcaggggatactctggggccagagcctggctctgggcagactctgtttcctggccctgccctcccctgggccaatcctctgggccaggctgcctctgaaggcccctggctgaaccgatccagcagagctccaggcagctcccttctcaagctagagctgagctgcagtggccacgggagccggagccaggatgcggtgggcagggcctaggcctgggcgggaggaacattcctgcaccatctcctccccaagcatgtgaggacccagcccgccctgcccgcctgcccgctgactcaggcctccaggagccaagcctgctcagctcccccacccaccctaacctgcttccccactagttcggctctggttcccctctccactggctggggcaggagaagacggtgagccctggtaggaagaccatggggaaaaatcaaacctcaccaccccccgacatagctcagaagggctgattgtgaaacccagctctgttcaacatagttgaacacaaactttttttttcttttggtttggttttgttttgttggtcaaaccccagtgcagtgcagtctgtttaagaagtagtgtcgcatagctgtggcctggatctgctcagcagccccagtaggcagcatttattccctttcgcaacaaagagactgagacttggccagagggaagatgggacctgcctaggttcacacagggaatctctggcggggctggactcaaacccagctccctgccatcactccttagagtcacactgatgaactcatttagggccaaaggaagaaggggaggcagatttcccctctagatgagtgaagggataggaggctggtgaacccaacggctgaaatgtgaagggtgagagggtagggtgagtccccccagccctgagggatgaagggtctgaagatggcactgcacggtgacagctgcagtgactcaggagctccgtttacaaaggaacatgagtgaggaacataacttaatttttttttatatctgacctgaatttctgttttcctcccccattccccacatggtagaagtgtaatctcacatcaatttggggaccctttctttccccagggatgtgtagaacttttggggatggcacatttgaagaccttagggagctttgcattttaaaggctgaatcccacactctatcatacatattaatatttacctgcattccacattaaagggttcagtttatgacttgtgtcctgtcttgtagatacttaattaaacggtattaattttga

SEQ ID NO: 185025 - DNA, 2265 bp, Homo sapiens
  Payload ID: 16429
  Gene Symbol: SNX33
  Gene Name: sorting nexin 33
  ENST ID: ENST00000569152
  CDS Start-End: 1-850
tcgtggcccccagtggaaggccaatccccacccatttgcctgctctgtggaggaccccacaaaacagaccaaattcaagggcatcaaaagctacatctcctacaagctcacacccacccatgctgcctcacccgtctaccggcgctacaaacactttgactggctctataaccgcctgctacacaagttcactgtcatctcggtgccccacctgcctgagaagcaggccactggccgcttcgaggaggacttcatcgaaaagcggaagcggagactcatcctctggatggaccacatgaccagccaccctgtgctctcccagtacgaaggcttccagcatttcctcagctgcctggatgacaagcagtggaagatgggcaaacgccgggcggagaaggatgagatggtgggtgccagcttcctgctcaccttccagatccccaccgagcaccaggacttgcaggacgtggaagatcgcgtggacactttcaaggccttcagtaagaagatggacgacagcgtcctgcagctcagcactgtggcatcagagctgggcctgctctccaacttccctgacatcatccatctacaaaaaggcgccttcgccaaggtgaaggagagccaacgcatgagtgacgagggccgcatggtgcaggacgaggcagacggcattcgcaggcgctgccgcgtggtgggtttcgccctgcaggccgagatgaaccacttccaccagcgccgtgagctcgacttcaagcacatgatgcagaactacttgcgccagcagatcctcttctaccagcgggtgggccagcagctggagaagaccctgcgcatgtatgacaacctctgaccgcgtgtgcctgggccccctccttcccctgggcctggtcactgcagtgtaccccactttcccgacctccctataccagcagtgactgggggaggggtcagcggtgggggagataagcggcctgtcctgcctcctgggagaaggagctttcaaggagtcatgggtgcccctgggaaattccccactccttagaagtggggcacagcaggggtgagaatagagtcaggagccctcgaggccaaggcctgggctgccggtcagtcagtgaaggtcaggccagggtctcagcctcccctagagcctattttgcttgctcacctggccactgctgccttatccattcagcagacaccgaggcctgctgcacccttgggtcggatgctgggcacccagggctgtgacatgcctgctcttcaggagtcctcagtgaaggtcggggtcagacacagacagagtcaatgcagtatgactgatgtttaagtgagggatttctggaagctcatagaagggaccacagcattccactggtcagggaagactccatagagtaggcaacatttgggcagtgttttgaagaatgacaagggcctgccagacagtacatgggggagaaggactttcaggggagaggaacagcatgggcaaagttatggaggcatgcaaacatctccctcttctctcccttactttccaagcaagttaggtacgctttccatggggattctggcctgtgtggtaggaagggatctcccttgctcccatgttgctggctgtccgtacatcaccctgtcccctgcaggagggggctacaggccatctccctcctgtaggcctctgactcccctccacttttgggccctcagcttatctcgggcaggggaccattgcagcatcctcccctcctcggactcaaggtgctgaggtataagccctgggccccagatccctggtgacaccttcctggagaagactctcaaaagtgactgtatatttgagttcaccagcaataactccccacactcgaagcaggtccaaacccaggatctcagggtccttgggctctgtggcactgtcttcccaagatccttcctgttgcacaatgggaaacctaagaggaaaaagacaggggcctgcttgcccagccatgcgagggattccatgcccacctgccctctgtctgcctcgctggaatgtgggcccctgctccccgtcaggttgtgctgtctctgacctatgtttacatccccgaggggtttctgcctcctccccacccaggtcagggtgtggtccagcagcttgctgtggggtgctgacatgtgtcaccactgccccccttgcccccgggggggtcatggtctcctcctggatgctgctccttgaatcttttttcttgataaaccttttacaattaagat

SEQ ID NO: 185026 - DNA, 2513 bp, Homo sapiens
  Payload ID: 16430
  Gene Symbol: SNX4
  Gene Name: sorting nexin 4
  Uniprot ID: O95219
  ENST ID: ENST00000251775
  CDS Start-End: 26-1378
gggttcgccgcgccgaactgcagccatggagcaggcacctccggaccccgagcggcagctccagccggcgcccttggagccgctgggctccccagacgctgggctgggggctgcggtcggcaaggaagcggagggggccggagaagagagctctggggtcgacacgatgacacacaataatttttggttgaagaagatagaaatcagtgtttcagaagcagaaaaacgaactggaagaaatgccatgaacatgcaagaaacatatactgcttacctcattgaaacaaggtcagttgaacataccgatggtcagagtgtcctaacagactcactatggcggcgatatagtgaatttgagttgttgagaagctaccttttagtttactatccacatattgttgtgccacctctgccagaaaaacgggcagaatttgtttggcataaactctctgctgacaacatggatccagattttgtggagaggcgacggattggtttagaaaactttctcttgaggattgcttcacatcccatcctttgtagagacaaaatcttctatctgtttttaacacaggaaggtaactggaaggagactgtgaatgaaactgggtttcagctgaaggcagactccaggttaaaagcgcttaatgcaacattcagagtgaaaaacccagacaagagatttactgaccttaagcactatagtgatgaactgcagtctgtcatctcacatcttcttcgagtcagagctagagtagcagatcgactctatggtgtatataaagtacatgggaattatggtcgagttttcagtgaatggagtgccatagaaaaagaaatgggtgatggactgcagagtgctggtcatcatatggatgtgtatgcatcttctattgatgatattttggaagatgaagaacattatgcagatcagttaaaagagtatcttttttatgcagaagcattgcgggctgtgtgcaggaaacatgaacttatgcagtatgacttggagatggctgctcaggacttagcatccaagaagcagcagtgtgaggaactggtaactgggactgtgagaacattctctttgaagggaatgactaccaagctctttggtcaagaaactccagagcagagagaagccagaataaaggtgctagaagaacaaataaatgaaggagaacaacagctaaagtctaaaaatctggaaggcagagaatttgtgaaaaacgcatgggctgatattgaacgcttcaaagaacaaaagaaccgagacttaaaggaggccctcataagctatgcagtcatgcagatcagtatgtgcaaaaagggaattcaagtttggaccaatgctaaggaatgctttagcaagatgtaatcctgtgaattgaatttctcttcaatcaaagtgccccaaaacagaagcacaagtaaataaaagaaatttaagtcactacctagtatacataaacatatacaataagttaaataaattcagctttctttaacttaattgtggtcgtgttaatgtagcacaaaaaatatattttaatgaagattaaatattataatttgaggttttggggactggtgctgattccaaaaagttaatttaataatatataccaacagattgtttgtcacgcttctgaaccaatgactgaatgtcaagatgttcgttaatttctagatgtttgtttcaagaccagctgtttcagatctattaatgtagggaatttttccctaagattgaattcctatatttacttggtaagatccactaatctgttatagggagttgttttctcttgccttatagttgagctatttggtttgacaaagctcagcagaaacttgatgtgaaaaatctacgattttcttctacattcattgatgccccttgtaatgtttgcatacactagaaaatgccttcaatttgtgttttaccagaattttgatactggtcagaaattttatactgccaacaaagaagactcaacttctcagatctataatgggatacattgtcatcctctagcaactcctatatagaaagttttaactgaatatgttacatataagaattaaattcttctcaaataattcttaacctcagtaatgagcctaaatttactctgcttggctctctacacatggcatttcagggtataagatgtagcatttcaatgtgtaagatatatgtactaaacatatgtgttgctatcttcatcattaacatccttcttttctattgcttggctgtaatttttgtaaagataaattatattgtttttttgtatgtgtgtttgtagtatatgttcagaaggcaagcatcttcattttgctagctttgcagaatcttaaaatgtgtactcgttatttctaatgatgtaaaaaaaaatccctagtcctgtttagcatttgacttttttatatgttttaaatgttgctggatttttgtgctgtttgccaaacttatacaataaataaatgaaatattgtgctgattttca

SEQ ID NO: 185027 - DNA, 591 bp, Homo sapiens
  Payload ID: 16430
  Gene Symbol: SNX4
  Gene Name: sorting nexin 4
  ENST ID: ENST00000465505
  CDS Start-End: 1-468
atgacacacaataatttttggttgaagaagatagaaatcagtgtttcagaagcagaaaaacgaactggaagaaatgccatgaacatgcaagaaacatatactgcttacctcattgaaacaaggtcagttgaacataccgatggtcagagtgtcctaacagactcactatggcggcgatatagtgaatttgagttgttgagaagctaccttttagtttactatccacatattgttgtgccacctctgccagaaaaacgggcagaatttgtttggcataaactctctgctgacaacatggatccagattttgtggagaggcgacggattggtttagaaaactttctcttgaggattgcttcacatcccatcctttgtagagacaaaatcttctatctgtttttaacacaggaaggtaactggaaggagactgtgaatgaaactgggtttcagctgaaggagatttactgaccttaagcactatagtgatgaactgcagtctgtcatctcacatcttcttcgagtcagagctagagtagcagatcgactctatggtgtatataaagtacatgggaattatggtcgagttttcag

SEQ ID NO: 185028 - DNA, 1308 bp, Homo sapiens
  Payload ID: 16430
  Gene Symbol: SNX4
  Gene Name: sorting nexin 4
  ENST ID: ENST00000471751
  CDS Start-End: 10-159
actgcagccatggagcaggcacctccggaccccgagcggcagctccagccggcgcccttggagccgctgggctccccagacgctgggctgggggctgcggtcggcaaggaagcggagggggccggagaagagagctctggggtcgacacggtcagttgaacataccgatggtcagagtgtcctaacagactcactatggcggcgatatagtgaatttgagttgttgagaagctaccttttagtttactatccacatattgttgtgccacctctgccagaaaaacgggcagaatttgtttggcataaactctctgctgacaacatggatccagattttgtggagaggcgacggattggtttagaaaactttctcttgaggattgcttcacatcccatcctttgtagagacaaaatcttctatctgtttttaacacaggaaggtaactggaaggagactgtgaatgaaactgggtttcagctgaaggcagactccaggttaaaagcgcttaatgcaacattcagagtgaaaaacccagacaagagatttactgaccttaagcactatagtgatgaactgcagtctgtcatctcacatcttcttcgagtcagagctagagtagcagatcgactctatggtgtatataaagtacatgggaattatggtcgagttttcagtgaatggagtgccatagaaaaagaaatgggtgatggactgcagagtgctggtcatcatatggatgtgtatgcatcttctattgatgatattttggaagatgaagaacattatgcagatcagttaaaagagtatcttttttatgcagaagcattgcgggctgtgtgcaggaaacatgaacttatgcagtatgacttggagatggctgctcaggacttagcatccaagaagcagcagtgtgaggaactggtaactgggactgtgagaacattctctttgaagggaatgactaccaagctctttggtcaagaaactccagagcagagagaagccagaataaaggtgctagaagaacaaataaatgaaggagaacaacagctaaagtctaaaaatctggaaggcagagaatttgtgaaaaacgcatgggctgatattgaacgcttcaaagaacaaaagaaccgagacttaaaggaggccctcataagctatgcagtcatgcagatcagtatgtgcaaaaagggaattcaagtttggaccaatgctaaggaatgctttagcaagatgtaatcctgtgaattgaatttctcttcaatcaaagtgccccaaaacagaagcacaagtaaataaaagaaatt

SEQ ID NO: 185029 - DNA, 2270 bp, Homo sapiens
  Payload ID: 16431
  Gene Symbol: SNX5
  Gene Name: sorting nexin 5
  Uniprot ID: Q9Y5X3
  ENST ID: ENST00000377759
  CDS Start-End: 296-1510
tcctcgtggagcggagcaagggtaggccccacgtggcgtctttgcccggctccaagatggacggcagcggggactgggaggctgctctgggggagcacgtggcgccctgctcgcctgctcccggggcagctgggatggtggcggagtccggaggcctcctgccgccgtcgggcagggaggccggcggaggcggggccgtggccgcccccgagaggcgcccaggcggcggcggcggcggcccagcttcttctttcctcgcacagccaggcggcccctgctcgagtcccgcgtcgccatggccgcggttcccgagttgctgcagcagcaggaggaggaccgcagcaagctgagatctgtatctgtggacctgaatgttgatccctcgcttcagattgacatacctgatgcgctcagtgagagagacaaagtcaaatttacagtgcacacaaagaccacactgcccacgtttcagagcccagagttttctgttacaaggcaacatgaagactttgtgtggctacatgacactcttattgaaacaacagactatgctgggcttattattccacctgctcctacgaagcccgactttgatggtcctcgagagaagatgcagaaactgggagaaggtgaagggtctatgaccaaagaagaatttgccaagatgaaacaagaactggaagctgagtatctcgctgtgtttaagaagactgtgtcctcccatgaagtctttcttcagcggctttcttctcaccctgttctcagtaaagatcgcaactttcatgttttcctggaatatgatcaggatctaagtgttaggcggaaaaatactaaagagatgtttggtggcttcttcaaaagtgtggtgaaaagtgctgatgaagtcctttttactggagttaaggaggtagatgacttctttgagcaagagaagaacttccttattaactattacaataggatcaaagattcttgtgtgaaagctgacaaaatgaccagatctcataaaaatgttgccgatgactatatccacaccgcagcctgcttacatagcctggctttagaagagcccacagtcatcaaaaagtacctattgaaggttgctgagctatttgaaaaactaaggaaagtagagggtcgagtttcatcagatgaagatttgaagctaacagagctcctccgatactacatgctcaacattgaagctgctaaggatctcttatacagacgcaccaaagccctcattgactatgagaactcaaacaaagctctggataaggcccggttaaagagcaaagacgtcaagttggctgaggcacaccagcaggagtgctgccagaaatttgaacaactttccgaatctgcaaaagaagaactgataaatttcaaacggaagagagtggcagcatttagaaagaatctaattgaaatgtctgaactggaaataaaacatgccaggaacaatgtctcccttttgcagagctgtattgacttgttcaagaataactgatatgccttcactcagaagaaaagaaatgaatgtgaaagaaagccaagcatcacttgcacttaaatcattaccacggaagatatattagcttcaactttagtttaaaattatgtgaataaatattttgatttctacaaatcttaacatttaaccatgttggtttaaaaatattattgcttgctacttggacataactaatttttccttgtgcatttaatacctctgggcagaatccaaatactgggttctcccgtagttcgtctttagttactaagaaagggtgtaggacacattagccttctggaaacaagtagaagccatcacctggcccatgtccctacaaacccatgattgtcagggaggtgccagttacagcaggtgattcagctacttgaggtcggtaacagaccttccattcctcactgaaggtggggtttgtgtttttgttttgccctgttactccactggtagtcatctggtgtttgtactataacaacagcaagaaaatctcatttatctttatatactctttgcacctcctttttttagtcgagatataaatatttgaggggagagaaatatctacaggtatatatggaaacaaataatgtggtctgctttataagatggccagatctacattaggaaaagtataagccccctccctaatggccgctggggggtgagggcggtgtgttgtatgtctttgggtgtttgtttttttataaagcatataataaaataatcgtgctactaatgt

SEQ ID NO: 185030 - DNA, 2288 bp, Homo sapiens
  Payload ID: 16431
  Gene Symbol: SNX5
  Gene Name: sorting nexin 5
  Uniprot ID: Q9Y5X3
  ENST ID: ENST00000377768
  CDS Start-End: 314-1528
ggcctccgccaacgcgccaccagttagaggcagggagtacctctccgagcggaagggccggcgtctccgaagcgcgggagcctccaaatcgcgcccttctgctctcacgagatctggtgacgtcagcgctcgctgccatcttggactcgggctgagtaataaattccccccgcaccgaaacgcggtctttctctagacgcgtcttgctgggagagtgtccgttgcttcccgtccgtgtcgcggccctgcggttggcggcctcctcgtggagcggagcaaggccaggcggcccctgctcgagtcccgcgtcgccatggccgcggttcccgagttgctgcagcagcaggaggaggaccgcagcaagctgagatctgtatctgtggacctgaatgttgatccctcgcttcagattgacatacctgatgcgctcagtgagagagacaaagtcaaatttacagtgcacacaaagaccacactgcccacgtttcagagcccagagttttctgttacaaggcaacatgaagactttgtgtggctacatgacactcttattgaaacaacagactatgctgggcttattattccacctgctcctacgaagcccgactttgatggtcctcgagagaagatgcagaaactgggagaaggtgaagggtctatgaccaaagaagaatttgccaagatgaaacaagaactggaagctgagtatctcgctgtgtttaagaagactgtgtcctcccatgaagtctttcttcagcggctttcttctcaccctgttctcagtaaagatcgcaactttcatgttttcctggaatatgatcaggatctaagtgttaggcggaaaaatactaaagagatgtttggtggcttcttcaaaagtgtggtgaaaagtgctgatgaagtcctttttactggagttaaggaggtagatgacttctttgagcaagagaagaacttccttattaactattacaataggatcaaagattcttgtgtgaaagctgacaaaatgaccagatctcataaaaatgttgccgatgactatatccacaccgcagcctgcttacatagcctggctttagaagagcccacagtcatcaaaaagtacctattgaaggttgctgagctatttgaaaaactaaggaaagtagagggtcgagtttcatcagatgaagatttgaagctaacagagctcctccgatactacatgctcaacattgaagctgctaaggatctcttatacagacgcaccaaagccctcattgactatgagaactcaaacaaagctctggataaggcccggttaaagagcaaagacgtcaagttggctgaggcacaccagcaggagtgctgccagaaatttgaacaactttccgaatctgcaaaagaagaactgataaatttcaaacggaagagagtggcagcatttagaaagaatctaattgaaatgtctgaactggaaataaaacatgccaggaacaatgtctcccttttgcagagctgtattgacttgttcaagaataactgatatgccttcactcagaagaaaagaaatgaatgtgaaagaaagccaagcatcacttgcacttaaatcattaccacggaagatatattagcttcaactttagtttaaaattatgtgaataaatattttgatttctacaaatcttaacatttaaccatgttggtttaaaaatattattgcttgctacttggacataactaatttttccttgtgcatttaatacctctgggcagaatccaaatactgggttctcccgtagttcgtctttagttactaagaaagggtgtaggacacattagccttctggaaacaagtagaagccatcacctggcccatgtccctacaaacccatgattgtcagggaggtgccagttacagcaggtgattcagctacttgaggtcggtaacagaccttccattcctcactgaaggtggggtttgtgtttttgttttgccctgttactccactggtagtcatctggtgtttgtactataacaacagcaagaaaatctcatttatctttatatactctttgcacctcctttttttagtcgagatataaatatttgaggggagagaaatatctacaggtatatatggaaacaaataatgtggtctgctttataagatggccagatctacattaggaaaagtataagccccctccctaatggccgctggggggtgagggcggtgtgttgtatgtctttgggtgtttgtttttttataaagcatataataaaataatcgtgctactaatgt

SEQ ID NO: 185031 - DNA, 840 bp, Homo sapiens
  Payload ID: 16431
  Gene Symbol: SNX5
  Gene Name: sorting nexin 5
  ENST ID: ENST00000431277
  CDS Start-End: 34-840
gccaggcggcccctgctcgagtcccgcgtcgccatggccgcggttcccgagttgctgcagcagcaggaggaggaccgcagcaagctgagatctgtatctgtggacctgaatgttgatccctcgcttcagattgacatacctgatgcgctcagtgagagagacaaagtcaaatttacagtgcacacaaagattccacctgctcctacgaagcccgactttgatggtcctcgagagaagatgcagaaactgggagaaggtgaagggtctatgaccaaagaagaatttgccaagatgaaacaagaactggaagctgagtatctcgctgtgtttaagaagactgtgtcctcccatgaagtctttcttcagcggctttcttctcaccctgttctcagtaaagatcgcaactttcatgttttcctggaatatgatcaggatctaagtgttaggcggaaaaatactaaagagatgtttggtggcttcttcaaaagtgtggtgaaaagtgctgatgaagtcctttttactggagttaaggaggtagatgacttctttgagcaagagaagaacttccttattaactattacaataggatcaaagattcttgtgtgaaagctgacaaaatgaccagatctcataaaaatgttgccgatgactatatccacaccgcagcctgcttacatagcctggctttagaagagcccacagtcatcaaaaagtacctattgaaggttgctgagctatttgaaaaactaaggaaagtagagggtcgagtttcatcagatgaagatttgaagctaacagagctcctccgatactacatgctcaacattgaagctgctaag

SEQ ID NO: 185032 - DNA, 778 bp, Homo sapiens
  Payload ID: 16431
  Gene Symbol: SNX5
  Gene Name: sorting nexin 5
  ENST ID: ENST00000419004
  CDS Start-End: 87-778
gagaggcgcccaggcggcggcggcggcggcccagcttcttctttcctcgcacagccaggcggcccctgctcgagtcccgcgtcgccatggccgcggttcccgagttgctgcagcagcaggaggaggaccgcagcaagaccacactgcccacgtttcagagcccagagttttctgttacaaggcaacatgaagactttgtgtggctacatgacactcttattgaaacaacagactatgctgggcttattattccacctgctcctacgaagcccgactttgatggtcctcgagagaagatgcagaaactgggagaaggtgaagggtctatgaccaaagaagaatttgccaagatgaaacaagaactggaagctgagtatctcgctgtgtttaagaagactgtgtcctcccatgaagtctttcttcagcggctttcttctcaccctgttctcagtaaagatcgcaactttcatgttttcctggaatatgatcaggatctaagtgttaggcggaaaaatactaaagagatgtttggtggcttcttcaaaagtgtggtgaaaagtgctgatgaagtcctttttactggagttaaggaggtagatgacttctttgagcaagagaagaacttccttattaactattacaataggatcaaagattcttgtgtgaaagctgacaaaatgaccagatctcataaaaatgttgccgatgactatatccacaccgcagcctgcttacatagcctggctttagaagagcccacagtcatcaaaaagtacct

SEQ ID NO: 185033 - DNA, 1087 bp, Homo sapiens
  Payload ID: 16431
  Gene Symbol: SNX5
  Gene Name: sorting nexin 5
  Uniprot ID: Q9Y5X3
  ENST ID: ENST00000606557
  CDS Start-End: 350-730
ctgggagagtgtccgttgcttcccgtccgtgtcgcggccctgcggttggcggcctcctcgtggagcggagcaagggtaggccccacgtggcgtctttgcccggctccaagatggacggcagcggggactgggaggctgctctgggggagcacgtggcgccctgctcgcctgctcccggggcagctgggatggtggcggagtccggaggcctcctgccgccgtcgggcagggaggccggcggaggcggggccgtggccgcccccgagaggcgcccaggcggcggcggcggcggcccagcttcttctttcctcgcacagccaggcggcccctgctcgagtcccgcgtcgccatggccgcggttcccgagttgctgcagcagcaggaggaggaccgcagcaaggtgaggtcctcccagcctcagactcctgggcgggcggccctgcgagctccggggtcgctgcattctttcccttgcgcgtccataggccgtggctgctcgccgccatccccagcgcgggaagcacccgtgagacccgggcggcccctctccctggtcttcactgaaggctgccccggggaatccctgtggatgtcccggattctattaggacagaaccagagacgcgggaccttagccccagctcaggcgccggtgccgagcggacttggagagatgatctctggagaccccggaatgttctttttaaaactttcctcggcttcgtggtgaccagtaggtgaacgtgaaattgacttaacatgcgacagaccagtttggtttgttgcccccaaaataccctccttccccccaccttttactgagaagacttttttggggggggggcccaaacaacttgggaaattgcatcaagcgtccgaacatgctgcttacaactttagaaacgcaaaatgcgttgttgtgggagttgtgtaatttttagtaggtgctcaaatacttgctgaacttggtgtctatttttaagtcttgcccattgatgtaaactgtccctaggtcacgtgtatcttgaggtctaaaagattatttatgcaataaattgaaattcccatagccaattaaagattcaga

SEQ ID NO: 185034 - DNA, 562 bp, Homo sapiens
  Payload ID: 16431
  Gene Symbol: SNX5
  Gene Name: sorting nexin 5
  ENST ID: ENST00000481323
  CDS Start-End: 141-236
ccgcaccgaaacgcggtctttctctagacgcgtcttgctgggagagtgtccgttgcttcccgtccgtgtcgcggccctgcggttggcggcctcctcgtggagcggagcaagggcggcccctgctcgagtcccgcgtcgccatggccgcggttcccgagttgctgcagcagcaggaggaggaccgcagcaaggccgtggctgctcgccgccatccccagcgcgggaagcacccgtgagacccgggcggcccctctccctggtcttcactgaaggctgccccggggaatccctgtggatgtcccggattctattaggacagaaccagagacgcgggaccttagccccagctcaggcgccggtgccgagcggacttggagagatgatctctggagaccccggaatgttctttttaaaactttcctcggcttcgtggtgaccagtaggtgaacgtgaaattgacttaacatgcgacagaccagtttggtttgttgcccccaaaataccctccttccccccaccttttactgagaagacttttttggggggggggcccaaacaactt

SEQ ID NO: 185035 - DNA, 602 bp, Homo sapiens
  Payload ID: 16431
  Gene Symbol: SNX5
  Gene Name: sorting nexin 5
  ENST ID: ENST00000486039
  CDS Start-End: 370-465
ctttctctagacgcgtcttgctgggagagtgtccgttgcttcccgtccgtgtcgcggccctgcggttggcggcctcctcgtggagcggagcaagggtaggccccacgtggcgtctttgcccggctccaagatggacggcagcggggactgggaggctgctctgggggagcacgtggcgccctgctcgcctgctcccggggcagctgggatggtggcggagtccggaggcctcctgccgccgtcgggcagggaggccggcggaggcggggccgtggccgcccccgagaggcgcccaggcggcggcggcggcggcccagcttcttctttcctcgcacagccaggcggcccctgctcgagtcccgcgtcgccatggccgcggttcccgagttgctgcagcagcaggaggaggaccgcagcaaggccgtggctgctcgccgccatccccagcgcgggaagcacccgtgagacccgggcggcccctctccctggtcttcactgaaggctgccccggggaatccctgtggatgtcccggattctattaggacagaaccagagacgcgggaccttagccccagctcaggcgccggtgccgagcggactt

SEQ ID NO: 185036 - DNA, 885 bp, Homo sapiens
  Payload ID: 16431
  Gene Symbol: SNX5
  Gene Name: sorting nexin 5
  ENST ID: ENST00000606602
  CDS Start-End: 361-528
gacgcgtcttgctgggagagtgtccgttgcttcccgtccgtgtcgcggccctgcggttggcggcctcctcgtggagcggagcaagggtaggccccacgtggcgtctttgcccggctccaagatggacggcagcggggactgggaggctgctctgggggagcacgtggcgccctgctcgcctgctcccggggcagctgggatggtggcggagtccggaggcctcctgccgccgtcgggcagggaggccggcggaggcggggccgtggccgcccccgagaggcgcccaggcggcggcggcggcggcccagcttcttctttcctcgcacagccaggcggcccctgctcgagtcccgcgtcgccatggccgcggttcccgagttgctgcagcagcaggaggaggaccgcagcaagaaccagagacgcgggaccttagccccagctcaggcgccggtgccgagcggacttggagagatgatctctggagaccccggaatgttctttttaaaactttcctcggcttcgtggtgaccagtaggtgaacgtgaaattgacttaacatgcgacagaccagtttggtttgttgcccccaaaataccctccttccccccaccttttactgagaagacttttttggggggggggcccaaacaacttgggaaattgcatcaagcgtccgaacatgctgcttacaactttagaaacgcaaaatgcgttgttgtgggagttgtgtaatttttagtaggtgctcaaatacttgctgaacttggtgtctatttttaagtcttgcccattgatgtaaactgtccctaggtcacgtgtatcttgaggtctaaaagattatttatgcaataaattgaaattcccatagccaattaaagattcaga

SEQ ID NO: 185037 - DNA, 845 bp, Homo sapiens
  Payload ID: 16431
  Gene Symbol: SNX5
  Gene Name: sorting nexin 5
  ENST ID: ENST00000463050
  CDS Start-End: 1-512
tgaaaagtgctgatgaagtcctttttactggagttaaggaggtagatgacttctttgagcaagagaagaacttccttattaactattacaataggatcaaagattcttgtgtgaaagctgacaaaatgaccagatctcataaaaatgttgccgatgactatatccacaccgcagcctgcttacatagcctggctttagaagagcccacagtcatcaaaaagtacctattgaaggttgctgagctatttgaaaaactaaggaaagtagagggtcgagtttcatcagatgaagatttgaagctaacagagctcctccgatactacatgctcaacattgaagctgctaaggatctcttatacagacgcaccaaagccctcattgactatgagaactcaaacaaagctctggataaggcccggttaaagagcaaagacgtcaagttggctgaggcacaccagcaggagtgctgccagaaatttgaacaactttccgaatctgcaaaagaaggttgagcaggacattcttctttctgtactgtaatttgaaaataatttcaaacttagaaaagttctacaaatagtgcaaaaaacacccatgtatccttcacccagtgtcagcacttcacccctctgccttatcacttgcacatgcacagtcatcctcatggctttgcgtgcttacaaacgttacacacctggtttttctgtaccattggagattaagttgcatatgtcatgcttcttttagccctaaaaacgttgtggtttatttcctaagactgaagacattctcttgtatggttacagtatggttgtttgctgtgataaacttaactttgggtctac

SEQ ID NO: 185038 - DNA, 2001 bp, Homo sapiens
  Payload ID: 16432
  Gene Symbol: SNX6
  Gene Name: sorting nexin 6
  ENST ID: ENST00000362031
  CDS Start-End: 32-1288
ctggccgccggctccctccggcagcagggagatgcgcgcctgcgccggccctcgcctcggagcagccatgatggaaggcctggacgacggcccggacttcctctcagaagaggaccgcggacttaaagcaataaatgtagatcttcaaagtgatgctgctctgcaggtggacatttctgatgctcttagtgagcgggataaagtaaaattcactgttcacacaaagagttcattgccaaattttaaacaaaacgagttttcagttgttcggcaacatgaggaatttatctggcttcatgattcctttgttgaaaatgaagactatgcaggttatatcattccaccagcaccaccaagacctgattttgatgcttcaagggaaaaactacagaagcttggtgaaggagaagggtcaatgacgaaggaagaattcacaaagatgaaacaggaactggaagctgaatatttggcaatattcaagaagacagttgcgatgcatgaagtgttcctgtgtcgtgtggcagcacatcctattttgagaagagatttaaatttccatgtcttcttggaatataatcaagatttgagtgtgcgaggaaaaaataaaaaagagaaacttgaagacttctttaaaaacatggttaaatcagcagatggagtaatcgtttcaggagtaaaggatgtagatgatttctttgagcacgaacgaacatttcttttggagtatcataaccgagttaaggatgcatctgctaaatctgatagaatgacaagatcccacaaaagtgctgcagatgattacaatagaattggttcttcattatatgctttaggaactcaggattctacagatatatgcaagttttttctcaaagtttcagaactgttcgataaaacaagaaaaatagaagcacgagtgtctgctgatgaagacctcaaactttctgatcttttaaaatattacttaagagaatctcaagctgctaaggatctcctgtatcgaaggtctaggtcactagtggattatgaaaatgctaataaagcactggataaagcaagagcaaaaaataaagatgttctacaggccgaaacttcccaacaattatgttgtcagaaatttgaaaaaatatctgagtctgcaaaacaagaacttatagattttaagacaagaagagttgctgcattcagaaaaaatttagtggaactggcagagttagaactgaagcatgcaaagggtaatctacagttgctgcagaactgcctggcagtgttaaatggagacacataagccacactccgccttcctgttaaaaagggctgccttccttcaaattttatttttgttttcttaatgatgttaagcatttatgctcactggaaacaaacaaaaagcagctgaaaaagtgcatcaactcctctttttctgagaaacatggagcagcgcacgcccaggcgatgccagtctgtgtgccgtgatgccgcactgtgttccccatgacagtggtccatcatcgtgcactcgtcatactcagaagtccaaagttcattcttctttaaagtagcctctataactctgtttattttataaatagtattccttatggctgccactcttatttacctttaaataatttctgaaatttaaccttttcagaatgcattgttgaaacaagataaagattgccttttttgaattttttaaattttgtttttaaaagcatataccaccttagttcattcatgtatcctggtaaagcatcttaatcagacttatttttaattactgaatatttcttagacgttttgggacagattttatgtaatctttataagtatgatttctgaagaaaagcaaatgcattagtatgtttgccttaaacttgtagactaaaccaagtattgtaaaataaacagcgataacagtgatagtttttaactctatggtcattgtatcactctggaaaatgtggagtagctgtaataaatctactcctgtattat

SEQ ID NO: 185039 - DNA, 3398 bp, Homo sapiens
  Payload ID: 16432
  Gene Symbol: SNX6
  Gene Name: sorting nexin 6
  Uniprot ID: Q9UNH7
  ENST ID: ENST00000396526
  CDS Start-End: 498-1370
tgggtgttctccgcggcgccgagtcccgggagcgcggtgggggcagcgggcgcggggcgggcgcggggaccgcgccagcctgtcactaatgtctccctttgtgtctcccccatctcatccttttccccggcgcgccgtgcccgccgaccccacaggaaggcctggacgacggcccggacttcctctcagaagaggaccgcggacttaaagcaataaatgtagatcttcaaagtgatgctgctctgcaggtggacatttctgatgctcttagtgagcgggataaagtaaaattcactgttcacacaaagagttcattgccaaattttaaacaaaacgagttttcagttgttcggcaacatgaggaatttatctggcttcatgattcctttgttgaaaatgaagactatgcaggttatatcattccaccagcaccaccaagacctgattttgatgcttcaagggaaaaactacagaagcttggtgaaggagaagggtcaatgacgaaggaagaattcacaaagatgaaacaggaactggaagctgaatatttggcaatattcaagaagacagttgcgatgcatgaagtgttcctgtgtcgtgtggcagcacatcctattttgagaagagatttaaatttccatgtcttcttggaatataatcaagatttgagtgtgcgaggaaaaaataaaaaagagaaacttgaagacttctttaaaaacatggttaaatcagcagatggagtaatcgtttcaggagtaaaggatgtagatgatttctttgagcacgaacgaacatttcttttggagtatcataaccgagttaaggatgcatctgctaaatctgatagaatgacaagatcccacaaaagtgctgcagatgattacaatagaattggttcttcattatatgctttaggaactcaggattctacagatatatgcaagttttttctcaaagtttcagaactgttcgataaaacaagaaaaatagaagcacgagtgtctgctgatgaagacctcaaactttctgatcttttaaaatattacttaagagaatctcaagctgctaaggatctcctgtatcgaaggtctaggtcactagtggattatgaaaatgctaataaagcactggataaagcaagagcaaaaaataaagatgttctacaggccgaaacttcccaacaattatgttgtcagaaatttgaaaaaatatctgagtctgcaaaacaagaacttatagattttaagacaagaagagttgctgcattcagaaaaaatttagtggaactggcagagttagaactgaagcatgcaaagggtaatctacagttgctgcagaactgcctggcagtgttaaatggagacacataagccacactccgccttcctgttaaaaagggctgccttccttcaaattttatttttgttttcttaatgatgttaagcatttatgctcactggaaacaaacaaaaagcagctgaaaaagtgcatcaactcctctttttctgagaaacatggagcagcgcacgcccaggcgatgccagtctgtgtgccgtgatgccgcactgtgttccccatgacagtggtccatcatcgtgcactcgtcatactcagaagtccaaagttcattcttctttaaagtagcctctataactctgtttattttataaatagtattccttatggctgccactcttatttacctttaaataatttctgaaatttaaccttttcagaatgcattgttgaaacaagataaagattgccttttttgaattttttaaattttgtttttaaaagcatataccaccttagttcattcatgtatcctggtaaagcatcttaatcagacttatttttaattactgaatatttcttagacgttttgggacagattttatgtaatctttataagtatgatttctgaagaaaagcaaatgcattagtatgtttgccttaaacttgtagactaaaccaagtattgtaaaataaacagcgataacagtgatagtttttaactctatggtcattgtatcactctggaaaatgtggagtagctgtaataaatctactcctgtattatgctttacagtgcaggtcttagtttttcttttttctcatttcttttgaaatggcatctcgaacaaagtccaccaatccctttacaaaagaatgaactgctcctctgtgtgtacttcatagaaggtggaatcggacagaggcaggttagtgacagttattcctgaaatacaggagcagagtacagtctgttgtggtttcccggattccgcgcctagctcagccaattaagcatgagacataggccattgagccacttagtagttatgcgagtggatagattggtatgtagagggaaagaggtctgctgtaaagaacaacacttgtttgtctgtggggaaagaaaagcagaatacttgagatgaaagttggcatacaaataggatactatcgccagtagttatattacaaacattatcggcctttctagtgtgaatgaacattagacacattattgtcattcctagtttaaagttaaggttgcgtggttggatttttccactatctttttctaatttttctaccatttggagaccgtaggcatttgggcctgtcaccccttggatgggttcctagtttgtttacattttcctgaaccctcctgagcgcccgttcttggtctaatccccagtcgtgatgattccacacttcctcagccgcatgttgtcttgcctcattcatgagctggtcagcgtttcgtctctttaactgacatgttccccagtgctgtttgaactgttgagtttccgttgctggctgagtgcgttttgtccttcacgtaaccttcgctggtaaaaataagcccatgtgatgtccaccagtggatgaatgctggaccgagagccctagcttctggatccaggtctaggcccttcatctgctgctctgtggcccagggcaggtttgcttgacctctgcctcagttctcgactctaaaggacatactgacctacctcacaggggtgttgtgaggattaataaatgttggtactctgctttggaaatgtgaaaatgctgtgtaaatgttaagaaatactaagtatagggccagaagctatacagtgtttcacttaaccgtttgccattctgtatttaccaaggtggtcttttctggggaaggaagtagagtggaaggtgcatcccttggcccctggtttacattattagggtgcttattgtaggaatgcactctaaaaagtgggcgtagaatgaaagcagccgtccagtggtcctcccttttctgtagtttcacttttcttgcttcaagttacagcagtcacctgaaatctgaaaatactaaatgaaaaactccagaaaca

SEQ ID NO: 185040 - DNA, 559 bp, Homo sapiens
  Payload ID: 16432
  Gene Symbol: SNX6
  Gene Name: sorting nexin 6
  ENST ID: ENST00000557341
  CDS Start-End: 2-400
gatgcgcgcctgcgccggccctcgcctcggagcagccatgatggaaggcctggacgacggcccggacttcctctcagaagaggaccgcggacttaaagcaataaatgtagatcttcaaagtgatgctgctctgcaggtggacatttctgatgctcttagtgagcgggataaagtaaaattcactgttcacacaaagattccaccagcaccaccaagacctgattttgatgcttcaagggaaaaactacagaagcttggtgaaggagaagggtcaatgacgaaggaagaattcacaaagatgaaacaggaactggaagcgggttggataacagagaaccttgggtttattctactgctacctccatcctctgcatccttcttttttgtcttcactgaatgactaccctcacagagatcaaacttctcccatcattggtcctgctggtttgctgtgaatatttggcaatattcaagaagacagttgcgatgcatgaagtgttcctgtgtcgtgtggcagcacatcctattttgagaagagatttaaatttccatgtcttct

SEQ ID NO: 185041 - DNA, 851 bp, Homo sapiens
  Payload ID: 16432
  Gene Symbol: SNX6
  Gene Name: sorting nexin 6
  ENST ID: ENST00000556712
  CDS Start-End: 1-452
ctcgcctcggagcagccatgatggaaggcctggacgacggcccggacttcctctcagaagaggaccgcggacttaaagcaataaatgtagatcttcaaagtgatgctgctctgcaggtggacatttctgatgctcttagtgagcgggataaagtaaaattcactgttcacacaaagagttcattgccaaattttaaacaaaacgagttttcagttgttcggcaacatgaggaatttatctggcttcatgattcctttgttgaaaatgaagactatgcaggttatatcattccaccagcaccaccaagacctgattttgatgcttcaagggaaaaactacagaagcttggtgaaggagaagggtcaatgacgaaggaagaattcacaaagatgaaacaggaactggaagcagatcaaacttctcccatcattggtcctgctggtttgctgtgaatatttggcaatattcaagaagacagttgcgatgcatgaagtgttcctgtgtcgtgtggcagcacatcctattttgagaagagatttaaatttccatgtcttcttggaatataatcaagatttgagtgtgcgaggaaaaaataaaaaagagaaacttgaagacttctttaaaaacatggttaaatcagcagatggagtaatcgtttcaggagtaaaggatgtagatgatttctttgagcacgaacgaacatttcttttggagtatcataaccgagttaaggatgcatctgctaaatctgatagaatgacaagatcccacaaaagtgctgcagatgattacaatagaattggttcttcattatatgctttaggaactcaggattctacagatatatgcaa

SEQ ID NO: 185042 - DNA, 1215 bp, Homo sapiens
  Payload ID: 16432
  Gene Symbol: SNX6
  Gene Name: sorting nexin 6
  ENST ID: ENST00000555416
  CDS Start-End: 3-512
agatgcgcgcctgcgccggccctcgcctcggagcagccatgatggaaggcctggacgacggcccggacttcctctcagaagaggaccgcggacttaaagcaataaatgtagatcttcaaagtgatgctgctctgcaggtggacatttctgatgctcttagtgagcgggataaagtaaaattcactgttcacacaaagagttcattgccaaattttaaacaaaacgagttttcagttgttcggcaacatgaggaatttatctggcttcatgattcctttgttgaaaatgaagactatgcaggttatatcattccaccagcaccaccaagacctgattttgatgcttcaagggaaaaactacagaagcttggtgaaggagaagggtcaatgacgaaggaagaattcacaaagatgaaacaggaactggaagcgggttggataacagagaaccttgggtttattctactgctacctccatcctctgcatccttcttttttgtcttcactgaatgactaccctcacagagatcaaacttctcccatcattggtcctgctggtttgctgtgaatatttggcaatattcaagaagacagttgcgatgcatgaagtgttcctgtgtcgtgtggcagcacatcctattttgagaagagatttaaatttccatgtcttcttggaatataatcaagatttgagtgtgcgaggaaaaaataaaaaagagaaacttgaagacttctttaaaaacatggttaaatcagcagatggagtaatcgtttcaggagtaaaggatgtagatgatttctttgagcacgaacgaacatttcttttggagtatcataaccgagttaaggatgcatctgctaaatctgatagaatgacaagatcccacaaaagtgctgcagatgattacaatagaattggttcttcattatatgctttaggaactcaggattctacagatatatgcaagttttttctcaaagtttcagaactgttcgataaaacaagaaaaatagaagcacgagtgtctgctgatgaagacctcaaactttctgatcttttaaaatattacttaagagaatctcaagctgctaaggatctcctgtatcgaaggtctaggtcactagtggattatgaaaatgctaataaagcactggataaagcaagagcaaaaaataaagatgttctacaggccgaaacttcccaacaattatgttg

SEQ ID NO: 185043 - DNA, 1855 bp, Homo sapiens
  Payload ID: 16432
  Gene Symbol: SNX6
  Gene Name: sorting nexin 6
  ENST ID: ENST00000556162
  CDS Start-End: 7-105
agggagatgcgcgcctgcgccggccctcgcctcggagcagccatgatggcctggacgacggcccggacttcctctcagaagaggaccgcggacttaaagcaataaatgtagatcttcaaagtgatgctgctctgcaggtggacatttctgatgctcttagtgagcgggataaagtaaaattcactgttcacacaaagagttcattgccaaattttaaacaaaacgagttttcagttgttcggcaacatgaggaatttatctggcttcatgattcctttgttgaaaatgaagactatgcaggttatatcattccaccagcaccaccaagacctgattttgatgcttcaagggaaaaactacagaagcttggtgaaggagaagggtcaatgacgaaggaagaattcacaaagatgaaacaggaactggaagcgggttggataacagagaaccttgggtttattctactgctacctccatcctctgcatccttcttttttgtcttcactgaatgactaccctcacagagatcaaacttctcccatcattggtcctgctggtttgctgtgaatatttggcaatattcaagaagacagttgcgatgcatgaagtgttcctgtgtcgtgtggcagcacatcctattttgagaagagatttaaatttccatgtcttcttggaatataatcaagatttgagtgtgcgaggaaaaaataaaaaagagaaacttgaagacttctttaaaaacatggttaaatcagcagatggagtaatcgtttcaggagtaaaggatgtagatgatttctttgagcacgaacgaacatttcttttggagtatcataaccgagttaaggatgcatctgctaaatctgatagaatgacaagatcccacaaaagtgctgcagatgattacaatagaattggttcttcattatatgctttaggaactcaggattctacagatatatgcaagttttttctcaaagtttcagaactgttcgataaaacaagaaaaatagaagcacgagtgtctgctgatgaagacctcaaactttctgatcttttaaaatattacttaagagaatctcaagctgctaaggatctcctgtatcgaaggtctaggtcactagtggattatgaaaatgctaataaagcactggataaagcaagagcaaaaaataaagatgttctacaggccgaaacttcccaacaattatgttgtcagaaatttgaaaaaatatctgagtctgcaaaacaagaacttatagattttaagacaagaagagttgctgcattcagaaaaaatttagtggaactggcagagttagaactgaagcatgcaaagggtaatctacagttgctgcagaactgcctggcagtgttaaatggagacacataagccacactccgccttcctgttaaaaagggctgccttccttcaaattttatttttgttttcttaatgatgttaagcatttatgctcactggaaacaaacaaaaagcagctgaaaaagtgcatcaactcctctttttctgagaaacatggagcagcgcacgcccaggcgatgccagtctgtgtgccgtgatgccgcactgtgttccccatgacagtggtccatcatcgtgcactcgtcatactcagaagtccaaagttcattcttctttaaagtagcctctataactctgtttattttataaatagtattccttatggctgccactcttatttacctttaaataatttctgaaatttaaccttttcagaatgcattgttgaaacaagataaagattgccttttttgaattttttaaattttgtttttaaaagcatataccaccttagttcattcatgtatcctg

SEQ ID NO: 185044 - DNA, 467 bp, Homo sapiens
  Payload ID: 16432
  Gene Symbol: SNX6
  Gene Name: sorting nexin 6
  ENST ID: ENST00000555648
  CDS Start-End: 72-467
gggccttctggtggacctccactcccacgcggggcggggtgcaggtggcgaagtggaaatggaggcgggagatggaacgcccccaccctccctcgacactttggggccatgaaaacccattctcggaccttcccagcggcaccctcaattttcacccggtgtggacatctcgaacttgctcccgcccacccttctgtctctctcaaatagtacagcttaaagcaataaatgtagatcttcaaagtgatgctgctctgcaggtggacatttctgatgctcttagtgagcgggataaagtaaaattcactgttcacacaaagagttcattgccaaattttaaacaaaacgagttttcagttgttcggcaacatgaggaatttatctggcttcatgattcctttgttgaaaatgaagactatgcaggttatatcattccaccagcaccaccaagacctgattttgatgct

SEQ ID NO: 185045 - DNA, 725 bp, Homo sapiens
  Payload ID: 16432
  Gene Symbol: SNX6
  Gene Name: sorting nexin 6
  ENST ID: ENST00000557265
  CDS Start-End: 7-725
agggagatgcgcgcctgcgccggccctcgcctcggagcagccatgatggaaggcctggacgacggcccggacttcctctcagaagaggaccgcggacttaaagcaataaatgtagatcttcaaagtgatgctgctctgcaggtggacatttctgatgctcttagtgagcgggataaagtaaaattcactgttcacacaaagattccaccagcaccaccaagacctgattttgatgcttcaagggaaaaactacagaagcttggtgaaggagaagggtcaatgacgaaggaagaattcacaaagatgaaacaggaactggaagctgaatatttggcaatattcaagaagacagttgcgatgcatgaagtgttcctgtgtcgtgtggcagcacatcctattttgagaagagatttaaatttccatgtcttcttggaatataatcaagatttgagtgtgcgaggaaaaaataaaaaagagaaacttgaagacttctttaaaaacatggttaaatcagcagatggagtaatcgtttcaggagtaaaggatgtagatgatttctttgagcacgaacgaacatttcttttggagtatcataaccgagttaaggatgcatctgctaaatctgatagaatgacaagatcccacaaaagtgctgcagatgattacaatagaattggttcttcattatatgctttaggaactcaggattctacagatatatgcaa

SEQ ID NO: 185046 - DNA, 1734 bp, Homo sapiens
  Payload ID: 16433
  Gene Symbol: SNX7
  Gene Name: sorting nexin 7
  Uniprot ID: Q9UNH6
  ENST ID: ENST00000306121
  CDS Start-End: 10-1365
actctcgggatggagggcgagcgccgggcatcgcaggcgccctcctcgggcctcccggccgggggcgccaacggggagagcccggggggcggcgccccctttccgggcagcagtggctcttccgccctgctgcaggcggaggtgctggatctggacgaggacgaggacgacctggaggtgttcagcaaggatgcctcattgatggacatgaactccttcagccctatgatgccaacatcccctttatcaatgataaaccaaatcaagtttgaggatgaaccagatttaaaggatctcttcatcacagttgatgaacctgaaagtcatgttactacaatagaaactttcattacgtataggattattactaagacatctcgtggggaatttgactccagtgaatttgaagttaggagacgatatcaagatttcctttggttgaagggaaaactggaagaagcacaccccactctgattattccaccattgccagaaaagtttatagtaaaaggaatggtggaacgctttaacgatgacttcattgagacacgcaggaaggctttacataaatttttgaaccgaattgctgatcatccaactttaacatttaatgaagacttcaaaatttttctcactgcacaagcttgggaactctcttctcacaagaagcaaggtcctggcttgctaagcaggatggggcaaaccgtcagagctgttgcgtcctcaatgagaggagttaaaaaccgcccagaggagttcatggaaatgaataactttattgaactatttagccagaaaataaatttgatagataaaatatctcagagaatttataaggaagaaagggaatattttgatgaaatgaaagaatatggcccaattcatattctgtggtcagcgtcagaagaggatctggttgatactctaaaggatgttgccagctgcattgacagatgctgtaaggccactgaaaagcggatgtctggactctcagaggccctgcttcctgttgtacatgagtacgtgctttatagtgaaatgttaatgggtgttatgaaaagaagagaccaaatacaagcagaactggattccaaagttgaagttttgacctataaaaaggcagatactgatctgcttccagaggagattggaaaacttgaagataaagtggaatgtgctaataatgccctgaaagcagattgggagagatggaaacaaaatatgcaaaatgatatcaagttagcatttacagatatggctgaggagaatatccattattatgaacagtgccttgctacgtgggagtcattccttacatcacagaccaaccttcacttggaagaagcctctgaagataaaccttaatcccattgaggacttctgtttgatctttgggagacagcatttattaaccaaagttattctttctggatctgccgtgtccttataaagtggatgaaaaatgttttgtacccatctggaaaaccaacaacttgaaatctcaggtattccaggtcactgacatgaatttgaagatatatctatctgtatggatatatatctatatgtatatagatatataaatacagagagatatctggcttggttttaattatgttcttaaatttgtgtgccaataattgcatatagattttttttcttaaatatttgactgtggaacatgccattttaaatatgttgtaaggactgttttaataaaaagtttagtatgaa

SEQ ID NO: 185047 - DNA, 497 bp, Homo sapiens
  Payload ID: 16433
  Gene Symbol: SNX7
  Gene Name: sorting nexin 7
  ENST ID: ENST00000454199
  CDS Start-End: 173-497
atcttcctcgcggcagctcccgaacctgggaggctggtggctcaaaaccgctcccgccagctgcttttcgggcgaggccagccctgaactctgggagagcagccaagtttagagaaattattcttaatttagtgttgttgcttgtggatttgagacttgggatgcctcattgatggacatgaactccttcagccctatgatgccaacatcccctttatcaatgataaaccaaatcaagtttgaggatgaaccagatttaaaggatctcttcatcacagttgatgaacctgaaagtcatgttactacaatagaaactttcattacgtataggattattactaagacatctcgtggggaatttgactccagtgaatttgaagttaggagacgatatcaagatttcctttggttgaagggaaaactggaagaagcacaccccactctgattattccaccattgccagaaaagtttatagtaaaaggaatggtggaacgct

SEQ ID NO: 185048 - DNA, 1589 bp, Homo sapiens
  Payload ID: 16433
  Gene Symbol: SNX7
  Gene Name: sorting nexin 7
  ENST ID: ENST00000529992
  CDS Start-End: 32-1222
ggtggcggccggctgggcgcgcactctcgggatggagggcgagcgccgggcatcgcaggcgccctcctcgggcctcccggccgggggcgccaacggggagagcccggggggcggcgccccctttccgggcagcagtggctcttccgccctgctgcaggcggaggtgctggatctggacgaggacgaggacgacctggaggtgttcagcaaggatgcctcattgatggacatgaactccttcagccctatgatgccaacatcccctttatcaatgataaaccaaatcaagtttgaggatgaaccagatttaaaggatctcttcatcacagttgatgaacctgaaagtcatgttactacaatagaaactttcattacgtataggattattactaagacatctcgtggggaatttgactccagtgaatttgaagttaggagacgatatcaagatttcctttggttgaagggaaaactggaagaagcacaccccactctgattattccagaactctcttctcacaagaagcaaggtcctggcttgctaagcaggatggggcaaaccgtcagagctgttgcgtcctcaatgagaggagttaaaaaccgcccagaggagttcatggaaatgaataactttattgaactatttagccagaaaataaatttgatagataaaatatctcagagaatttataaggaagaaagggaatattttgatgaaatgaaagaatatggcccaattcatattctgtggtcagcgtcagaagaggatctggttgatactctaaaggatgttgccagctgcattgacagatgctgtaaggccactgaaaagcggatgtctggactctcagaggccctgcttcctgttgtacatgagtacgtgctttatagtgaaatgttaatgggtgttatgaaaagaagagaccaaatacaagcagaactggattccaaagttgaagttttgacctataaaaaggcagatactgatctgcttccagaggagattggaaaacttgaagataaagtggaatgtgctaataatgccctgaaagcagattgggagagatggaaacaaaatatgcaaaatgatatcaagttagcatttacagatatggctgaggagaatatccattattatgaacagtgccttgctacgtgggagtcattccttacatcacagaccaaccttcacttggaagaagcctctgaagataaaccttaatcccattgaggacttctgtttgatctttgggagacagcatttattaaccaaagttattctttctggatctgccgtgtccttataaagtggatgaaaaatgttttgtacccatctggaaaaccaacaacttgaaatctcaggtattccaggtcactgacatgaatttgaagatatatctatctgtatggatatatatctatatgtatatagatatataaatacagagagatatctggcttggttttaattatgttcttaaatttgtgtgccaataattgcatatagattttttttcttaaatatttgactgtggaacatgccattttaaatatgttgtaaggactgttttaataaaaagtttagtatg

SEQ ID NO: 185049 - DNA, 1562 bp, Homo sapiens
  Payload ID: 16433
  Gene Symbol: SNX7
  Gene Name: sorting nexin 7
  ENST ID: ENST00000528824
  CDS Start-End: 60-170
aggtgctggatctggacgaggacgaggacgacctggaggtgttcagcaagggaggttgaatgtcactccagtttctcaagttgctgctgagagaagacctgagttcagatcacaacgctgtattcattactaagaagcctgttcattttaacgttacctggagatattaggatgcctcattgatggacatgaactccttcagccctatgatgccaacatcccctttatcaatgataaaccaaatcaagtttgaggatgaaccagatttaaaggatctcttcatcacagttgatgaacctgaaagtcatgttactacaatagaaactttcattacgtataggattattactaagacatctcgtggggaatttgactccagtgaatttgaagttaggagacgatatcaagatttcctttggttgaagggaaaactggaagaagcacaccccactctgattattccaccattgccagaaaagtttatagtaaaaggaatggtggaacgctttaacgatgacttcattgagacacgcaggaaggctttacataaatttttgaaccgaattgctgatcatccaactttaacatttaatgaagacttcaaaatttttctcactgcacaagcttgggaactctcttctcacaagaagcaaggtcctggcttgctaagcaggatggggcaaaccgtcagagctgttgcgtcctcaatgagaggagttaaaaaccgcccagaggagttcatggaaatgaataactttattgaactatttagccagaaaataaatttgatagataaaatatctcagagaatttataaggaagaaagggaatattttgatgaaatgaaagaatatggcccaattcatattctgtggtcagcgtcagaagaggatctggttgatactctaaaggatgttgccagctgcattgacagatgctgtaaggccactgaaaagcggatgtctggactctcagaggccctgcttcctgttgtacatgagtacgtgctttatagtgaaatgttaatgggtgttatgaaaagaagagaccaaatacaagcagaactggattccaaagttgaagttttgacctataaaaaggcagatactgatctgtgccttgctacgtgggagtcattccttacatcacagaccaaccttcacttggaagaagcctctgaagataaaccttaatcccattgaggacttctgtttgatctttgggagacagcatttattaaccaaagttattctttctggatctgccgtgtccttataaagtggatgaaaaatgttttgtacccatctggaaaaccaacaacttgaaatctcaggtattccaggtcactgacatgaatttgaagatatatctatctgtatggatatatatctatatgtatatagatatataaatacagagagatatctggcttggttttaattatgttcttaaatttgtgtgccaataattgcatatagattttttttcttaaatatttgactgtggaacatgccattttaaatatgttgtaaggactgttttaataaaaagtttagtatgaa

SEQ ID NO: 185050 - DNA, 4727 bp, Homo sapiens
  Payload ID: 16434
  Gene Symbol: SNX8
  Gene Name: sorting nexin 8
  Uniprot ID: Q9Y5X2
  ENST ID: ENST00000222990
  CDS Start-End: 44-1441
gccgggtggcgcgggaggaagtcacgtgggagcgcgggctcacatgactggccgcgcgatggacccgctgcccgcggctgcagtcggggcggcagctgaggcggaggctgacgaggaggcggatcccccggcgtcagatctgccgacaccccaggccatcgagccccaggccatcgtgcagcaggtcccagcccccagtcgaatgcagatgccgcaggggaacccgctgctgctgtcccacaccctgcaggagctgctggccagggacaccgtgcaggtggagctcattccggagaagaagggcctcttcctgaagcatgtggagtatgaggtttccagccagcgcttcaagtcctcggtatacagacggtacaatgacttcgtggtcttccaggagatgctcctgcacaagttcccctaccgtatggtgcctgccctgccacccaagagaatgctgggagctgacagggagttcatcgaggccaggaggagagccctgaagcgcttcgtcaacctggtggcgcgacaccccctgttctccgaggatgtggtcctcaagctcttcctgtccttcagcggctcggatgtgcagaacaagttaaaggagtcagcacagtgcgtcggggacgaattcctgaactgtaagctggctaccagggccaaggacttcctcccagctgacatccaggctcagtttgccatcagccgggagctgatccggaacatctacaatagctttcacaagcttcgcgacagggccgagcggatcgcatcgcgggccatcgacaatgcggcagatcttctcatattcgggaaggagctaagtgcaatagggtctgacacgaccccgctgccctcctgggccgctctgaatagcagcacgtgggggtccctgaagcaggctctgaaaggcctgtctgtggaattcgcgctgctcgccgacaaggctgcacaacagggtaagcaggaagagaacgacgtggtggagaagctgaacctcttcttggatctgctgcagtcctataaggacctgtgcgagcggcatgagaagggcgtgttgcacaagcaccagcgggccctgcacaagtacagcctgatgaagaggcagatgatgagcgccaccgcgcagaaccgcgagccggagtccgtggagcagctggagtcccgcattgtggagcaggagaacgcgattcagacgatggagctgcggaactacttctccctgtactgcctgcaccaggagacgcagctcatccacgtctacctgcccctcacctcccacatcctccgcgccttcgtcaactctcagatccaagggcacaaggagatgagcaaggtgtggaacgacctgaggcccaagctcagctgcctctttgcgggaccacacagcaccctgaccccaccgtgctccccgccggaggacggcctgtgtcctcactagcgcctgaggctgaggtggtgctccctgcggccgcactaaaacctctttccaaacggtgtgtcccggtgtaattccctttggacggcagctcccctccccgccacgccccgtgctgcagctggagcagaggagctcacgcctgcgggtcgggaggcgcatccgtggaccatgggggcagctgggccacactgtccttcgccctgtggcctgctagcctggtcgagagaggtggtggggttctctggaatggtttcctcctgacacccagagctgtgcggggaggcagggatctctcatctcacagagattgtgcctgggggagcgtggaggcagggcctccaggtgctggaacagtcgggaggggcagcatcatggtgctcggtcagccgaggagagagggcagggctgccctgcagcccaggcatgggactgaccacggacagcgaggggacagccagtggtgctgaggctgggagggagggccattgggcgtggggcacgcacggtgaattttctagggaaattgctgcagtcaacacctggagccctggtctgggagtggcctgtggggtccagtggcctcatgccctgtgcccatatgatgaccccatgtgtgcctgtgtccacaccatgaccctgtgtgtgcccaggcctggaagacaaaggcgtgacggagagctggggctctgagagtgggcgctacagcagctgtgttctcgtcccctggactcccttgatttctggtggccagtgttggggtctgcaccgtgtggcactgaggctggatgggctggcagaggacaggtgggggcgtgggggggcgtgttccattccagctgaggctttagaggagggacagcccccttttaagtggatttccttctctgaggcacctagagccctcctcccagcctcccgtcacgcacttgccggcccagccacctgctcacagagggaaccagtggtctttcaggccccttccctgctctggatgaagaaggccattctcctgagctctgtggggctggactgtccgcctcaggcctgggtctgcttctgcccgaaccccttttgtggaaggtacatgggagcccagtggacccctgcacttctccggagcctgacgcccctccctggccggggaggggtgctggaagaggcccgccgggctccagggtttccgaggtccctccgctccgcagatgctcactggcctctggggcgttcactcctctcacggagggtgcttcccttccgcctgtacctacgggcagctcacggccgtgggatggagaggggactcctgtgtgtgccccgcaggcaggtgatccatcgtccactgcgagccggccagagggaacggccgtgccttctggccccgtgggctgtgctgactcggtggctgtggggctcgggcccagcctgccctgccctgtgggttctgctgctgccttcctgctgtgaggtgggctgcttccttctggccagatgagcagagggcagcgttccctttggagcccgatgggtgggctgtcccgtgagtccctagtccacccgagtcttgggctgcgctgccttctgacgcccctctgcagagacaggttctcagttgccatgaatggcaccatgacacccgagccatgaagcgtgaccccgtgtgggcagaaggctgcaaggcctctccgtccaccccgcaccttcctggggcctgtccagctgcaggaccatagaggctgtggggagtcgtggagggcatcaggtgctggggcctctgtgtctccagagtaggcaaggcacgcgctcctgacagcccccaaggattgagcaagacttcagaatgagcttttctgaaggagctttcctggcagggactccggggtcagtgagtgtatgagaggccacatacctggcggcatctccctgtgttggaaacttcaagagcagggtctcagggtcctcatgtccagaggctgaggatggaggtggaaggctggagggcaggggtgaggagggagcaggagggcaggagttgggggagcaggagggcaggggtcaggagaacaggagaacaggggtaagggagggcaggggtgagggggagcagaagagggatgagggggagcaggagggcaggcgttgggacaggagggcaggggtgagagagcaagggggcaggggtgagagagcaggagagcaggggtgaggagagcaggagagtaggggtgatggggaataggagggcaggggtgaggagggagcaggagaacgggtaagggagggcaggggtgagggggagcaggagggcaggggtgaggagagagcaagagggcaggggtgaggagagcaagagggcaggggtgggaaggcaggagggaggtgggggggcaggaaggcaggggtgggagggtcaggagggcagggtgaagggggggctggagggcagcggtgacgagggcagcctgtctcccacgtgtggtggctgcttcctgtgtgccctggggttggctctgtggaggggtgggcactggctttggaacacctccctccccttcctcctctgccacccagtgccttctaaagggcagcagaaagaggcctgctaggcaggggtggcggaggccaccttccttctcacaaatacttcttggccctggccctgtgctgcccgggcaggtccccaggctcaggggctgagaggctgcttactgctgcaggtggaggccccatgccggagggagagcggggttccccccatgcctctccagccctcctgctgcccacggcccaagcccaagcttgtgccggtcattacggccttgcctagctggcagggacagctgcgtgtgatgctggtggagatgccagatgccgcctgccctgtgaggacggctggcggggccgtgggaggggggttgtgggctggcggggctgtgggaagggggctgccgatcatggtgaaaggggacattttcattgggtcctcgtggtccgtgtcctgggtactcggggtcaccgtgcagacagctgccctttgtctgccggacacagtgcaggcaggggagacaggtttagggctctgacatggggcacagggactccgagccaagggatgtcagggcagctctgtgcatctgaggcctttgcccttgctttgcgggtcagttcatgtccaaagcactttaggaggctgcagggatcaatacccaatatacccaacaactggaattgtttacacatgacctacattttggacggtttatcaataaacatgtgtgaacaactgtta

SEQ ID NO: 185051 - DNA, 762 bp, Homo sapiens
  Payload ID: 16434
  Gene Symbol: SNX8
  Gene Name: sorting nexin 8
  ENST ID: ENST00000435060
  CDS Start-End: 91-762
gtgtcattgaggcaggtccagggcctttgctgaccctcggggctccttcacccctgccccgagccttcccctcttgcctgggcgacttccatgcaccctgggctcccatcaacccttacctgcagctgctcgctcatgtcagatctgccgacaccccaggccatcgagccccaggccatcgtgcagcaggtcccagcccccagtcgaatgcagatgccgcaggggaacccgctgctgctgtcccacaccctgcaggagctgctggccagggacaccgtgcaggtggagctcattccggagaagaagggcctcttcctgaagcatgtggagtatgaggtttccagccagcgcttcaagtcctcggtatacagacggtacaatgacttcgtggtcttccaggagatgctcctgcacaagttcccctaccgtatggtgcctgccctgccacccaagagaatgctgggagctgacagggagttcatcgaggccaggaggagagccctgaagcgcttcgtcaacctggtggcgcgacaccccctgttctccgaggatgtggtcctcaagctcttcctgtccttcagcggctcggatgtgcagaacaagttaaaggagtcagcacagtgcgtcggggacgaattcctgaactgtaagctggctaccagggccaaggacttcctcccagctgacatccaggctcagtttgccatcagccgggagctgatccggaacatctacaatagctttcacaagcttcgcgacagg

SEQ ID NO: 185052 - DNA, 415 bp, Homo sapiens
  Payload ID: 16434
  Gene Symbol: SNX8
  Gene Name: sorting nexin 8
  ENST ID: ENST00000419693
  CDS Start-End: 289-415
gttagcaagaaagtgatgtgttccgggtaggggaattctgttttggtattattttgtctttcctgagaaaagcatcacaaaaagagatgtttgcccatcctgtttgctggggtagtgggaagagaccgggggtgatggtggtgctggctggacgtgggtggtttcacaggacctgctgtgtctgagaggagccatgcggtgattagaagcttggaggctgcagatctgccgacaccccaggccatcgagccccaggccatcgtgcagcaggtcccagcccccagtcgaatgcagatgccgcaggggaacccgctgctgctgtcccacaccctgcaggagctgctggccagggacaccgtgcaggtggagctcattccggagaagaagggcctcttcctgaagcatgtggagtatg

SEQ ID NO: 185053 - DNA, 583 bp, Homo sapiens
  Payload ID: 16434
  Gene Symbol: SNX8
  Gene Name: sorting nexin 8
  ENST ID: ENST00000447136
  CDS Start-End: 329-583
aaaaggacagactacttcaaaatagaaaaggaattcggggcgagccagagagggcccacacgactagaaggacgactgcctggcgcgatacaaaaatggtctccttgtgttgcccgggctggtctcgaactcctgacctcaagtgatctgcctgcctcggcctctgaaagtgtggggattacaggcatgacccgtcacaccgggctggaatgcacggatcttatatgctacaaattaaagaatcttcacagctacgcacagtgatctgccgacaccccaggccatcgagccccaggccatcgtgcagcaggtcccagcccccagtcgaatgcagatgccgcaggggaacccgctgctgctgtcccacaccctgcaggagctgctggccagggacaccgtgcaggtggagctcattccggagaagaagggcctcttcctgaagcatgtggagtatgaggtttccagccagcgcttcaagtcctcggtatacagacggtacaatgacttcgtggtcttccaggagatgctcctgcacaagttcccctaccgtatggtgcctgccctgccacccaagagaatgctg

SEQ ID NO: 185054 - DNA, 634 bp, Homo sapiens
  Payload ID: 16434
  Gene Symbol: SNX8
  Gene Name: sorting nexin 8
  ENST ID: ENST00000435336
  CDS Start-End: 154-634
gactacttcaaaatagaaaaggaattcggggcgagccagagagggcccacacgactagaaggacgactgcctggcgcgatacaaaaatatctgccgacaccccaggccatcgagccccaggccatcgtgcagcaggtcccagcccccagtcgaatgcagatgccgcaggggaacccgctgctgctgtcccacaccctgcaggagctgctggccagggacaccgtgcaggtggagctcattccggagaagaagggcctcttcctgaagcatgtggagtatgaggtttccagccagcgcttcaagtcctcggtatacagacggtacaatgacttcgtggtcttccaggagatgctcctgcacaagttcccctaccgtatggtgcctgccctgccacccaagagaatgctgggagctgacagggagttcatcgaggccaggaggagagccctgaagcgcttcgtcaacctggtggcgcgacaccccctgttctccgaggatgtggtcctcaagctcttcctgtccttcagcggctcggatgtgcagaacaagttaaaggagtcagcacagtgcgtcggggacgaattcctgaactgtaagctggctaccagggccaaggacttcctcccagctgaca

SEQ ID NO: 185055 - DNA, 686 bp, Homo sapiens
  Payload ID: 16434
  Gene Symbol: SNX8
  Gene Name: sorting nexin 8
  ENST ID: ENST00000457286
  CDS Start-End: 159-686
ccgggggattggtgggacggatggctctgatgtccttggctggctccgcttgtcccttgactctgatttgagtcagaggaaatcatctgagcgatctgccgacaccccaggccatcgagccccaggccatcgtgcagcaggtcccagcccccagtcgaatgcagatgccgcaggggaacccgctgctgctgtcccacaccctgcaggagctgctggccagggacaccgtgcaggtggagctcattccggagaagaagggcctcttcctgaagcatgtggagtatgaggtttccagccagcgcttcaagtcctcggtatacagacggtacaatgacttcgtggtcttccaggagatgctcctgcacaagttcccctaccgtatggtgcctgccctgccacccaagagaatgctgggagctgacagggagttcatcgaggccaggaggagagccctgaagcgcttcgtcaacctggtggcgcgacaccccctgttctccgaggatgtggtcctcaagctcttcctgtccttcagcggctcggatgtgcagaacaagttaaaggagtcagcacagtgcgtcggggacgaattcctgaactgtaagctggctaccagggccaaggacttcctcccagctgacatccaggctcagtttgccatcagccgggagctgatccggaacatctac

SEQ ID NO: 185056 - DNA, 4198 bp, Homo sapiens
  Payload ID: 16435
  Gene Symbol: SNX9
  Gene Name: sorting nexin 9
  Uniprot ID: Q9Y5X1
  ENST ID: ENST00000392185
  CDS Start-End: 172-1959
agcggctgggcctgagcgtcgagactcggggccgaggcggaggagcggccgccgcgccggggcccagccggagccgccgccctcgcccttgcctttgcctgcgcggctcagaatcaccatccgcggcgcgggagacgagccggccgtcccgggccgggggacccgcccgccatggccaccaaggctcgggttatgtatgattttgctgctgaacctggaaataatgaactgacggttaatgaaggagaaatcatcacaatcacaaatccggatgtaggtggaggatggctggaaggaagaaacatcaaaggagaacgagggctggttcccacagactacgttgaaattttacccagtgatggaaaagatcaattttcttgtggaaattcagtggctgaccaagccttccttgattctctctcagccagcacagctcaggccagttcgtcggctgccagcaacaatcaccaggttggcagtggcaatgacccctggtcagcctggagtgcctccaaatctgggaactgggaaagctcagaaggctggggggcccagccagagggggctggagcccaaagaaacacaaacactcccaacaactgggacactgccttcggccacccccaggcctaccaaggaccagcaactggtgatgatgatgactgggatgaagactgggatgggcccaaatcctcttcctactttaaggattcagagtcagctgatgcaggcggcgctcagcgaggaaacagtcgtgctagttcctcatccatgaaaattccccttaacaaatttcctggatttgcgaaacctggcacggaacagtatttgttggccaaacaactagcaaaacccaaagagaaaattcccatcattgttggagattatggcccaatgtgggtttatcctacctctacttttgactgtgtggtagcagatcccaggaaaggctccaaaatgtatggtctaaagagctacatcgaatatcagctaacacctactaacactaatcgatctgtaaaccacaggtataagcactttgactggttatatgagcgtctcctggttaagtttgggtcagccattccaatcccttctcttccagacaaacaagtcacaggccgctttgaagaggaatttatcaaaatgcgcatggagagacttcaggcctggatgaccaggatgtgtcgccatccagtaatctcagaaagtgaagttttccagcagttcctaaatttccgagatgagaaggaatggaaaactggaaagaggaaggccgagagagatgagctggcgggagtcatgatattttccaccatggaaccagaggcacctgacttggacttagtagaaatagagcagaagtgcgaggctgtggggaagttcaccaaggccatggatgacggcgtgaaggagctgctgacggtggggcaggagcactggaagcgctgcacgggcccattacccaaggaatatcagaagataggaaaggccttgcagagtttggccacagtgttcagttccagtggctatcaaggtgaaacagatctcaatgatgcaataacagaagcaggaaagacttatgaagaaattgccagtctcgtggcagaacagccaaagaaagatctccatttcctgatggaatgtaatcacgagtataaaggttttcttggctgcttccctgacatcattggcactcacaagggagcaatagaaaaagtgaaagaaagtgacaaactagttgcaacaagtaaaatcaccctacaagacaaacagaacatggtgaagagagtcagcatcatgtcttacgcgttgcaagctgagatgaatcactttcacagtaaccggatctatgattacaacagtgtcatccgcctgtacctggagcagcaagtgcaattttacgaaacgattgcagaaaagctgaggcaggccctcagccgctttccagtgatgtaggacagaacgggccttgaagagaatgccgcgtgctttctcctgacttggggcaatgcaattcaaaactttttttcccctattattcagaaaaaaaaggaaacaaaaccaaaaagaaagagttgcaaaaaactgcatttattttattagccaccctaaatgcgtcagttatttagggatggtcttttgttcatttccgcatccattatttaaaccagtggaaattgtctctatttttggaaagtacttaaaagttaccagaattttcaatggaaaatgaggggtttctccccactgatattttacatagagtcataatttatatgtcttataaattataagtcttatataatttataagtctcccacaatcttccagttcttacccagtgtcagataattaattactaattactttcttaaaaacatgaactatgccagaataaaaaatatctatgtttgtatatttttataactcctttcagtcctctggggctcctgtcattgagggaagtcgttacgcctttcactgccacagttacagctcaagtgcttacacttcaagagggaggacgctgggggcccctggggctgctagtgccatcgtggtgtgtggcaggtgggccatcccatgtccctccagggggaccccacagcctggcagatgagcagatacccctggccacccatgtcctcagcgacatttctgatgtgctgctcttatgtgaggaccagtgctttctctctttgcacttccttcctaatcttggttaaggcatgttttatgccatgaagaatacattagaagaattgagggactttgtagagaattttgtggctttggtccaacgggtgagtggctgtgcggaggcctgtgttcgggagggcctgggagaaggagggcacccagcaccccggcgtctctggccctttcttattctttggctcctcatccaccgtgatgagaagcgctgctgtggccacggcacactgcttggcttgggtggcgggttcatggccagttggtgtcatcagcaaagagaaaaagcacaggttagctccccattagatggaaaagtgtagggactgagaagggctgcagcctcagcagtgtacagagtccccggcgctctgaggttggagagaaagaacagaccagcgcccttcccgactacatccgaaacttcacacagggtgtttctgagcaccagcacttccagcgcttcacttaacggcataaagcaaaacaggaccttggcacaccgtcagctcgaactcaacactggcagccaccgtctcacccctgcggaggagcgctcccgtctcccacaggtgccttaccgcgttccctcccgctgctttcatttttctgacctaataattacgggaaatggaaagtctgggccagcatcaataaaatgacaccaaaaataagtagatgaaatcaaatgaatatgagaacatcttgttcttcaatatcacgggtttttgttaatgtttcataagtaattctccccacttgatttttcttctataaaatcccatagaacaatgtttatgctatagccatttaatatatgtacaaattgtaaagaatatgtataaatgttttacacgaatgtaagagcatgtagaagccaacatataaataaattgtttaaaaaaactgtacagtaaattctcaaagcactttttcaaaacactttttggactttgtgtgtgatttttgttgttgttgttaagtactttttattccagctgctgaaaatggtccaggtaatgaattcttccccaaatcctatttcttctgacatgaattcatcatttcagttccgtaggtcagtgttgcggtccgggaagcgtatcataaccacctgggagttgccaagaagcagacagtctcccagtgtctgactctcggatatttggatttgactggtgtgaggcaaagtgaaaaagggatgggggaaatggagatggcacgggctcctcagagcgtggtagccgactgtgaggaaaagcagagggaatgtgaaagaaaataagagaatccacgggatttgatgcctggaagattctccttcaagtggcaacatggcatatatatccttctccggggagtcacatgcaccatttggttcttagatacgttgatgttttgatttttaatgatttgtatcaacctgtaggtaccacagaagagctgtagtcatacaatcacataacttttacaaatatagtgg

SEQ ID NO: 185057 - DNA, 553 bp, Homo sapiens
  Payload ID: 16435
  Gene Symbol: SNX9
  Gene Name: sorting nexin 9
  ENST ID: ENST00000614800
  CDS Start-End: 364-553
aaaggatcccaggctctccccagtcagaagcttaactgaagccagagctgggtggaccctcgcccaccaggaatagcggctataatgacaagggtcattgtgtgttttgctgcttaatgaagcagagacattcctcaggcattttgtcctggacacagaccatgttccgtgctccccaccttgcactgaggtgcgtggaagttggcctacagcaacgagagacagagccctgaaagcttctcagacttcagtcctgcccttccacaagctctgcggaggcccagtcctgcttctactggacacttctcaggcactgacaagaaaagtctccattgctcgggggagaaacaaagggctcgggttatgtatgattttgctgctgaacctggaaataatgaactgacggttaatgaaggagaaatcatcacaatcacaaatccggatgtaggtggaggatggctggaaggaagaaacatcaaaggagaacgagggctggttcccacagactacgttgaaattttacccagtgatggaaaagatcaattttcttgtg

SEQ ID NO: 185058 - DNA, 4024 bp, Homo sapiens
  Payload ID: 16435
  Gene Symbol: SNX9
  Gene Name: sorting nexin 9
  ENST ID: ENST00000611124
  CDS Start-End: 1-1785
tcaaccaaagctcgggttatgtatgattttgctgctgaacctggaaataatgaactgacggttaatgaaggagaaatcatcacaatcacaaatccggatgtaggtggaggatggctggaaggaagaaacatcaaaggagaacgagggctggttcccacagactacgttgaaattttacccagtgatggaaaagatcaattttcttgtggaaattcagtggctgaccaagccttccttgattctctctcagccagcacagctcaggccagttcgtcggctgccagcaacaatcaccaggttggcagtggcaatgacccctggtcagcctggagtgcctccaaatctgggaactgggaaagctcagaaggctggggggcccagccagagggggctggagcccaaagaaacacaaacactcccaacaactgggacactgccttcggccacccccaggcctaccaaggaccagcaactggtgatgatgatgactgggatgaagactgggatgggcccaaatcctcttcctactttaaggattcagagtcagctgatgcaggcggcgctcagcgaggaaacagtcgtgctagttcctcatccatgaaaattccccttaacaaatttcctggatttgcgaaacctggcacggaacagtatttgttggccaaacaactagcaaaacccaaagagaaaattcccatcattgttggagattatggcccaatgtgggtttatcctacctctacttttgactgtgtggtagcagatcccaggaaaggctccaaaatgtatggtctaaagagctacatcgaatatcagctaacacctactaacactaatcgatctgtaaaccacaggtataagcactttgactggttatatgagcgtctcctggttaagtttgggtcagccattccaatcccttctcttccagacaaacaagtcacaggccgctttgaagaggaatttatcaaaatgcgcatggagagacttcaggcctggatgaccaggatgtgtcgccatccagtaatctcagaaagtgaagttttccagcagttcctaaatttccgagatgagaaggaatggaaaactggaaagaggaaggccgagagagatgagctggcgggagtcatgatattttccaccatggaaccagaggcacctgacttggacttagtagaaatagagcagaagtgcgaggctgtggggaagttcaccaaggccatggatgacggcgtgaaggagctgctgacggtggggcaggagcactggaagcgctgcacgggcccattacccaaggaatatcagaagataggaaaggccttgcagagtttggccacagtgttcagttccagtggctatcaaggtgaaacagatctcaatgatgcaataacagaagcaggaaagacttatgaagaaattgccagtctcgtggcagaacagccaaagaaagatctccatttcctgatggaatgtaatcacgagtataaaggttttcttggctgcttccctgacatcattggcactcacaagggagcaatagaaaaagtgaaagaaagtgacaaactagttgcaacaagtaaaatcaccctacaagacaaacagaacatggtgaagagagtcagcatcatgtcttacgcgttgcaagctgagatgaatcactttcacagtaaccggatctatgattacaacagtgtcatccgcctgtacctggagcagcaagtgcaattttacgaaacgattgcagaaaagctgaggcaggccctcagccgctttccagtgatgtaggacagaacgggccttgaagagaatgccgcgtgctttctcctgacttggggcaatgcaattcaaaactttttttcccctattattcagaaaaaaaaggaaacaaaaccaaaaagaaagagttgcaaaaaactgcatttattttattagccaccctaaatgcgtcagttatttagggatggtcttttgttcatttccgcatccattatttaaaccagtggaaattgtctctatttttggaaagtacttaaaagttaccagaattttcaatggaaaatgaggggtttctccccactgatattttacatagagtcataatttatatgtcttataaattataagtcttatataatttataagtctcccacaatcttccagttcttacccagtgtcagataattaattactaattactttcttaaaaacatgaactatgccagaataaaaaatatctatgtttgtatatttttataactcctttcagtcctctggggctcctgtcattgagggaagtcgttacgcctttcactgccacagttacagctcaagtgcttacacttcaagagggaggacgctgggggcccctggggctgctagtgccatcgtggtgtgtggcaggtgggccatcccatgtccctccagggggaccccacagcctggcagatgagcagatacccctggccacccatgtcctcagcgacatttctgatgtgctgctcttatgtgaggaccagtgctttctctctttgcacttccttcctaatcttggttaaggcatgttttatgccatgaagaatacattagaagaattgagggactttgtagagaattttgtggctttggtccaacgggtgagtggctgtgcggaggcctgtgttcgggagggcctgggagaaggagggcacccagcaccccggcgtctctggccctttcttattctttggctcctcatccaccgtgatgagaagcgctgctgtggccacggcacactgcttggcttgggtggcgggttcatggccagttggtgtcatcagcaaagagaaaaagcacaggttagctccccattagatggaaaagtgtagggactgagaagggctgcagcctcagcagtgtacagagtccccggcgctctgaggttggagagaaagaacagaccagcgcccttcccgactacatccgaaacttcacacagggtgtttctgagcaccagcacttccagcgcttcacttaacggcataaagcaaaacaggaccttggcacaccgtcagctcgaactcaacactggcagccaccgtctcacccctgcggaggagcgctcccgtctcccacaggtgccttaccgcgttccctcccgctgctttcatttttctgacctaataattacgggaaatggaaagtctgggccagcatcaataaaatgacaccaaaaataagtagatgaaatcaaatgaatatgagaacatcttgttcttcaatatcacgggtttttgttaatgtttcataagtaattctccccacttgatttttcttctataaaatcccatagaacaatgtttatgctatagccatttaatatatgtacaaattgtaaagaatatgtataaatgttttacacgaatgtaagagcatgtagaagccaacatataaataaattgtttaaaaaaactgtacagtaaattctcaaagcactttttcaaaacactttttggactttgtgtgtgatttttgttgttgttgttaagtactttttattccagctgctgaaaatggtccaggtaatgaattcttccccaaatcctatttcttctgacatgaattcatcatttcagttccgtaggtcagtgttgcggtccgggaagcgtatcataaccacctgggagttgccaagaagcagacagtctcccagtgtctgactctcggatatttggatttgactggtgtgaggcaaagtgaaaaagggatgggggaaatggagatggcacgggctcctcagagcgtggtagccgactgtgaggaaaagcagagggaatgtgaaagaaaataagagaatccacgggatttgatgcctggaagattctccttcaagtggcaacatggcatatatatccttctccggggagtcacatgcaccatttggttcttagatacgttgatgttttgatttttaatgatttgtatcaacctgtaggtaccacagaagagctgtagtcatacaatcacataacttttacaaatatagtgg

SEQ ID NO: 185059 - DNA, 542 bp, Homo sapiens
  Payload ID: 16435
  Gene Symbol: SNX9
  Gene Name: sorting nexin 9
  ENST ID: ENST00000614703
  CDS Start-End: 291-542
acctctgactctgcgctgccacccggcagtgcgaggaccacatactgaccaggtgtggagccgatgcccagacccgtgatggcagaccatgttccgtgctccccaccttgcactgaggtgcgtggaagttggcctacagcaacgagagacagagccctgaaagcttctcagacttcagtcctgcccttccacaagctctgcggaggcccagtcctgcttctactggacacttctcaggcactgacaagaaaagtctccattgctcgggggagaaacaaagggctcgggttatgtatgattttgctgctgaacctggaaataatgaactgacggttaatgaaggagaaatcatcacaatcacaaatccggatgtaggtggaggatggctggaaggaagaaacatcaaaggagaacgagggctggttcccacagactacgttgaaattttacccagtgatggaaaagatcaattttcttgtggaaattcagtggctgaccaagccttccttgattctctctcagccagcacagctcaggccagt

SEQ ID NO: 185060 - DNA, 1506 bp, Homo sapiens
  Payload ID: 16436
  Gene Symbol: SNX21
  Gene Name: sorting nexin family member 21
  Uniprot ID: Q969T3
  ENST ID: ENST00000342644
  CDS Start-End: 69-668
gaacccggccgacctccatgggctgcggggggctgcacccggacccctggggcgcggcgcgcccctgaatgcaccgtgggacgcaggagggtgccatggcctcccggctcctgcaccggctgcggcacgccttggccggcgacggccccggggaggcggcggccagtccagaggccgagcagtttccggagagctcagagctggaggacgacgacgccgagggcctgtcctcccgactcagcggcaccctcagcttcaccagcgccgaggacgacgaggacgacgaggacgaggacgacgaggaggctggccctgaccagctgcccctcggggatgggacgtcaggagaagacgcagaacggagccccccacctgatgggcagtggggcagtcagctcctggcgcggcagctgcaggatttctggaagaagtcccggaacaccttggcaccccagcggctgctcttcgaagtgaccagcgctaacgttgtcaaggacccgccctccaagtacgtgctctacaccctcgccgtgatcggcccaggaccgccagattgccagccagcccagatctctcgccgttactcggactttgagcggctgcaccgaaacctgcagcggcaattccggggcccaatggctgccatctccttcccccagtctcactaagttgccaggctggtctcaagcgcctgggttcaagggatcctcccgcctcagcctcctgagcagctgggattacaggcgcacatcaccatgcccaacctccaagtggacttcttgcaaagggtctggcccagggcagggctgccccacacaagggtgcactgagtgtcgtggctgctccaaatgccccttcatgagcttattatggaccgtcattgaggggtaactcctcccacaggaaccccagttgacagtttaaaagcactttcacacctctcctcgcttcctcaaaaagatcacagagggaggagctctgagaacagtctccttcaacagctcggccaagcagaactgctgtacctctgaccacttgtgttaggaaaactatcggctccctgtataataaatcaagccaggtcctccaagtggtaattcatgaaaaatatccccactaccaccaccaaggggaagaaaggactcagaagagaggacttgaggccatgaggtctggcctcttccctccccatctggagactctttctcccttgctggctttgggcccaagtttgatgtttatgaggatgattgctggtttcccttacacatagcagagctcactcagttctcacagtagccaaatgaagcagttatgtgttgtccagttttccagaccaggactgaaatccagagagggtcaggaatttggccccatgatgaagccaaatctgaacccatgtcctcacttcaaggttatcaatcttggattgtgatgctattggtacttgagaataccccttatctgagtataaagaatccttgagttttgtccttggtttatcaa

SEQ ID NO: 185061 - DNA, 771 bp, Homo sapiens
  Payload ID: 16436
  Gene Symbol: SNX21
  Gene Name: sorting nexin family member 21
  ENST ID: ENST00000372541
  CDS Start-End: 72-521
tcctgcgccgggctggggtacccctcctccgggatccggtacacagcgtcgcgcgctccccccagggtgccatggcctcccggctcctgcaccggctgcggcacgccttggccggcgacggccccggggaggcggcggccagtccagaggccgagcagtttccggagagctcagagctggaggacgacgacgccgagggcctgtcctcccgactcagcggcaccctcagcttcaccagcgccgaggacgacgaggacgacgaggacgaggacgacgaggaggctggccctgaccagctgcccctcggggatgggacgtcaggagaagacgcagaacggagccccccacctgatgggcagtggggcagtcagctcctggcgcggcagctgcaggatttctggaagaagtcccggaacaccttggcaccccagcggctgctcttcgaagtgaccagcgctaacgttgtcaaggacccgccctccaagtacgtgacaaacctcagctctacaccctcgccgtgatcggcccaggaccgccagattgccagccagcccagatctctcgccgttactcggactttgagcggctgcaccgaaacctgcagcggcaattccggggcccaatggctgccatctccttcccccgtaagcggctgcgccggaattttactgcagagaccattgcccgccgtagccgggcctttgagcagtttttgggtcacctgcaggcagtgcctgagctgcgccatgccccggacctgcaggacttctt

SEQ ID NO: 185062 - DNA, 1824 bp, Homo sapiens
  Payload ID: 16436
  Gene Symbol: SNX21
  Gene Name: sorting nexin family member 21
  ENST ID: ENST00000372542
  CDS Start-End: 313-1407
cccctggggcgcggcgcgcccctgaatgcaccgtgggacgcaggaggtagaggcgcacgaggcggcgcaagagacatcgggagggtcctgagcccctccggggaggaacgcggtcctaggctgagtgggttggggggaaagcgatgctggctgggtcccctggttcgcaagacctcggactgccagggggtggggcctcaccgcgcccctccctctccggttcgggccccgcccctcctcctcctgcgccgggctggggtacccctcctccgggatccggtacacagcgtcgcgcgctccccccagggtgccatggcctcccggctcctgcaccggctgcggcacgccttggccggcgacggccccggggaggcggcggccagtccagaggccgagcagtttccggagagctcagagctggaggacgacgacgccgagggcctgtcctcccgactcagcggcaccctcagcttcaccagcgccgaggacgacgaggacgacgaggacgaggacgacgaggaggctggccctgaccagctgcccctcggggatgggacgtcaggagaagacgcagaacggagccccccacctgatgggcagtggggcagtcagctcctggcgcggcagctgcaggatttctggaagaagtcccggaacaccttggcaccccagcggctgctcttcgaagtgaccagcgctaacgttgtcaaggacccgccctccaagtacgtgctctacaccctcgccgtgatcggcccaggaccgccagattgccagccagcccagatctctcgccgttactcggactttgagcggctgcaccgaaacctgcagcggcaattccggggcccaatggctgccatctccttcccccgtaagcggctgcgccggaattttactgcagagaccattgcccgccgtagccgggcctttgagcagtttttgggtcacctgcaggcagtgcctgagctgcgccatgccccggacctgcaggacttcttcgtgctgccggagctgcggcgggcacagagcctcacctgtactggcctctatcgtgaggctctggcactctgggccaatgcctggcagctgcaagcccagctgggcaccccctctggcccagaccgccccctgctgaccctggctgggctggccgtgtgccaccaggagctggaagaccctggagaggcccgggcatgctgtgagaaggccctgcagctgcttggggacaagagcctccaccctttgctggcaccctttctggaggcccatgtccggctctcctggcgcctgggcctggacaaacgtcaatcagaggctcggctccaagccctgcaggaggcaggccttacccccacaccaccccccagtctcaaagaattgctcatcaaggaggtgctggactaacccttgcctagatttaaggccactgtgaggagaggggttgccccagaaggcaggggaaggacctgatgagaacagaatagctgggaggctgcagagggtgctgggagcccctagaagttccaaaagagaatgtgaagcagatcaaggaaacttctgttgagctaggctcagggtgagctttggctggggttgcccttgtgtagtacagggaagtctgacacagcctctccagcctataaacagccggggggctgtggcacaggttggggcaatgttcccttgttggtgggcccccaagctggcaaggcctcttggctgaaggccagggactctgcccctggagtcctggagttaagggatgaaggcaaggctgcaggtctggcccaggggaattaaaagccagccactccagtggta

SEQ ID NO: 185063 - DNA, 1607 bp, Homo sapiens
  Payload ID: 16436
  Gene Symbol: SNX21
  Gene Name: sorting nexin family member 21
  Uniprot ID: Q969T3
  ENST ID: ENST00000491381
  CDS Start-End: 69-1190
gaacccggccgacctccatgggctgcggggggctgcacccggacccctggggcgcggcgcgcccctgaatgcaccgtgggacgcaggagggtgccatggcctcccggctcctgcaccggctgcggcacgccttggccggcgacggccccggggaggcggcggccagtccagaggccgagcagtttccggagagctcagagctggaggacgacgacgccgagggcctgtcctcccgactcagcggcaccctcagcttcaccagcgccgaggacgacgaggacgacgaggacgaggacgacgaggaggctggccctgaccagctgcccctcggggatgggacgtcaggagaagacgcagaacggagccccccacctgatgggcagtggggcagtcagctcctggcgcggcagctgcaggatttctggaagaagtcccggaacaccttggcaccccagcggctgctcttcgaagtgaccagcgctaacgttgtcaaggacccgccctccaagtacgtgctctacaccctcgccgtgatcggcccaggaccgccagattgccagccagcccagatctctcgccgttactcggactttgagcggctgcaccgaaacctgcagcggcaattccggggcccaatggctgccatctccttcccccgtaagcggctgcgccggaattttactgcagagaccattgcccgccgtagccgggcctttgagcagtttttgggtcacctgcaggcagtgcctgagctgcgccatgccccggacctgcaggacttcttcgtgctgccggagctgcggcgggcacagagcctcacctgtactggcctctatcgtgaggctctggcactctgggccaatgcctggcagctgcaagcccagctgggcaccccctctggcccagaccgccccctgctgaccctggctgggctggccgtgtgccaccaggagctggaagaccctggagaggcccgggcatgctgtgagaaggccctgcagctgcttggggacaagagcctccaccctttgctggcaccctttctggaggcccatgtccggctctcctggcgcctgggcctggacaaacgtcaatcagaggctcggctccaagccctgcaggaggcaggccttacccccacaccaccccccagtctcaaagaattgctcatcaaggaggtgctggactaacccttgcctagatttaaggccactgtgaggagaggggttgccccagaaggcaggggaaggacctgatgagaacagaatagctgggaggctgcagagggtgctgggagcccctagaagttccaaaagagaatgtgaagcagatcaaggaaacttctgttgagctaggctcagggtgagctttggctggggttgcccttgtgtagtacagggaagtctgacacagcctctccagcctataaacagccggggggctgtggcacaggttggggcaatgttcccttgttggtgggcccccaagctggcaaggcctcttggctgaaggccagggactctgcccctggagtcctggagttaagggatgaaggcaaggctgcaggtctggcccaggggaattaaaagccagccactccagtggta

SEQ ID NO: 185064 - DNA, 1043 bp, Homo sapiens
  Payload ID: 16436
  Gene Symbol: SNX21
  Gene Name: sorting nexin family member 21
  Uniprot ID: Q969T3
  ENST ID: ENST00000462307
  CDS Start-End: 90-566
tgagcccggcggagccctgcagaacccggccgacctccatgggctgcggggggctgcacccggacccctggggcgcggcgcgcccctgaatgcaccgtgggacgcaggagggtgccatggcctcccggctcctgcaccggctgcggcacgccttggccggcgacggccccggggaggcggcggccagtccagaggccgagcagtttccggagagctcagagctggaggacgacgacgccgagggcctgtcctcccgactcagcggcaccctcagcttcaccagcgccgaggacgacgaggacgacgaggacgaggacgacgaggaggctggccctgaccagctgcccctcggggatgggacgtcaggagaagacgcagaacggagccccccacctgatgggcagtggggcagtcagctcctggcgcggcagctgcaggatttctggaagaagtcccggaacaccttggcaccccagcggctgctcttcgaagtgaccagcgctaacgttgtcaaggacccgccctccaagtacgtgacaaacctcagctctacaccctcgccgtgatcggcccaggaccgccagattgccagccagcccagatctctcgccgttactcggactttgagcggctgcaccgaaacctgcagcggcaattccggggcccaatggctgccatctccttcccccgtaagcggctgcgccggaattttactgcagagaccattgcccgccgtagccgggcctttgagcagtttttgggtcacctgcaggcagtgcctgagctgcgccatgccccggacctgcaggacttcttcgtgctgccggagctgcggcgggcacagagcctcacctgtactggcctctatcgtgaggctctggcactctgggccaatgcctggcagctgcaagcccagctgggcaccccctctggcccagaccgccccctgctgaccctggctgggctggccgtgtgccaccaggagctggaagaccctggagaggcccgggcatgctgtgagaaggccctgcagctgcttgggg

SEQ ID NO: 185065 - DNA, 587 bp, Homo sapiens
  Payload ID: 16436
  Gene Symbol: SNX21
  Gene Name: sorting nexin family member 21
  ENST ID: ENST00000614929
  CDS Start-End: 90-587
tgagcccggcggagccctgcagaacccggccgacctccatgggctgcggggggctgcacccggacccctggggcgcggcgcgcccctgaatgcaccgtgggacgcaggagggtgccatggcctcccggctcctgcaccggctgcggcacgccttggccggcgacggccccggggaggcggcggccagtccagaggccgagcagtttccggagagctcagagctggaggacgacgacgccgagggcctgtcctcccgactcagcggcaccctcagcttcaccagcgccgaggacgacgaggacgacgaggacgaggacgacgaggaggctggccctgaccagctgcccctcggggatgggacgtcaggagaagacgcagaacggagccccccacctgatgggcagtggggcagtcagctcctggcgcggcagctgcaggatttctggaagaagtcccggaacaccttggcaccccagcggctgctcttcgaagtgaccagcgctaacgttgtcaaggacccgccctccaagtacgtgagacagggtcttgccatgttgcccaggctggtctcgaactcctggccttaa

SEQ ID NO: 185066 - DNA, 1308 bp, Homo sapiens
  Payload ID: 16437
  Gene Symbol: SNX27
  Gene Name: sorting nexin family member 27
  ENST ID: ENST00000368838
  CDS Start-End: 1-1308
atgggattgtctttttccctttttccccttaggaaccacgtgaatgttgagggggcgacacacaagcaggtggtggacctgattcgagcaggcgagaaggaattgatcttgacagtgttatctgtacctcctcatgaggcagataacctagatcccagtgacgactcgttgggacaatcattttatgattacacagaaaagcaagcagtgcccatatcggtccccagatacaaacatgtggagcagaatggtgagaagtttgtggtatataatgtttacatggcagggaggcagctgtgttctaagcggtaccgggagtttgctatcctacaccagaacctgaagagagagtttgccaactttacatttcctcgactcccagggaagtggccattttcattatcagaacaacaattagatgcccgacgtcggggattggaagaatatctagaaaaagtgtgttcaatacgagtaattggtgagagtgacatcatgcaggaattcctatcagaatccgatgagaactacaatggtgtgtccgacgtagagctgagagtagcattaccagatggaacaacggttacagtcagggttaaaaagaacagtactacagaccaagtatatcaggctatcgcagcaaaggttggcatggacagtacgacagtgaattactttgccttatttgaagtgatcagtcactcctttgtacgtaaattggcacctaatgagtttcctcacaaactctacattcagaattatacatcagctgtgccaggcacctgcttgaccattcgaaagtggctttttacaacagaagaagaaattctcttaaatgacaatgaccttgctgttacctacttctttcatcaggcagtcgatgatgtgaagaaaggttacatcaaagcagaagaaaagtcctatcaattacagaagctatacgaacaaagaaaaatggtcatgtacctcaacatgctaaggacttgtgagggctacaatgaaatcatctttccccactgtgcctgtgactccaggaggaaggggcacgttatcacagccatcagcatcacgcactttaaactgcatgcctgcactgaagaaggacagctggagaaccaggtaattgcatttgaatgggatgagatgcagcgatgggacacagatgaagaagggatggccttctgtttcgaatatgcacgaggagagaagaagccccgatgggttaaaatcttcacgccatatttcaattacatgcatgagtgcttcgagagggtgttctgcgagctcaagtggagaaaagaggaatattag

SEQ ID NO: 185067 - DNA, 7070 bp, Homo sapiens
  Payload ID: 16437
  Gene Symbol: SNX27
  Gene Name: sorting nexin family member 27
  ENST ID: ENST00000368841
  CDS Start-End: 138-335
ctcggtggccgagtcggtcccgcggccggcggatcgggcgcgcgcgtcgggggtcgtccggctgccaggcagggcgagcacgcgccgggaggccttggaggcgtagggggcgggggtacggctcgcctgctcgcaagatggcggacgaggacggggaagggattcatccctcagcccctcacaggaacggaggtggcggcggcggcggggggtctgggctccactgcgccgggaacggcggcgggggaggcggcggcccgcgggtcgtgcgcatcgtcaagtccgagtccggctacggcttcaacgtgcggggccaagaaccacgtgaatgttgagggggcgacacacaagcaggtggtggacctgattcgagcaggcgagaaggaattgatcttgacagtgttatctgtacctcctcatgaggcagataacctagatcccagtgacgactcgttgggacaatcattttatgattacacagaaaagcaagcagtgcccatatcggtccccagatacaaacatgtggagcagaatggtgagaagtttgtggtatataatgtttacatggcagggaggcagctgtgttctaagcggtaccgggagtttgctatcctacaccagaacctgaagagagagtttgccaactttacatttcctcgactcccagggaagtggccattttcattatcagaacaacaattagatgcccgacgtcggggattggaagaatatctagaaaaagtgtgttcaatacgagtaattggtgagagtgacatcatgcaggaattcctatcagaatccgatgagaactacaatggtgtgtccgacgtagagctgagagtagcattaccagatggaacaacggttacagtcagggttaaaaagaacagtactacagaccaagtatatcaggctatcgcagcaaaggttggcatggacagtacgacagtgaattactttgccttatttgaagtgatcagtcactcctttgtacgtaaattggcacctaatgagtttcctcacaaactctacattcagaattatacatcagctgtgccaggcacctgcttgaccattcgaaagtggctttttacaacagaagaagaaattctcttaaatgacaatgaccttgctgttacctacttctttcatcaggcagtcgatgatgtgaagaaaggttacatcaaagcagaagaaaagtcctatcaattacagaagctatacgaacaaagaaaaatggtcatgtacctcaacatgctaaggacttgtgagggctacaatgaaatcatctttccccactgtgcctgtgactccaggaggaaggggcacgttatcacagccatcagcatcacgcactttaaactgcatgcctgcactgaagaaggacagctggagaaccaggtaattgcatttgaatgggatgagatgcagcgatgggacacagatgaagaagggatggccttctgtttcgaatatgcacgaggagagaagaagccccgatgggttaaaatcttcacgccatatttcaattacatgcatgagtgcttcgagagggtgttctgcgagctcaagtggagaaaagaggaatattagttagagactgattatctcatgtgagccaggacattcttccagcaaggttggcctctggatggtgaacgggctgtgcaaaaaagccctgcttcttcccttgtctagagggtggacattggctacaggctcttccatctctcatgacttcatggaccctcctctgccagttttttaaatcagatcaccctccatgttgttcctgacccacaggggaagctgtcctcagttgtagccgtcttgactggatgagtcctggcagtctttctaggcgaaccaagaatgtttgtgtgagggaaggtgtttgctgttgctttactgctgtctgtatgtgccagtgctggaacagaatttggaagattctgaataattagttacttattctcaaagaaaatctttgaaagaatcaggaggtcaagtcaagaacatgaaaatttatattttagtacagtagaaagaacattgggctctgggaattttatctgggttttctcctggcttttttttccctctgtgtaattttgggtaaatcagcctccctagctttcagttttctcttctgtgaaacaggaagactgaaccacgtaattaatatccaaggtcccttccggctctaaaaggctatgattctagatgagaagttatatcaagaaagatgtggccaatcagattgagtcatccaggcatacctttttagcttctgtttgtggagttgtctccagataagaggagatgtgccttcccaataactctttttttttttcctttcagaacattttccagatggcgaggtcacagcagagagatgtggccacctagcctttccttatccccttcccttcccttcacccccatcctcttactcctttcatgtcccatttcagacagagtaaccattaacaaaaaagaagagaaaaagttaaagtcgttatattcaaaagccctaaactaaatattattaataaccccctctgaatttcatgtctctggaattgaggtggtagtgaacagcagatcggtcagcaccagaagtcaactgagttaaggcaggaaaagaaataagcccaaccaacttgccaaaggtatctttgtcctttcacctgggcctcataccaacagcctctccttgtactatatttttaaaactggaactatgaacttcatccatttgcactgttcagacatatatatgtatgtatgtaaaaattatatatacacaaattagctgcacgtatatacatatatatatttctttttaaatttcatattgatggcagtaccttttttagcttgtgtttttacacacctttcactagaatccatgacctccctcgtgctctctttcttttgaaacaaactttaaaaaggaaaaaaaagcattttacagggaaaaatacctctcctcatgaaggacttgaaaagtttacaacctgcttggatttttgcccctttttttgtattgagtatagattccggctcatgggttgccatagagtctaggaacaaggagtatagtttctttatcttccaagagggtgctggggaggagaaagaggtgtgtttctcaaggttaacaggctgtagttctgcagggagagcctgaagtcctggtatgggctcttgattctgtgacaatttttttgatccatctatttctctcactcctggctttctagccacattctgcacctccttcctgctttcctagagcctcggtatgctttccctcaaccgaccctggctcaggaggttgatgccatgggaacctgaacctgaaacacttcatggtagtaatttcctgttttccttgccttttttttttttttttttttttttttctgagacagggtcttactctgtcgcccagactggaatgtggtggcatgaacatagctcactgttaccttgaattctgggctcaggtgatccttccgcctcaccctcctgagtagctgggactacaggtgtgcaccaccacacctggctaattcttcttaaaatttttttgtagagacagggtctcactatgttgcccaggctggtctcaaactcctggcctcaggtgatcctcttgtctcagcctcccaaagtgctgggattacaggcatgagccactgtgtccttccctgccttttttgcagcagggatagtactcaggaccagagttaagctgataccttaggcacacaggttggacttacatagaggaaagaaagcaagaaatgccctatgtacatgaggttttacctcctccattcctgaccaataaccacccataactacggcattctctgtgacttccttaaacagcagtgatgggaagggatccaatagtatcttcaaggccttggggaaacttgcagtgggtcagtggtctgtgccaaccaaacgatagccccatccaagccagctgagaacctaggaaggagtagtaggaatatggttgattagattggatctcccaagttttaattgaaaggagactgaacgaaaacctttctgctttctgtccgttaaagagctcctcatctgatcttgcagctagaccctttgagacttaagagctgcatcccaggatcagaagccagggctaattggggtaggacaatattcccagcccctaagctctgtagataatgcataagaagcaccaagtcaggctcagatgcaactaaaacacatctttgagccttttctttttcccttctcccctttctaaacaaaaaccttcctaggatggcatcttttgctctaactgggagacagtcataattggttgtagtcaattctactaagcagtgttggggtggttggaaagtctcttttttgtaatttgtttttgcaaatcattgtgaggccactttttctttctttctttctttctttctttctttctttctttctttcgttctttcgttctttcgttctttctttctttctttctttctctttctttcttttgctttccttctttcatctcttttttgtaatttgttgttgcaaatcattgtgaggccacttttctttccccttccttccttcctttttttctgttttttttttttttttttcccagagtcttgctctgtcgcccaggttggagtgcagtggcacgatctcggctcactgcaccctctgcctcttgggttcaagcgattctcctgcctcagcctcccaagtagctgggattacaggcatacaccaccacgccccactaattttttgtatttttggtagggcggggtttcaccatgatggccaggttggttttgaactcctgacctcaagtaatctgcccacctcggcctcccaaagtgctaggattacaggagtgagccactgcgcctggcccacttttctttctttccttcttattttgttatgctggcagccatttgcccctgcatggtatgggatcaaagaggacagcctttcctccctcaccttctccaaatctaggtgaaatcacagagtacaaaacgtgagaatgctgaatgtgtaaagttgcagagggatccctaatttgaagactttgacacagaactaacttcttttgacttaaatgaatttaaaatgagccaaaggaccctgaaaagaagacatgttgatttcccactcctagatgctaaagagacttggcaccagctttgttcaaactgtaaaaatagcaatttgcccctactcgctcagagtgggacagtagtgaacagagctgggattccatgcgacagcttgaatgctgaccttcagacatgagacatagggatttggaggccccttagaatgggtagatggtgttatgttccctttctggcatagcattcacttggtgctttggagattaggtgagggccctataggtagttggcctgttggcagaatttatttaggaacagcccttttgaaagtgtcccagtaacaacgcacccagctgcagcaaggaggtggggaaggagggcaccccaaaggacagcgccttcttctcttccacccatgcacggccttgggtgatggaggcgggttccctgtggctgcgtggatcccataggatcaagcccttctttgcatgaagcagtgttgtgactcttctctctccccttcctctgcacttcctttctgtaatccctactgttcttcttagtcccagcttctgcccagggaggcttctacccagacttcttttgcaatttgtccctgggaagagggggtctcccagtgcccccagcttcatcccagcagaaccagcaggatcctcctggtctctcactggccttcctccacacttggtttctatcctcaggggtagaagctcagagctttttatggcccaggagaaaatgtagaccctgagaaacctgtccctgcagaaaggttcccttgggccatgctttgggccctctgctctttatatgtttattctattctccatttttccaccccgtccttaccctaggcctaaacacaggtacagatatgtgcatgctcagggcagctcctaggcctggactgagctctcaggggggaattagataaatattccaacatcctcatgcctggcccatttagtttcatcctttagttacccaggccagtagctttgggttatcccttcctgtagctccaaacccagcacttggagcagcaaaatagggcactgacaggagatgaaactctctcctatctcagaatttgccaacttctgggctgggctcctaggaggtagttttcttgaaggggactgcatcctagttgacctgaattttccagaccaggagggactgctgtgctctcccttctcgccatcatactgtttggctagattcattcagcagtagaagctgtttgatctgttgaccccagcatactgctgtttcttcaccagcttcattgtgtcacagtagcttcctttgggaggatgatgtgatagaacactcagagagagggagggagaagagagatagtgggtatgcttctctagctccccatcttccaggtccacctcttgacttcctgttcccctaaacctgagcacatcacgccaggcctctttgctgccaggacagcatcagctcactcctcagcaataatctagggtatgtgggaaggtcagggctgtggtaaggaatagaatcaaagaggggagtgatacggggtgggggcacttggccgcctgctaaacttggacattaattttatatcatgacccccttttaagccagtgagctgggcttcagtttttcccaggccatgcacatttaatttatttcagagaaactctaattgtattttcactgcagtatcttgtattttttatttgtgatttaagaaatgtgaagagaaaatacacagacacaataatggctaacattgtttctttcattccttgttctagagctaaccactctaaaattgtttggtaatgtcacttagtgtaattaattgtaacatattcttttaaataaattgatttattgatcaaa

SEQ ID NO: 185068 - DNA, 7197 bp, Homo sapiens
  Payload ID: 16437
  Gene Symbol: SNX27
  Gene Name: sorting nexin family member 27
  Uniprot ID: Q96L92
  ENST ID: ENST00000368843
  CDS Start-End: 121-1707
tcccgcggccggcggatcgggcgcgcgcgtcgggggtcgtccggctgccaggcagggcgagcacgcgccgggaggccttggaggcgtagggggcgggggtacggctcgcctgctcgcaagatggcggacgaggacggggaagggattcatccctcagcccctcacaggaacggaggtggcggcggcggcggggggtctgggctccactgcgccgggaacggcggcgggggaggcggcggcccgcgggtcgtgcgcatcgtcaagtccgagtccggctacggcttcaacgtgcggggccaagtgagcgagggcgggcaactgcggagcatcaacggggagctgtacgcgccgctgcagcatgtgagcgccgtgctgcccgggggggcggccgatcgggccggggtgcgcaagggggaccgcatcctggaggtgaaccacgtgaatgttgagggggcgacacacaagcaggtggtggacctgattcgagcaggcgagaaggaattgatcttgacagtgttatctgtacctcctcatgaggcagataacctagatcccagtgacgactcgttgggacaatcattttatgattacacagaaaagcaagcagtgcccatatcggtccccagatacaaacatgtggagcagaatggtgagaagtttgtggtatataatgtttacatggcagggaggcagctgtgttctaagcggtaccgggagtttgctatcctacaccagaacctgaagagagagtttgccaactttacatttcctcgactcccagggaagtggccattttcattatcagaacaacaattagatgcccgacgtcggggattggaagaatatctagaaaaagtgtgttcaatacgagtaattggtgagagtgacatcatgcaggaattcctatcagaatccgatgagaactacaatggtgtgtccgacgtagagctgagagtagcattaccagatggaacaacggttacagtcagggttaaaaagaacagtactacagaccaagtatatcaggctatcgcagcaaaggttggcatggacagtacgacagtgaattactttgccttatttgaagtgatcagtcactcctttgtacgtaaattggcacctaatgagtttcctcacaaactctacattcagaattatacatcagctgtgccaggcacctgcttgaccattcgaaagtggctttttacaacagaagaagaaattctcttaaatgacaatgaccttgctgttacctacttctttcatcaggcagtcgatgatgtgaagaaaggttacatcaaagcagaagaaaagtcctatcaattacagaagctatacgaacaaagaaaaatggtcatgtacctcaacatgctaaggacttgtgagggctacaatgaaatcatctttccccactgtgcctgtgactccaggaggaaggggcacgttatcacagccatcagcatcacgcactttaaactgcatgcctgcactgaagaaggacagctggagaaccaggtaattgcatttgaatgggatgagatgcagcgatgggacacagatgaagaagggatggccttctgtttcgaatatgcacgaggagagaagaagccccgatgggttaaaatcttcacgccatatttcaattacatgcatgagtgcttcgagagggtgttctgcgagctcaagtggagaaaagaggaatattagttagagactgattatctcatgtgagccaggacattcttccagcaaggttggcctctggatggtgaacgggctgtgcaaaaaagccctgcttcttcccttgtctagagggtggacattggctacaggctcttccatctctcatgacttcatggaccctcctctgccagttttttaaatcagatcaccctccatgttgttcctgacccacaggggaagctgtcctcagttgtagccgtcttgactggatgagtcctggcagtctttctaggcgaaccaagaatgtttgtgtgagggaaggtgtttgctgttgctttactgctgtctgtatgtgccagtgctggaacagaatttggaagattctgaataattagttacttattctcaaagaaaatctttgaaagaatcaggaggtcaagtcaagaacatgaaaatttatattttagtacagtagaaagaacattgggctctgggaattttatctgggttttctcctggcttttttttccctctgtgtaattttgggtaaatcagcctccctagctttcagttttctcttctgtgaaacaggaagactgaaccacgtaattaatatccaaggtcccttccggctctaaaaggctatgattctagatgagaagttatatcaagaaagatgtggccaatcagattgagtcatccaggcatacctttttagcttctgtttgtggagttgtctccagataagaggagatgtgccttcccaataactctttttttttttcctttcagaacattttccagatggcgaggtcacagcagagagatgtggccacctagcctttccttatccccttcccttcccttcacccccatcctcttactcctttcatgtcccatttcagacagagtaaccattaacaaaaaagaagagaaaaagttaaagtcgttatattcaaaagccctaaactaaatattattaataaccccctctgaatttcatgtctctggaattgaggtggtagtgaacagcagatcggtcagcaccagaagtcaactgagttaaggcaggaaaagaaataagcccaaccaacttgccaaaggtatctttgtcctttcacctgggcctcataccaacagcctctccttgtactatatttttaaaactggaactatgaacttcatccatttgcactgttcagacatatatatgtatgtatgtaaaaattatatatacacaaattagctgcacgtatatacatatatatatttctttttaaatttcatattgatggcagtaccttttttagcttgtgtttttacacacctttcactagaatccatgacctccctcgtgctctctttcttttgaaacaaactttaaaaaggaaaaaaaagcattttacagggaaaaatacctctcctcatgaaggacttgaaaagtttacaacctgcttggatttttgcccctttttttgtattgagtatagattccggctcatgggttgccatagagtctaggaacaaggagtatagtttctttatcttccaagagggtgctggggaggagaaagaggtgtgtttctcaaggttaacaggctgtagttctgcagggagagcctgaagtcctggtatgggctcttgattctgtgacaatttttttgatccatctatttctctcactcctggctttctagccacattctgcacctccttcctgctttcctagagcctcggtatgctttccctcaaccgaccctggctcaggaggttgatgccatgggaacctgaacctgaaacacttcatggtagtaatttcctgttttccttgccttttttttttttttttttttttttttctgagacagggtcttactctgtcgcccagactggaatgtggtggcatgaacatagctcactgttaccttgaattctgggctcaggtgatccttccgcctcaccctcctgagtagctgggactacaggtgtgcaccaccacacctggctaattcttcttaaaatttttttgtagagacagggtctcactatgttgcccaggctggtctcaaactcctggcctcaggtgatcctcttgtctcagcctcccaaagtgctgggattacaggcatgagccactgtgtccttccctgccttttttgcagcagggatagtactcaggaccagagttaagctgataccttaggcacacaggttggacttacatagaggaaagaaagcaagaaatgccctatgtacatgaggttttacctcctccattcctgaccaataaccacccataactacggcattctctgtgacttccttaaacagcagtgatgggaagggatccaatagtatcttcaaggccttggggaaacttgcagtgggtcagtggtctgtgccaaccaaacgatagccccatccaagccagctgagaacctaggaaggagtagtaggaatatggttgattagattggatctcccaagttttaattgaaaggagactgaacgaaaacctttctgctttctgtccgttaaagagctcctcatctgatcttgcagctagaccctttgagacttaagagctgcatcccaggatcagaagccagggctaattggggtaggacaatattcccagcccctaagctctgtagataatgcataagaagcaccaagtcaggctcagatgcaactaaaacacatctttgagccttttctttttcccttctcccctttctaaacaaaaaccttcctaggatggcatcttttgctctaactgggagacagtcataattggttgtagtcaattctactaagcagtgttggggtggttggaaagtctcttttttgtaatttgtttttgcaaatcattgtgaggccactttttctttctttctttctttctttctttctttctttctttctttcgttctttcgttctttcgttctttctttctttctttctttctctttctttcttttgctttccttctttcatctcttttttgtaatttgttgttgcaaatcattgtgaggccacttttctttccccttccttccttcctttttttctgttttttttttttttttttcccagagtcttgctctgtcgcccaggttggagtgcagtggcacgatctcggctcactgcaccctctgcctcttgggttcaagcgattctcctgcctcagcctcccaagtagctgggattacaggcatacaccaccacgccccactaattttttgtatttttggtagggcggggtttcaccatgatggccaggttggttttgaactcctgacctcaagtaatctgcccacctcggcctcccaaagtgctaggattacaggagtgagccactgcgcctggcccacttttctttctttccttcttattttgttatgctggcagccatttgcccctgcatggtatgggatcaaagaggacagcctttcctccctcaccttctccaaatctaggtgaaatcacagagtacaaaacgtgagaatgctgaatgtgtaaagttgcagagggatccctaatttgaagactttgacacagaactaacttcttttgacttaaatgaatttaaaatgagccaaaggaccctgaaaagaagacatgttgatttcccactcctagatgctaaagagacttggcaccagctttgttcaaactgtaaaaatagcaatttgcccctactcgctcagagtgggacagtagtgaacagagctgggattccatgcgacagcttgaatgctgaccttcagacatgagacatagggatttggaggccccttagaatgggtagatggtgttatgttccctttctggcatagcattcacttggtgctttggagattaggtgagggccctataggtagttggcctgttggcagaatttatttaggaacagcccttttgaaagtgtcccagtaacaacgcacccagctgcagcaaggaggtggggaaggagggcaccccaaaggacagcgccttcttctcttccacccatgcacggccttgggtgatggaggcgggttccctgtggctgcgtggatcccataggatcaagcccttctttgcatgaagcagtgttgtgactcttctctctccccttcctctgcacttcctttctgtaatccctactgttcttcttagtcccagcttctgcccagggaggcttctacccagacttcttttgcaatttgtccctgggaagagggggtctcccagtgcccccagcttcatcccagcagaaccagcaggatcctcctggtctctcactggccttcctccacacttggtttctatcctcaggggtagaagctcagagctttttatggcccaggagaaaatgtagaccctgagaaacctgtccctgcagaaaggttcccttgggccatgctttgggccctctgctctttatatgtttattctattctccatttttccaccccgtccttaccctaggcctaaacacaggtacagatatgtgcatgctcagggcagctcctaggcctggactgagctctcaggggggaattagataaatattccaacatcctcatgcctggcccatttagtttcatcctttagttacccaggccagtagctttgggttatcccttcctgtagctccaaacccagcacttggagcagcaaaatagggcactgacaggagatgaaactctctcctatctcagaatttgccaacttctgggctgggctcctaggaggtagttttcttgaaggggactgcatcctagttgacctgaattttccagaccaggagggactgctgtgctctcccttctcgccatcatactgtttggctagattcattcagcagtagaagctgtttgatctgttgaccccagcatactgctgtttcttcaccagcttcattgtgtcacagtagcttcctttgggaggatgatgtgatagaacactcagagagagggagggagaagagagatagtgggtatgcttctctagctccccatcttccaggtccacctcttgacttcctgttcccctaaacctgagcacatcacgccaggcctctttgctgccaggacagcatcagctcactcctcagcaataatctagggtatgtgggaaggtcagggctgtggtaaggaatagaatcaaagaggggagtgatacggggtgggggcacttggccgcctgctaaacttggacattaattttatatcatgacccccttttaagccagtgagctgggcttcagtttttcccaggccatgcacatttaatttatttcagagaaactctaattgtattttcactgcagtatcttgtattttttatttgtgatttaagaaatgtgaagagaaaatacacagacacaataatggctaacattgtttctttcattccttgttctagagctaaccactctaaaattgtttggtaatgtcacttagtgtaattaattgtaacatattcttttaaataaattgatttattgatcaaacacttctttggtt

SEQ ID NO: 185069 - DNA, 6403 bp, Homo sapiens
  Payload ID: 16437
  Gene Symbol: SNX27
  Gene Name: sorting nexin family member 27
  Uniprot ID: Q96L92
  ENST ID: ENST00000458013
  CDS Start-End: 121-1746
tcccgcggccggcggatcgggcgcgcgcgtcgggggtcgtccggctgccaggcagggcgagcacgcgccgggaggccttggaggcgtagggggcgggggtacggctcgcctgctcgcaagatggcggacgaggacggggaagggattcatccctcagcccctcacaggaacggaggtggcggcggcggcggggggtctgggctccactgcgccgggaacggcggcgggggaggcggcggcccgcgggtcgtgcgcatcgtcaagtccgagtccggctacggcttcaacgtgcggggccaagtgagcgagggcgggcaactgcggagcatcaacggggagctgtacgcgccgctgcagcatgtgagcgccgtgctgcccgggggggcggccgatcgggccggggtgcgcaagggggaccgcatcctggaggtgaaccacgtgaatgttgagggggcgacacacaagcaggtggtggacctgattcgagcaggcgagaaggaattgatcttgacagtgttatctgtacctcctcatgaggcagataacctagatcccagtgacgactcgttgggacaatcattttatgattacacagaaaagcaagcagtgcccatatcggtccccagatacaaacatgtggagcagaatggtgagaagtttgtggtatataatgtttacatggcagggaggcagctgtgttctaagcggtaccgggagtttgctatcctacaccagaacctgaagagagagtttgccaactttacatttcctcgactcccagggaagtggccattttcattatcagaacaacaattagatgcccgacgtcggggattggaagaatatctagaaaaagtgtgttcaatacgagtaattggtgagagtgacatcatgcaggaattcctatcagaatccgatgagaactacaatggtgtgtccgacgtagagctgagagtagcattaccagatggaacaacggttacagtcagggttaaaaagaacagtactacagaccaagtatatcaggctatcgcagcaaaggttggcatggacagtacgacagtgaattactttgccttatttgaagtgatcagtcactcctttgtacgtaaattggcacctaatgagtttcctcacaaactctacattcagaattatacatcagctgtgccaggcacctgcttgaccattcgaaagtggctttttacaacagaagaagaaattctcttaaatgacaatgaccttgctgttacctacttctttcatcaggcagtcgatgatgtgaagaaaggttacatcaaagcagaagaaaagtcctatcaattacagaagctatacgaacaaagaaaaatggtcatgtacctcaacatgctaaggacttgtgagggctacaatgaaatcatctttccccactgtgcctgtgactccaggaggaaggggcacgttatcacagccatcagcatcacgcactttaaactgcatgcctgcactgaagaaggacagctggagaaccaggtaattgcatttgaatgggatgagatgcagcgatgggacacagatgaagaagggatggccttctgtttcgaatatgcacgaggagagaagaagccccgatgggttaaaatcttcacgccatatttcaattacatgcatgagtgcttcgagagggtgttctgcgagctcaagtggagaaaagagaacattttccagatggcgaggtcacagcagagagatgtggccacctagcctttccttatccccttcccttcccttcacccccatcctcttactcctttcatgtcccatttcagacagagtaaccattaacaaaaaagaagagaaaaagttaaagtcgttatattcaaaagccctaaactaaatattattaataaccccctctgaatttcatgtctctggaattgaggtggtagtgaacagcagatcggtcagcaccagaagtcaactgagttaaggcaggaaaagaaataagcccaaccaacttgccaaaggtatctttgtcctttcacctgggcctcataccaacagcctctccttgtactatatttttaaaactggaactatgaacttcatccatttgcactgttcagacatatatatgtatgtatgtaaaaattatatatacacaaattagctgcacgtatatacatatatatatttctttttaaatttcatattgatggcagtaccttttttagcttgtgtttttacacacctttcactagaatccatgacctccctcgtgctctctttcttttgaaacaaactttaaaaaggaaaaaaaagcattttacagggaaaaatacctctcctcatgaaggacttgaaaagtttacaacctgcttggatttttgcccctttttttgtattgagtatagattccggctcatgggttgccatagagtctaggaacaaggagtatagtttctttatcttccaagagggtgctggggaggagaaagaggtgtgtttctcaaggttaacaggctgtagttctgcagggagagcctgaagtcctggtatgggctcttgattctgtgacaatttttttgatccatctatttctctcactcctggctttctagccacattctgcacctccttcctgctttcctagagcctcggtatgctttccctcaaccgaccctggctcaggaggttgatgccatgggaacctgaacctgaaacacttcatggtagtaatttcctgttttccttgccttttttttttttttttttttttttttctgagacagggtcttactctgtcgcccagactggaatgtggtggcatgaacatagctcactgttaccttgaattctgggctcaggtgatccttccgcctcaccctcctgagtagctgggactacaggtgtgcaccaccacacctggctaattcttcttaaaatttttttgtagagacagggtctcactatgttgcccaggctggtctcaaactcctggcctcaggtgatcctcttgtctcagcctcccaaagtgctgggattacaggcatgagccactgtgtccttccctgccttttttgcagcagggatagtactcaggaccagagttaagctgataccttaggcacacaggttggacttacatagaggaaagaaagcaagaaatgccctatgtacatgaggttttacctcctccattcctgaccaataaccacccataactacggcattctctgtgacttccttaaacagcagtgatgggaagggatccaatagtatcttcaaggccttggggaaacttgcagtgggtcagtggtctgtgccaaccaaacgatagccccatccaagccagctgagaacctaggaaggagtagtaggaatatggttgattagattggatctcccaagttttaattgaaaggagactgaacgaaaacctttctgctttctgtccgttaaagagctcctcatctgatcttgcagctagaccctttgagacttaagagctgcatcccaggatcagaagccagggctaattggggtaggacaatattcccagcccctaagctctgtagataatgcataagaagcaccaagtcaggctcagatgcaactaaaacacatctttgagccttttctttttcccttctcccctttctaaacaaaaaccttcctaggatggcatcttttgctctaactgggagacagtcataattggttgtagtcaattctactaagcagtgttggggtggttggaaagtctcttttttgtaatttgtttttgcaaatcattgtgaggccactttttctttctttctttctttctttctttctttctttctttctttcgttctttcgttctttcgttctttctttctttctttctttctctttctttcttttgctttccttctttcatctcttttttgtaatttgttgttgcaaatcattgtgaggccacttttctttccccttccttccttcctttttttctgttttttttttttttttttcccagagtcttgctctgtcgcccaggttggagtgcagtggcacgatctcggctcactgcaccctctgcctcttgggttcaagcgattctcctgcctcagcctcccaagtagctgggattacaggcatacaccaccacgccccactaattttttgtatttttggtagggcggggtttcaccatgatggccaggttggttttgaactcctgacctcaagtaatctgcccacctcggcctcccaaagtgctaggattacaggagtgagccactgcgcctggcccacttttctttctttccttcttattttgttatgctggcagccatttgcccctgcatggtatgggatcaaagaggacagcctttcctccctcaccttctccaaatctaggtgaaatcacagagtacaaaacgtgagaatgctgaatgtgtaaagttgcagagggatccctaatttgaagactttgacacagaactaacttcttttgacttaaatgaatttaaaatgagccaaaggaccctgaaaagaagacatgttgatttcccactcctagatgctaaagagacttggcaccagctttgttcaaactgtaaaaatagcaatttgcccctactcgctcagagtgggacagtagtgaacagagctgggattccatgcgacagcttgaatgctgaccttcagacatgagacatagggatttggaggccccttagaatgggtagatggtgttatgttccctttctggcatagcattcacttggtgctttggagattaggtgagggccctataggtagttggcctgttggcagaatttatttaggaacagcccttttgaaagtgtcccagtaacaacgcacccagctgcagcaaggaggtggggaaggagggcaccccaaaggacagcgccttcttctcttccacccatgcacggccttgggtgatggaggcgggttccctgtggctgcgtggatcccataggatcaagcccttctttgcatgaagcagtgttgtgactcttctctctccccttcctctgcacttcctttctgtaatccctactgttcttcttagtcccagcttctgcccagggaggcttctacccagacttcttttgcaatttgtccctgggaagagggggtctcccagtgcccccagcttcatcccagcagaaccagcaggatcctcctggtctctcactggccttcctccacacttggtttctatcctcaggggtagaagctcagagctttttatggcccaggagaaaatgtagaccctgagaaacctgtccctgcagaaaggttcccttgggccatgctttgggccctctgctctttatatgtttattctattctccatttttccaccccgtccttaccctaggcctaaacacaggtacagatatgtgcatgctcagggcagctcctaggcctggactgagctctcaggggggaattagataaatattccaacatcctcatgcctggcccatttagtttcatcctttagttacccaggccagtagctttgggttatcccttcctgtagctccaaacccagcacttggagcagcaaaatagggcactgacaggagatgaaactctctcctatctcagaatttgccaacttctgggctgggctcctaggaggtagttttcttgaaggggactgcatcctagttgacctgaattttccagaccaggagggactgctgtgctctcccttctcgccatcatactgtttggctagattcattcagcagtagaagctgtttgatctgttgaccccagcatactgctgtttcttcaccagcttcattgtgtcacagtagcttcctttgggaggatgatgtgatagaacactcagagagagggagggagaagagagatagtgggtatgcttctctagctccccatcttccaggtccacctcttgacttcctgttcccctaaacctgagcacatcacgccaggcctctttgctgccaggacagcatcagctcactcctcagcaataatctagggtatgtgggaaggtcagggctgtggtaaggaatagaatcaaagaggggagtgatacggggtgggggcacttggccgcctgctaaacttggacattaattttatatcatgacccccttttaagccagtgagctgggcttcagtttttcccaggccatgcacatttaatttatttcagagaaactctaattgtattttcactgcagtatcttgtattttttatttgtgatttaagaaatgtgaagagaaaatacacagacacaataatggctaacattgtttctttcattccttgttctagagctaaccactctaaaattgtttggtaatgtcacttagtgtaattaattgtaacatattcttttaaataaattgatttattgat

SEQ ID NO: 185070 - DNA, 7622 bp, Homo sapiens
  Payload ID: 16438
  Gene Symbol: SNX30
  Gene Name: sorting nexin family member 30
  Uniprot ID: Q5VWJ9
  ENST ID: ENST00000374232
  CDS Start-End: 165-1478
gccggcagagaccagccggcgggtggcggcggcccccagcacggccggtgcaaggcctcgggttaagcggcggccgagcggggctcggcccggggtgctcggggagctcgccgcggcgggcagcaggaggaagcggcggcggcgcgtcccgagcggtgcgcgccatggcgggcgggccccccaaggccctgccgtccacggggccccactccctgcgcgacatgccgcacccgctggccggctccagcagcgaggaggccgtgggtggtgacagcacgcccagcccggacctgctgatggcccgcagcttcggtgacaaggatctcattttgcccaacggtggtactccagcaggtacttcaagtccagcttcttcatcttcccttctcaacagacttcagcttgatgatgatattgatggtgagactagagatctcttcgttatagttgatgatcccaagaagcatgtgtgtacaatggagacttacatcacctataggatcaccaccaaaagtactcgggtggagtttgacctgccagaatattctgttcgtcgaagataccaggattttgactggttgaggagcaaactggaagaatcccagcccactcatctcattccccctcttcccgagaagtttgtggtaaaaggtgttgtggatcgtttttcagaagagtttgtggagaccagaagaaaagctttggataaatttctaaaaagaattacggaccatcctgtgctgtctttcaatgaacactttaatattttccttactgctaaggacctgaacgcctacaagaagcaagggatagcattgctgaccagaatgggcgagtcagtcaagcacgtcactggcggctacaagctgaggactcggccgcttgagtttgctgccataggtgactacttagatacatttgcactcaaactgggaaccattgatcgaatagcccagcggatcatcaaagaagaaatagagtaccttgtggagctgagagaatacgggcctgtgtactccacatggagcgccttggagggtgagctggctgaacccctggagggtgtgtcagcttgcattgggaactgctctacagccttagaagagctgacagatgacatgacagaagacttcctacctgtgctcagggaatatattttatactctgactccatgaagagtgtattgaagaagagggaccaagttcaagcagagtatgaagccaaactggaagctgtggctctgcggaaggaagaccgccccaaggtaccggcggacgtcgagaaatgtcaggatcggatggagtgtttcaatgctgacctgaaagctgacatggagaggtggcagaacaacaagaggcaggacttccggcagctactcatggggatggctgacaagaacatccagtattatgagaagtgcctcatggcgtgggagtcgattattccactactgcaggagaaacaagaggccaagtaaagttctttcttgggacggagactcttctacctacacagggcctggcaccctataccggaatgtccctgcagtgccagagacgcagtgctgggaaaacaaccacagaaacatctctcctttgtgtatttttccctcccccacctttcaccccacagtggttttcaattagtatttattccatggtggagtctgtgaggctagaatatctctcagcaagagcagcatacctccatgttgtgaaggcatctgttcagtgaagcactacgaaaatttgaaaccaagggacaagacaacctgcagctgacgctctgacatttcatgacagtttcctctttagggacagctgagttgccagttgtgggagagaacccggggcctgcttttcaaggatgaggaggaggcaggaacagaaggcagctgctgctttctgtggaaacctggcccctctggaattggcctctgtgggcattgactcgtcttggcctaggaggcattggtgcctccctggcaagtccttaacgtacagtacctgtagctgtgagtgtggcctgctgcctgcttgtgatgagtgataccgtcttactgtttctgtttcacatagggacatttaaatcaatgtcaatgtgcgtccatgcttgagtgagcaagccagcgtccttgtcctcctgcaatgcctttgggaagctcaggggaatgctccccaagcttgtttctgacactagaatgcaacagattggaaactttttgtgtaaaatgaaaaaaacaaagtgctggttttttttttttttctgtgaaggtcttcagtgttttgcttgttcactgtcatcagagcagggattagacctgttagggaatatctattgtcttgaagtcagagtagctccccattgttgagatcagtgggcatataccaagctccacccccagtgtcagctttgtgcaatttgcctttacctcaccaaaaatacctactttaatatttcctcctgtgtcctctgaatgtctgggcgagcttttggtgagagggctggtatgtcatgttgttatgatacagtcgaaatttgtcaatgcagtgtgaatgttctacataaagtgctttaacccttaacatttcctggtcaggaaggaaaatcagtacctggacgggcctcgaaaatgacaaatgcaacagcgagccctttgtgtccagctaagctaaagtctcctcagtgtgcagccagattcctggggactgctgagtgtggttacaggctgcatttcagacaatgaccaggtttacttttcagatcacaaagcaaacagtcaccaaggatctgtcttccaactcttttttttttctgctgaaatgaagctacatgtcatgtttgtgttctttcatctgtggctcatccctgtaaaactacgaatctgagcctcaaataagcagtagtttttttgttgtttatttttaatgaaacagctgtgttaaggcgctgcttcagatgcaagttcacctggaaatactggtcagcgggcagcacgtcaaggtcacttaagcccacttttaactgcaggtcatcctcgcatcagccaaggctgtggtgctgttgatgccgcagttggacagcataggacggcttggttctgtttcattgtgtttgacaatgttgcagtttaaatgataatgtttaaatcaattggtacttgcctgtagtgttaaaccctatttgtgccattctcaagtcctttgatgtgaattttcagtttggtacagttagaaatgactcattgatgcggacaggtaagaacaacccatgtacccccgagtgattgcatgctttattctacctctaagccatcgtgttgacgtgggtatggacgcctgggtctgacctgacactgtgctgggagaatcaggatgtgtgtctaatggcgagctgacagccctctgctgatatttggcagaaggcaccagaccagcccagcagcaaatgctcatctttgggaacataggaagctttaccttggggaaggtatgctttacaaatgtccagtgtaatgaatgtttggaaaaaactggagttacaggaaaatgaaatctgactatctgctagttgccaaaacccagaaacattcctgtgtaatggttagttgggaaagaaggcagcacttgaaaaaatttaccaggttcctcactgggagatgtgggaaggggcgtgggacgcacgcggtcactccctctcctagtgagaggcagatggctggctctgaagggaggcaggcaccgtgggatttgggcttgctctgcttggtccccatgtgatgccctgtgctgtaagatatcagaaagacctggaacaaggcaaactttatgtcctcctggcatgttattgataacagagccaggaagtccagtgtacattacagattttctgggagaaatagtccttccagagaaaggattccttcccagcctccaggctggtgtctcatgaggtgaggaggctggcccagaaggaaggggacgttaggtggtgaagcaggctcccctgggcctctgagggccagcagtcccaaccatttgcctcttcgttttgaccaagcacaaaagagatattccctagaagtgtcacacggaggcttctgtgccaaagactgccttgtagaggtctcatcacctcacacttcttgacttcacaaaattgtggccctgagatcagtactcctctcttaagtatttattattattattatttactttacctcaagcagacagacataggttttgaggcttgaatacatggcagtggaatacaaggccctccctagcagccgccccaggcctggaaagtgggagatttcattcgcccgggttaaaaatccagaggaagacagaagagaggagtcctaggaactgagcagattttagagacgcaaatgatgtttaagagagccttgtgatttgtagcaagcatgggcactgctttttcttactaatgtggtagatctacacgaacattctaggctgttctgctcagagcgaggaaccactgctcctcaatggggagggaacataccacccagccaggcttagcattgggttttatcctttaataaaagttttataatgaatcctgttcaccttaaagtgtgattatggagatgattggctccatattccaccacgtcattccttcaactcaccagacacctttctttagttgaaataaaccagcatgacctggagatcatggtgactgtaagctaagtctgttttcatgccagatttcagccccacccagagtgtgctctagatgttgttgatttgaatggttttcccagttcccactccacatggggaagttgaatgaatgcacacctgctgctcacttcttgtgaggctgccttttgtgatcaaataacaggaagttctgctttagaggagggcacgatgaccatgtggcagtctgcaagtggaattttgggatggcagcccgaggaacatccagagttactgtgtgacttggtcctgccatcgttagctttgaaatcacaggcattgggctctgttttgacaccattcattggactgcgggacagtcattctttacgttctctcttgagctggtgagagaggaggaagagggaagtcaagagcaacctccaaggcctatgtcagcctcttctccttgggtcttggggtgggttagaactgggttccagtctggccagatgggttgctggctgcactgagggtgattcttctcagaagatgggctgcctgtggtcaggacagggcataccagtctggactccaccttcccagacacctactttaaggacctgtggaaactgggtgatccaattatagggctggggcaaccctgctttggccaccctcatttacaaacttaggttgggagcttgggtttcctgtctcacttccaaaagccttcaagatggcagcagatggacacaccctctcatttcttgtgtcttgtctgtcagatggcaggaggcctgtatcagtaaatttgaggaaaatgttctctcctgggccagcctcacagcttgcgttgggtgtgttggaattgttctcttcggccttgttctgccttgtgatcttttcaattcagtgaataaaccaggaatccattttttcaccaacccaccctgtagattgtcagctttttgtttgagagatgcctggtctcacagttacatgtatcagagtgtgtgtaagttgtctgtgttagaaaggttggggtgggggctttgttgcaggggattagactgttctttcttcatcataatttgagatacatcctgagtatgactgtctaaccctttctgtgtggcagaaaaatatgttttccaggtagtttttactactacagagagtctgtaaataagtgctttaaaaaaataacaaaccaataagatatttgtctcctatataaacattctgtgtatttagcacttgaaaatcaacaaatccagaatttaaaaaaatgccacagacttttcaaagcccaactctacttttttgagaatttgtccgtacctactaatatgccttattcttcttcacctagtgttttaaaagtcctgggtagaaagagttttagaaatgtaatcagttgttcagcttcaataatatagagatctaacatagtcagtcctcaggccccctaaagaaacaagcaagaaagtgagggccatcactagggttggctttggggaggggaaaactaaggactgcttttgccaaatgatatttttgataatgtaaggaaacacagggaccacaaaaccttttttttttttttaagtgtgaaagattagtgccttttggcatacttttgattttagaggatatagtatcggcattgacaaatcacgtagaaacaaagaatgctatagatgacaacagtattaaatgttactcctgattctgcagaacagcttttgaagatactggggggtatcttcaagcctcagagcagcttgtttcagatagaaattctctatgggttgaaatgccaaaaacagaaaacatgatgttgactcatgtaatttagtccattttagcagagcctttagtgttaacaccagtggcgaggagcattgcatattctctgtcagcagcagcactcccacaccaggtggttctgggctctctgtaggctggtcctagtaggtgacacccagcaacacccctgttggacaggattgattgttcgcagtcttagaccaacacttcagtcagaaatgttactgggaggaggaaaggaaaatcactttttttcctccatgtggaaatgaggagagaggaaagtggattgcaaaccaaaatgtgagtcagtgtgatgaagcagtggctctgtcatctcggcctttatccaataacaaaccagcatctcttaaaggcgcttttggcctagacacccctgaagtttggatgaagtctggtggattccctgtctgttgtatttctgtgtgcctgttcccttcattgctgtgagttgggagtgcattgagagatgatgtccatctgatatattcctgtgaaataaactgccagcaaactttctaacttgtattttaactgttaaagaagagattaaaaacttcggctttggacatgtccacattatggactgtcatcttatttttaaaagtcattctttacgtttaaaattttaaaataaaaaccttctgaggtattgatgtagtccaccgtgtaaatgttaccttctctccatgctgccattatgccaaaacaaaagctgtgataaaaaaagtgcttgagagagtgtgttgataagaaagtgatttatttacagatggaagtctttgtttcatgaagctaccaaactttaaaaagaatgtcacccttttttttgtttgttatggaaaccagagattgtaaaatggaaaaagaatcgtttttttgttgactttttgatgctggcacgaggtttttgtccacttttttcatatatctgtgtataaaaaaattgttgtttactatggaattagtattacattttgaggtaaacaaaagaatttgtattgcttgataaatattagcttgtaaatttaaagtttctttacttcaattaacttaaaggaccaataaacccataaaagatgctttcttta

SEQ ID NO: 185071 - DNA, 394 bp, Homo sapiens
  Payload ID: 16438
  Gene Symbol: SNX30
  Gene Name: sorting nexin family member 30
  ENST ID: ENST00000416585
  CDS Start-End: 1-374
tgtcagcttgcattgggaactgctctacagccttagaagagctgacagatgacatgacagaagacttcctacctgtgctcagggaatatattttatactctgactccatgaagagtgtattgaagaagagggaccaagttcaagcagagtatgaagccaaactggaagctgtggctctgcggaaggaagaccgccccaaggtaccggcggacgtcgagaaatgtcaggatcggatggagtgtttcaatgctgacctgaaagctgacatggagaggtggcagaacaacaagaggcaggacttccggcagctactcatggggatggctgacaagaacatccagtattatgagaagtccattgcagatctgaagtgatggcctagggagagagcagg

SEQ ID NO: 185072 - DNA, 3211 bp, Homo sapiens
  Payload ID: 16439
  Gene Symbol: SOWAHA
  Gene Name: sosondowah ankyrin repeat domain family member A
  Uniprot ID: Q2M3V2
  ENST ID: ENST00000378693
  CDS Start-End: 36-1685
acccgccccgggagccaggaacccagggccccaccatggcgctggccgccgccgccgccgctgcggctgccggggtgagccaggcggcggtgctgggcttcctgcaggagcacggcgggaaggtgcgcaactccgagctgctgagccgcttcaagccgctgctcgatgccggcgacccgcggggccgcgccgcccgcagggaccgcttcaagcagttcgtcaacaacgtggcggtggtgaaggagctcgacggcgtcaagttcgtggtgctgaggaagaagccccggcccccggagcccgagcccgcacccttcggccccccgggggcagcggcccagccgtcgaaacccacttcgacggtcttgccgcggagcgcctctgccccgggagctccgcccttggtccgggtgccgcggccagtggagccgccaggggacctgggtctgccaacagagccacaggacaccccgggggggccggcctccgagcccgctcagccgcccggggagcggtccgccgacccaccgcttccagcccttgagctagcccaggccaccgagagaccctccgcagacgcggccccaccgcctagggccccttctgaggcggcatcgccctgctctgatccgccagacgcggagcccgggcccggggcagcgaaagggccgccgcagcagaagccctgtatgctgccggtgcgctgcgtcccggcccccgccacgctccgcctccgggcggaggagcccggcctgcgccggcagctgtcggaggagccgagcccgcggagctcccctctgctgctgaggcggctctcggtggaagagtccggtctgggcctcggcctgggcccgggccgctccccgcacctgaggcgcctgtcgcgcgccggcccgcgtctgctgagccctgacgccgaggagttgcccgccgcgccgccgccgtccgcggtgcccctggagccgtccgagcacgagtggctcgtgcggactgccgggggccgctggacccaccagctgcacgggctgctgctgcgcgaccgcggcttggcggccaagcgcgacttcatgtctggcttcacggccctgcattgggccgccaagagcggcgacggcgagatggcgctgcagctggtggaggtcgcgcggcgcagtggcgcaccagtcgacgtgaacgcacgctcccacggcggctacacgccgctgcacctggctgcactgcacggccacgaggacgctgccgtgctgctggtggtgcgtctgggtgcccaggtgcacgtgcgtgatcacagcgggcgtcgcgcctaccagtacctgcggcccggctcctcgtacgcgctgcgccgccttcttggcgatccaggcctgcgaggcaccacggagccagatgcgaccggtggtggaagtggcagtcttgctgccaggcgccccgtacaggtggccgccaccatcctcagttccaccaccagtgcatttctgggcgtcctggctgacgacctcatgctccaggacctggcccgaggcttgaagaagtcgagctccttcagcaagttcttgagcgcctcgcccatggctccacgtaaaaagacaaagatccgcggtggtctgccagccttctcagaaatctctcgtcgacctactccggggcctttagctggtctagtgcccagtttgcctccaacaacctgaaggtccctggggctaccacctggttgatctatcgtggcctgctcgtcgcagtccaaacccgcccaagactgcagcccaatcaacgcctggagcctcattctgtttccagctttgtccagggcagcctgttttacccagatgggcctgcacctccagcttctttctgaagcatgacccatctccagagatgggatttgagaaatcagtgagagcttcctataaagaactccaggagacaggcctgaactctagagggaacttgaaatccagggtcaaaggttaaggggcagcagctggtctggcccctgaaagccttcacctgatgcctctgcagctacacaatcccaagacagagctagagcaagggtctctttaaatgttgaaagatgttaggttgtcagctttaagatatgtggtggttttgtaatttgatgcttttattctgtttttaaattgaaatgaggtaatgcaactttcgtaataaccttttggaattatatttttccacttttaggcaaagtgcttagacattttcaattttttttttgctaaatactttggaattctatttaaaaaatagatgatcaagatctaaaggaaattaatcccaaccaacaaacttaaaagtttatctacctcgttttaggcaatcaagattctggagagtcttgaacacagaataacgattgtgaccattatgaatgtaactaatttcagttgtactgtgaatgctaaatatttgcaaacaagtacatcttgaaagtaaaggtgacttagagaaaagagacattttgacagatacttttaatttgtggttgtctccatcatgaaatagaaacgtgtttggcacttgtgggtggctattttgatttggcatgactacttaattttttaaaaaaattgtggtttgtgaattgcacctttgtgccatgtttctgaatctggttttcaaatccagtggagcctttcagtgaaataggtgactattaaaaaagtaatagtattacagaaaaatgagcgattaaatagtaatggatacaattaaggagcaactattttatatgactgttctgtacaaacaaaaagtatgtaatacccattttaaaaaaccatttgaaagtagacaacttattccaaaatagcaaatgcagaatctctgctcagtgagcttggatgagtggcttaacttctctgggcctttgttcctatctgtaaatgagaaagtttgtagatattgccaagatttcccaggctcaatacagtgtaattattttatgttttaaagatatgaaatctgtttactcaaccaattttttaaatgtcatattgtgataatgctctgcttttgcaaattgtgtttgcatgtcattagttatatcaaatagttttgtggcatggggtagtggagcttccctccccacccccatatgtatcagtgaagcctttgaaattacttaaggcagtctttcatggaatgttttgattgagcaatgaaataaacagtcctccattttgtttctgcttga

SEQ ID NO: 185073 - DNA, 3220 bp, Homo sapiens
  Payload ID: 16440
  Gene Symbol: SOWAHB
  Gene Name: sosondowah ankyrin repeat domain family member B
  Uniprot ID: A6NEL2
  ENST ID: ENST00000334306
  CDS Start-End: 299-2680
gggaactttcgctgtgaggactcgttgcgagaggctagagtcgcgcaggggcggcctcggagccgccctctctcacgcagactgccgcggggactcagccttggggccacccggaggggacccacggccctcctggcgcgctcacgggctgcgggcagcgctggcctccgcggctgatgggggcggctagtgccgccccgggcgcaggtgacactcgcccggccagggtttcctctggctggggagagccccgggagggcgagactcagacacctctggggcggaggacaaggcagcgatggcccgagagctgagccaggaggcactactggactttctgtgccaggctgggggccgcgtgaccaacgctgccttgctgagccacttcaagagctttctccgagaccccgacgcgtcccccagccagcaccagcaccgccgcgagctcttcaagggcttcgtcaactcggtcgccgcagtgcgccaggaccccgacggcaccaagtacgtggtgctcaagaggagatacagggaccttttgggggaggaggggctgcagcgaccccgcgagccgcccgcggccgcccccagtgcagggggagctgcgccctgctccccgcgaggcgcgcgccggggggagccgccccagcagcagcccaggcggcggcggcgcgagaaggagccggaggaggagccagcaggtgcagcagccagagccgccgacgcagcttgcaatggactcccgggcagcgactcccgtagggcgcccgggaagggcggcggatcgaagggcagtcccggacagaggccgccggtgcccgcagctgcagcggcaggggcccaggcgagagcgagctgcgcggcggcgaagacgcagggccgctgctgctgggaatgcctccagaacaacctggctgtactgccgggagagctcggcgcactcccgcactcggccaccgcggaggagaagccggcacgggctctgcctgcccaggatgaccgcggggcttccagggagcgggaagaaggcgcgctagctgagccggcgcctgtgcctgcagtggctcactcgcctcccgccaccgtcgaggctgcgacaagcagggcttccccgcctgctctcctgcccggccccgctccccgcggagaccggccggagctgctgacccccagctccctgcattattcgaccctgcagcagcagcagcagcgcactcgagagtgggtggccaggcacccgcaggtgcccgaggcccgtgatcagggccctatccgcgcctggtcggtgctgccagacaacttcctccagctgcccttggaacccggctccacggagcctaattcagagccgccagacccctgtctttcctcgcactctctctttcctgttgttccggatgagtcctgggaatcctgggcggggaacccttcattgactgtctttcgcagcattcgttgtcagctgtccctccaagatctggatgactttgtggaccaggagagtgatggcagtgaggagagcagcagtgggcccaaagactccccgggggcttctgaagaggggctgcaggttgtcttgggaaccccagatagggggaagctcaggaatccagctgggggcctttctgtatctcggaaggagggcagccccagccggagccctcagggtctcagaaacagaggggatggtcacatctctcagcaggtccctgcaggggctaatggccttgcaggccaccccctgaagcctttgccttggccagttcctaagttaaggaggtccctcaggaggagctctctggcagggagagccaaattgtcctcctctgatgaggagtacctcgatgagggcttgctgaaaagaagtcggcgcccacctcgatccaggaagccctccaaggcaggaacggcacccagcccaagggttgatgcaggtttatcactaaaacttgcagaggttaaggctgttgtggccgagcggggttggcgacacagcctgtgggtccccagtggggaggggtctgcagccttggccccccacagaacttctgagcacaaatcatccctggttccactagatgccagggagcatgagtggattgtgaagcttgccagtggctcctggattcaggtgtggactttgttctgggaggaccctcaactggccttgcacaaagactttttgactgggtacactgcgttgcactggatagccaaacatggtgacctcagggcccttcaggacttggtgtctggagcaaagaaggcagggattgtccttgatgtaaacgtgaggtccagttgtggatataccccgctgcaccttgcagccattcacggccaccagggggtcatcaaattgctagtgcaaaggttggcttctcgggtaaatgtcagggacagcagtgggaagaagccatggcagtatctaaccagtaatacctctggggaaatatggcagctgttgggagctcctcggggcaagcccattttccctgtctatcccttagttggaagttcttcccctaccagaaaggccaagagcaaggaaatatctagaagtgtcacccgaaaaacttccttcgctgcactactcaaaagtcagcacaacaagtggaaactggccaaccagtatgagaaattccacagtccaagggaaagagaagagtatagtgactgaggtgggtctctctgtccaacatgcaggcagcactccctcatcctgctcagtgagagaattcagggggaatagaaaagctgctgagagttggtaaagaggatggtcgagtgagatggtgttgacctccctggatcttatgtcactacatcctggacctcaagagggtcatccaagctttttgaaagctgaactccttgactggagaaacctagacaagaggcggggccaggtgcttgatatctaggaggcattcttcctcttcccttgccaccatggagctgggcacagtaagccatattgtttcctgaagcaggagtcccaggccttggctagagagggaacagatgtctaacaaaaagagaagcaattcgaggaattgatgaagcacaattaaaatcctctctggctagtagctctctggcttctgttcatttgaagaataaatcttggctgacagtgggaagcaccaggtttgaaatcagatggctttatttttctttttttggcatttaaatcagtgaaataaaattattactggag

SEQ ID NO: 185074 - DNA, 4657 bp, Homo sapiens
  Payload ID: 16441
  Gene Symbol: SOWAHC
  Gene Name: sosondowah ankyrin repeat domain family member C
  Uniprot ID: Q53LP3
  ENST ID: ENST00000356454
  CDS Start-End: 157-1734
agtgaggcggtggccgagtcctctggcctcagacgcgtaggctggcagcccgctgagcccgccagactccgccgccgtcgggagccggccgctgggagcccgtcgctatgggaccgcgctgagccgcccgctggcgggggagcagcgcggtcgaggatggaggggccggcagagtggggccccgaggcggcgctgggccccgaggcggtgctgcgcttcctggcggagcgcgggggccgggccctgcacgccgagctggtgcagcacttcaggggcgccctaggcggcgaaccggagcagcgcgcccgcgcccgcgcgcacttcaaggagctggtgaacgccgtggccactgtgcgcgtcgatcccgccgacggcgccaagtacgtgcacctcaagaagaggttctgtgaagggccgtccgagccctccggggacccgccgcgaatccaggtgaccgccgagcccgaggcccccgacggccctgccgggcccgaggcgcgcgatcggctccccgacgcggcggccccggagtcgctccctggacagggccgcgagctgggcgagggagagccccccgcccccgcgcactggccgcccctgagcgccggggctcgcaggaagaactcgcggcgcgacgtgcagcccctaccgcggactccagccccggggcccagcgaggacctggagctcccgccacatggctgcgaggaggcggacaggggcagctcccttgtgggggctaccgcacagaggccggcccgccagaacctccgtgacctggtgatgggcagctccccgcagctgaagaggagcgtgtgtcccgggggcagcagcccgggcagctcctccgggggaggacgcggcagaggcgggggcgactcagacagcgcatcggtggcctcgtcgtccgcggaggaggagagcagcggcggaggctccgtgacgctggaccccctggagcacgcgtggatgctctctgcctccgatggcaagtgggacagcctggagggcttgctcacctgcgagcccggcctgctggtcaagcgggacttcattaccggcttcacttgcctgcactgggccgccaagcacggcaggcaggagcttctggccatgctagtcaacttcgccaacaaacaccagctgccggtgaacatcgacgccaggacgagcgggggttacaccgccctgcacttggcagccatgcacggccacgtggaggtggtgaagctgctggtgggggcctacgacgccgatgtggacatcagggactacagtgggaaaaaggcctcccagtacctgagtcggagcatcgccgaggagatcaagaacctggtgggagccctggacgagggtgacggggaaagcgccgcgggtagcggcggcgggcgctggaggctttcaaaggtgcttccctcgcatctcatcacctacaaactctcacacgccctagaagatggaggggaccatcaccaccatcaccactcggctgaggggtgggtcggaggcaaagccaaggatccagggcgcaaagcctcgggcagctctagtggacgtataaaacccagactcaacaaaatccgattcagaacccagatcgtccacaccacaccctctttcagggacccagagcagccgctggagggcaggggggaggagggagtgggggaggaacgacctgttaaaggccactcgcccttcacattgagaccaaagtccaatgtatttgggtaaaaattgcttcttttagaaaatgcaaaggtttatttgtcttaataaattgaatactaggtgttgtaaggaagtgagaccagaaggacaagctaaattatgcattcttacttgagggatcggaatggatggggcggagttctcttcaggctagccttctgggaaaagtggatgtctttttcagagattcatcataccttgacctgtacctcttctctgccctccacttccctgccctggagtccgtttctggagactagaaatgtatctaaattgggggaacagaatgaatgaattaatgaatgagagttcctttgctttaaccattcctggatgcctgcaaagtaaggaataatgcagtttttatgtatctgattttataaggggttactctttcaagagtaacaaaaaaatgcaaactgtaatgaaactacattgtatttctaagtgtgaaaacgacaggctgccccgtttttactaattgcatttgcattttaaggtactactgaaggtcagatcaaagttgaaatgcaaaaatactaattagagaataatgtgaataaaatgggaatcttcttggtattttatgtgtattgtaagtagcagttaaattatttttttaaaagcaatttcagttttaatcactgaacaaaagaaacaggcaacattcacttctgtagtatggtttccacctatctctaacaccactattaaggtacaccagtgttaaggtacattaataactacacaaaattttatttaaagagaacacttagcagcctatgatagttttcaataaaatgttgcctctctttcggattctcactaacttttgttactattctaaaagtttgaatttgctggggtgtttattctgaggattatttaaccattgttctatttggcataaccctatttaatggtgcttagagctgaattacctacagaaactgtttctggtttaaataattagcacaaattggcctaagtattcatgagcccatgtttctgtgaagtaattattaaaccaacttaatgattcttatgtaaggtacactttttattttaatacattggtagtctctatgacttgtagcaatgttttacaaatgtttaaaatgctaaacttaattttccaagcttttcttgacaattagatacctatcctgtagttactgaaaatctgggtagtaaatctacccaattaaaatggcactttataaaagggaatagagaagagatgggactatttctatatttaaatgctgctggctattcctttgtatataaatgaaaaataccattcattaaaattaagtactcgtttaagtatggttcttaattacatttcattcatttatattagagtaaatggcttcataactactttaaaatttaacccacaagcatattaaatctgtttgttataagattggaaacaatttttgagagggactaatttaaacaagtcctcctttagtcttttgggtcgcgtagttgctgaaacctaagtacctgcagcctacaggataaggaagttcacagcctgcggggtgaatgaacccatgtgtgaactgcacagagcaattcatagaaaatgcatagaaatttgtaacactttggtcacatctgtctctagatggtcattgaatttgtttaaagatggatgaaaggccaggcatggtggctcatgcctgtaatcccagcactttgggaggccgaggcaggtggatcacttgaggccaggagtttgaaaccagcctggccaacatggtgaaaacctgtctctactaaaaatacaaaaattagccgagcgtggtggtgcgtgcctgtagtcccagctacttaggaggctgaggcatgagaatcacttaaacctgagaggtggaggttgcagttgagccaagatcacgacactgcactccagcctgggcaacggagactctgtctcaaaaaaaaaaaaaaaaaagatgaatgaaaatatgaaatatataaactagtatccatttatttgcatttattgtgggatttcagatatgaacggtgtaaatttgagaagcacttatgcatacatgtgggtgaaaaaccaatctaattttgtataaataaaaacaggctcctggaaggtgaaaagtagtcatttgttctaaatctatacatattacttgtatctagtgcagaataagctataacatcccattgaggaatcttaaatttcatagacatgtaaagctgaagtaactctaaagagcagatgcttcagaaccatcagaaggttctggtcaacagtcagtattatctcttaaatgtatatgttggtcactaattgcacaaaatctataatttgccagggctttagagattgagtcaatatgtcatttaccatggttttcccactgaaggctttaacttttctgataaaataatattttaaattttcaaaaacccattcctgaggagaactacttctagcattccttttcatgatgtgcttttgtgcagtaagtagcattttcggctacttaactttacattcctcttatttttcagtttccagtcaagattataaaaagcaaatgattgatataatttgatattcatagagttgtgcctacctttaatggaaaaatacatgtcagatacttagatgtttattgatatgagactatgtggttaaaaaacccaagtatgtccatgtgtttcttataaggtacacttgaaactagtgagtgtttgtcacatttcactttcatggtatataaaatgcagtttgcatatataacttgaatatctggtactagttttttcacgcctgcaatcttggagtctaggttgccttgtctctcctatttttaaataagtgaaatttgggagattgtaaaatctgtaaagtttgttttgtgaaaataaaatgttcacagtagaa

SEQ ID NO: 185075 - DNA, 1552 bp, Homo sapiens
  Payload ID: 16442
  Gene Symbol: SOWAHD
  Gene Name: sosondowah ankyrin repeat domain family member D
  Uniprot ID: A6NJG2
  ENST ID: ENST00000343905
  CDS Start-End: 56-1003
gggaagggcagctaacgctggacactgggacggccgcggcggcagcttcaagaccatggcccagctcggaggggccgcgaaccgggcacccacggcctctctcgcgccgacctcgcagagcctgcggtgcgccccgcagccccgcccctcgagagcggacactggtagcctgggcaggtactggggcaaagccgcagccgccgcctcccgggagcaccccttcccaggcacgctgatgcactctgcagcgggctcagggcgccggcggggagcgctgcgggaactgctggggctgcagcgggcggctcctgcggggtggctgtcggaggagcgcgccgaggagctgggcgggccgagtgggccgggcagcagcaggctgtgcctggaaccgcgggagcacgcgtggattctggcagccgccgagggccgctatgaggtgctgcgggagctgctggaggctgagccggagctgctgctgcggggcgacccgatcaccggctactcggttctgcactggctggccaagcacgggcgccacgaggagctcattctggtacacgatttcgccctacgccgggggctgaggctcgacgtgagcgccccaggcagcggcggcctcacgcccctccacctggcggcccttcagggccacgacatggtcatcaaggtgctggtgggcgccctgggtgctgacgctacgcgccgcgaccacagcggccaccgggcctgccactacctgcggcccgacgcgccttggaggttgcgggagctgtcgggagccgaggaatgggagatggagagcggcagcgggtgcaccaacctgaacaacaacagcagtggcaccactgcgtggagggccgcgagcgcagtgggcgcgacggctgtggagacaagcaggagagtggcagcgtcgcggaccaaggcgaaggacaccgcgggcagccgggtggcgcaaatgcatagccttttccgccatctgttcccctcattccaggaccgttgacagggacagagactggagagctaggaggggctgtgacactgtggcgatggctaggtcctgggttgtcccgggttccaccgaaggagaggcgccttggacgctgcttgggcctgcaaggaacagaacacgtcggggtccgactcaggtacttgtctcaggtctcctgtaaccaccggcctggaggacccggggactcgggcaccacctcaccaagagagagtgaaggaccaagctggcctggctccgagttccaaagctacaggactaaggagttgggagcagggagcgtggtcctgcttgggagagggcaagttaagcttccaggggccatttctgggcaggccgacgcgctgggtttattaggaaacattcgctagaagaatgagttaagattgtaaaccaccaatgcagagaaaacgcctaactctgccggcctcgctcggccattaatgggtcttggggtgcgggtagagtcagcctctgacaacctcctcctgagacgacccagccttactggtactttttctcatgtatcacaggttacttctt

SEQ ID NO: 185076 - DNA, 2846 bp, Homo sapiens
  Payload ID: 16443
  Gene Symbol: SP1
  Gene Name: Sp1 transcription factor
  Uniprot ID: P08047
  ENST ID: ENST00000327443
  CDS Start-End: 99-2456
ggtccgggttcgcttgcctcgtcagcgtccgcgtttttcccggccccccccaacccccccggacaggacccccttgagcttgtccctcagctgccaccatgagcgaccaagatcactccatggatgaaatgacagctgtggtgaaaattgaaaaaggagttggtggcaataatgggggcaatggtaatggtggtggtgccttttcacaggctcgaagtagcagcacaggcagtagcagcagcactggaggaggagggcaggagtcccagccatcccctttggctctgctggcagcaacttgcagcagaattgagtcacccaatgagaacagcaacaactcccagggcccgagtcagtcagggggaacaggtgagcttgacctcacagccacacaactttcacagggtgccaatggctggcagatcatctcttcctcctctggggctacccctacctcaaaggaacagagtggcagcagtaccaatggcagcaatggcagtgagtcttccaagaatcgcacagtctctggtgggcagtatgttgtggctgccgctcccaacttacagaaccagcaagttctgacaggactacctggagtgatgcctaatattcagtatcaagtaatcccacagttccagaccgttgatgggcaacagctgcagtttgctgccactggggcccaagtgcagcaggatggttctggtcaaatacagatcataccaggtgcaaaccaacagattatcacaaatcgaggaagtggaggcaacatcattgctgctatgccaaacctactccagcaggctgtccccctccaaggcctggctaataatgtactctcaggacagactcagtatgtgaccaatgtaccagtggccctgaatgggaacatcaccttgctacctgtcaacagcgtttctgcagctaccttgactcccagctctcaggcagtcacgatcagcagctctgggtcccaggagagtggctcacagcctgtcacctcagggactaccatcagttctgccagcttggtatcatcacaagccagttccagctcctttttcaccaatgccaatagctactcaactactactaccaccagcaacatgggaattatgaactttactaccagtggatcatcagggaccaactctcaaggccagacaccccagagggtcagtgggctacaggggtctgatgctctgaacatccagcaaaaccagacatctggaggctcattgcaagcaggccagcaaaaagaaggagagcaaaaccagcagacacagcagcaacaaattcttatccagcctcagctagttcaagggggacaggccctccaggccctccaagcagcaccattgtcagggcagacctttacaactcaagccatctcccaggaaaccctccagaacctccagcttcaggctgttccaaactctggtcccatcatcatccggacaccaacagtggggcccaatggacaggtcagttggcagactctacagctgcagaacctccaagttcagaacccacaagcccaaacaatcaccttagccccaatgcagggtgtttccttggggcagaccagcagcagcaacaccactctcacacccattgcctcagctgcttccattcctgctggcacagtcactgtgaatgctgctcaactctcctccatgccaggcctccagaccattaacctcagtgcattgggtacttcaggaatccaggtgcacccaattcaaggcctgccgttggctatagcaaatgccccaggtgatcatggagctcagcttggtctccatggggctggtggtgatggaatacatgatgacacagcaggtggagaggaaggagaaaacagcccagatgcccaaccccaagccggtcggaggacccggcgggaagcatgcacctgcccctactgtaaagacagtgaaggaaggggctcgggggatcctggcaaaaagaaacagcatatttgccacatccaaggctgtgggaaagtgtatggcaagacctctcacctgcgggcacacttgcgctggcatacaggcgagaggccatttatgtgtacctggtcatactgtgggaaacgcttcacacgttcggatgagctacagaggcacaaacgtacacacacaggtgagaagaaatttgcctgccctgagtgtcctaagcgcttcatgaggagtgaccacctgtcaaaacatatcaagacccaccagaataagaagggaggcccaggtgtagctctgagtgtgggcactttgcccctggacagtggggcaggttcagaaggcagtggcactgccactccttcagcccttattaccaccaatatggtagccatggaggccatctgtccagagggcattgcccgtcttgccaacagtggcatcaacgtcatgcaggtggcagatctgcagtccattaatatcagtggcaatggcttctgagatcaggcacccggggccagagacatatgggccataccccttaaccccgggatgcaaggtagcatgggtccaagagacatggaagagagagccatgaagcattaaaatgcatggtgttgagaagaatcaggagagggatacaagagaggagatggggtcccggcacccatctgtatcatcagtgcctctttgaaggtgggaaacattagtgaaaattctgttggtgccacgctttgatgagcatttgtttgaccccagtttcttcttacacttcttaccccagcctacccttcctgcatttctcttctcagctcttccatgatggattcccccccctttcctaaagccatcatgccttgataaatatatatgatcattgaaatacttttt

SEQ ID NO: 185077 - DNA, 7603 bp, Homo sapiens
  Payload ID: 16443
  Gene Symbol: SP1
  Gene Name: Sp1 transcription factor
  Uniprot ID: P08047
  ENST ID: ENST00000426431
  CDS Start-End: 61-2397
agcgaaggccccgcccgggccaaccgcctgcctggtccgccctctgaccaagatcactccatggatgaaatgacagctgtggtgaaaattgaaaaaggagttggtggcaataatgggggcaatggtaatggtggtggtgccttttcacaggctcgaagtagcagcacaggcagtagcagcagcactggaggaggagggcaggagtcccagccatcccctttggctctgctggcagcaacttgcagcagaattgagtcacccaatgagaacagcaacaactcccagggcccgagtcagtcagggggaacaggtgagcttgacctcacagccacacaactttcacagggtgccaatggctggcagatcatctcttcctcctctggggctacccctacctcaaaggaacagagtggcagcagtaccaatggcagcaatggcagtgagtcttccaagaatcgcacagtctctggtgggcagtatgttgtggctgccgctcccaacttacagaaccagcaagttctgacaggactacctggagtgatgcctaatattcagtatcaagtaatcccacagttccagaccgttgatgggcaacagctgcagtttgctgccactggggcccaagtgcagcaggatggttctggtcaaatacagatcataccaggtgcaaaccaacagattatcacaaatcgaggaagtggaggcaacatcattgctgctatgccaaacctactccagcaggctgtccccctccaaggcctggctaataatgtactctcaggacagactcagtatgtgaccaatgtaccagtggccctgaatgggaacatcaccttgctacctgtcaacagcgtttctgcagctaccttgactcccagctctcaggcagtcacgatcagcagctctgggtcccaggagagtggctcacagcctgtcacctcagggactaccatcagttctgccagcttggtatcatcacaagccagttccagctcctttttcaccaatgccaatagctactcaactactactaccaccagcaacatgggaattatgaactttactaccagtggatcatcagggaccaactctcaaggccagacaccccagagggtcagtgggctacaggggtctgatgctctgaacatccagcaaaaccagacatctggaggctcattgcaagcaggccagcaaaaagaaggagagcaaaaccagcagacacagcagcaacaaattcttatccagcctcagctagttcaagggggacaggccctccaggccctccaagcagcaccattgtcagggcagacctttacaactcaagccatctcccaggaaaccctccagaacctccagcttcaggctgttccaaactctggtcccatcatcatccggacaccaacagtggggcccaatggacaggtcagttggcagactctacagctgcagaacctccaagttcagaacccacaagcccaaacaatcaccttagccccaatgcagggtgtttccttggggcagaccagcagcagcaacaccactctcacacccattgcctcagctgcttccattcctgctggcacagtcactgtgaatgctgctcaactctcctccatgccaggcctccagaccattaacctcagtgcattgggtacttcaggaatccaggtgcacccaattcaaggcctgccgttggctatagcaaatgccccaggtgatcatggagctcagcttggtctccatggggctggtggtgatggaatacatgatgacacagcaggtggagaggaaggagaaaacagcccagatgcccaaccccaagccggtcggaggacccggcgggaagcatgcacctgcccctactgtaaagacagtgaaggaaggggctcgggggatcctggcaaaaagaaacagcatatttgccacatccaaggctgtgggaaagtgtatggcaagacctctcacctgcgggcacacttgcgctggcatacaggcgagaggccatttatgtgtacctggtcatactgtgggaaacgcttcacacgttcggatgagctacagaggcacaaacgtacacacacaggtgagaagaaatttgcctgccctgagtgtcctaagcgcttcatgaggagtgaccacctgtcaaaacatatcaagacccaccagaataagaagggaggcccaggtgtagctctgagtgtgggcactttgcccctggacagtggggcaggttcagaaggcagtggcactgccactccttcagcccttattaccaccaatatggtagccatggaggccatctgtccagagggcattgcccgtcttgccaacagtggcatcaacgtcatgcaggtggcagatctgcagtccattaatatcagtggcaatggcttctgagatcaggcacccggggccagagacatatgggccataccccttaaccccgggatgcaaggtagcatgggtccaagagacatggaagagagagccatgaagcattaaaatgcatggtgttgagaagaatcaggagagggatacaagagaggagatggggtcccggcacccatctgtatcatcagtgcctctttgaaggtgggaaacattagtgaaaattctgttggtgccacgctttgatgagcatttgtttgaccccagtttcttcttacacttcttaccccagcctacccttcctgcatttctcttctcagctcttccatgatggattcccccccctttcctaaagccatcatgccttgataaatatatatgatcattgaaatactttttaacaaaaaacagattctatattattatatatatatatatatatataaagatatatagagatgcattcacaggggttggctgggaggaggaagaccattctgtgaccaaaataccttggtcattttttttatattgccttatttccctatggctgagccttgttgtgacacatcaagcttttctgtagatgttgtcttggcttcccaccagcttaagcgttcatatgctctgcttttagttcatatatacatacataatgtttttcctttcttaattttgtctttttgtttgggatcagcttcttgcactccttccctaactcaactgttgccgtctcatcttctctcatctgatcacttcatgttttgtttttgttactgcctggatgaggcacttctgtcaattttttcaggaccttagttccagcagcagaatggaaaaatccttgaagcccaggctgatgcttgaagtaactgtggagggagtgttcaaaatactactgacgcaggcaccttcttggcgctggagagtcaaaggcatctcccttcattagctgctctgagcatcaagaattagaagtctttcagtggaattgtacaagagtccctttgaagataataatcttggctcagtttgtataaactgtcaaattttcaaataataggtagggggctttcactaggaaaatcatgtgctcagaagaggaaatgactcgtagtcaggttcaggagttagtggagtatttggactttggtactgctgtcttccaaggtagctctaagttttgatgtgtgggcttctgagtttatattctgaaaggaaatacacttcttttgaacatccccactaggttcttttccattgtcaataaggagcatcagccagtgaatctgtttcaggtttccattctgcagaactcctccaaagcatgtgctagtggcaagacagtggttcttatgatgttttcccttaacttttccttgtatgttcttgggtggttcctaagggaaagggaagcacatgatcatgggaatgatagcccagaacaaaaagaaatcttgtcttaccacagtgttttataggagagattgggagaaatcatcctgttttctctgtgacctgatttcagaagagactgatccaaaaattataacggcagggaacctagtgcatttggcactgagatttaaatgcaaccagaattgtcctcaaggcccagccataaaagcattgtctctctcgaccttctggtatcttgttagagagcttttcactgtgaggaagtgtggaaaaatagctctgtgtgtgtgtgtgtgtgtgtgtgtgtgtgtgtgtgtaatctgttaggttggggataggttttctgctagccaatattaaaagagacctgcaataaaaaaattaccctgatctgatagaaagcaagtgtttttgtatgtgtgggtgaatgtgtgttcatgcccgtatatgtctacacacagatgacaaattatatttgaaatcgttggaaaataaattcagatcaaaatgcctttcaggcccattacctagaaatctatcttaaaacctgggtatgttcctaaggtcatttctttgcttatgctaaattaattacaattatgaatggaggatattctactgtacttttttaaaaagaaactatttttgtgtttgaaagtgaaaccaacatccagatctatagcagagtccttattcttctcataaatctttttactttggctacaaatagatgatggtatgattctattatatattttatataaaatccatccaaattaagttttgggtaagtgtgttgtttaatctgaactatagtaacttaatactctaaacaatagttcactccatttggtcctttctccacagatgtaattatgttttcaactcaggaactatggcaaggaactttccccagatcaaattctattaacgctgagatacaagtcatccatgcacagccactatcataccctttattctcactgaaaggcagaactcagaacctgttattttatgtctgtaatcatgtactttggcatcttttggaggaaaggggcaggataactcactggaatgtacagtattttgctagtgcatttcaaggaatggaatcttctccagtatgaaattaccagatataaaataatgtaatgatgctgaggatataagcttttagaaggtaatttgatggtatttctttctcgaatgaaaagctgctggtttaccctcaaccctattcattagcattaccatgagtgaatttatatctaattatttccacttgccctgttctcttcacaccaaggaagctccagatccagtatcttgtttggcctcaaaacagaagcagcttcttttgtctcccagcagtagtgagccactcagtctcttccacaggaagtttggagcctacattccttgagtcaggagcttattacagaaaaaccccgtttccctgaacttttggctaacagaaattaatttaactgacatgcatattgattctgaaatttttttcctaagtttttttcatttttttgaatgagttttttaaattttttagatgaccaaaacttgcagggcaggggatgcccagaagagtggtgagatagtaaaacacttattccctcatcctttcaggttttcaggttgcccatttatattcatttacatgtcatttgactgtctcactttttacccagaacagtaacaacccacaccgtcttccttcagggatttccaactggcactctgtgggtgctacacagaatgcaatttaatggatatttctcagcctggttcagaataaattgatcctttgatcccagaaagtatatactgaagtgtgggataaagattatgattaggggagggttggagacaaaagctgtaaattactatggctgatttatttctactatatacatatatattttttgcttttgtatatcctatataggaaactaagcattgtattttttttaacaaatctaaaaaagcactatgaactacaggtgtttgactttcaaaatatattttgtattgttaatatcttcacattgtgtgaatactggaagctgcagatctttgctaggacgcaataaatttatatactttttgaggggttcttctggggtgctaatcaggcccctgttatgcttagggggagccctggtgctacttgcttgaagttttcagtgtaagtaccctgatgccttttggaccttgggatcagatcaagagttttggagatcaggtaccaaggaaataaggacagtctagctgcctcaagtgaggggccctttgcatagctctccttccccctcactgaagctgggtagcctattggggttgagagggaaaatgtgaaatctcagaatttatctcccttagaagagagccagtaacttatgtacaaggatgaaagaaaggtcgcagcagtagctttggggaaagggaggaagatatggcacttctccaaccccggaaaacattgcttttgaaaactgctgataaaatatgagccggttattacttctgtttgggagactgtgctctctgtggtgcctctcttggctctactccacagataccagacctcttctaagaggatgagcagaccagctttgaggttgacctgtttctctttgtctgccttcccaaaacaccagcccccaggaagacattaagcagccttaagcttaaattcctactccctcttccaaatttggctcacttgccttagatccaaggcagggaaaggaaaagaaggggggtctctggctttattactcccctaagtctttactctgacttccccaaacccagaaagattttctccacagtgttcatttgaaagaggagtattttgtcccattttccccttcctcattatcaaacagccccagtcttccttgtctctgctaagaaagtagaggcatgatgatctgcctctcaactgccctaagtcctagctaagtatcaggggaaaaaaaaaaaaaaaaagcctaacaaatgggattagactagggctgcaagtagtgaggattttgttgatacctctgctgggatgtgtgctttcccatatcttgccttcaggaattacactgtgccttttccccagggatatgggctctgtctacccagtgctccagtttcccggtaactgctcttgaacattgtggacaagggcaggtcttcatatttttgatcatccctttctcccagtgaaatcccatagcccttacctagagtctagggcacaaagacttcggggaagatacactgagattgacctgaggagacatctacacacaccagtggcagctgccccagggcctgcttccccttcctaagtctgtcatcctctggaagggatgggtggtgctccaatctctggtgcctaaaaacccaagtttatttctctcttaacactggcaataaccagtccacaccactgttgccttttaaaacctcttaataatctcatgctgtgtttgttttgattccaatccaattatcaccagggctgtgtgggtaaatgcttttaaatgctctctcatcttgttcttccccctcaccccccactcttaggtatgtatgatgctaatcttgtccctaagtaagtttcttcctgctccttttgtatcttcctttcttgtctttcctcctaccttttgtctcttggtgttttgggacttttttttttttttttttggccttttgtacaaagattagtttcaatgtagtctgtagcctcctttgtaaaccaattaaaaagttttttaataaaaaa

SEQ ID NO: 185078 - DNA, 602 bp, Homo sapiens
  Payload ID: 16443
  Gene Symbol: SP1
  Gene Name: Sp1 transcription factor
  ENST ID: ENST00000551969
  CDS Start-End: 117-602
acccccccctccctgtccggtccgggttcgcttgcctcgtcagcgtccgcgtttttcccggccccccccaacccccccggacaggacccccttgagcttgtccctcagctgccaccatgagcgaccaagatcactccatggatgaaatgacagctgtggtgaaaattgaaaaaggagttggtggcaataatgggggcaatggtaatggtggtggtgccttttcacaggctcgaagtagcagcacaggcagtagcagcagcactggaggaggagggcagggtgccaatggctggcagatcatctcttcctcctctggggctacccctacctcaaaggaacagagtggcagcagtaccaatggcagcaatggcagtgagtcttccaagaatcgcacagtctctggtgggcagtatgttgtggctgccgctcccaacttacagaaccagcaagttctgacaggactacctggagtgatgcctaatattcagtatcaagtaatcccacagttccagaccgttgatgggcaacagctgcagtttgctgccactggggcccaagtgcagcaggatggttctggtcaaatacagatcataccaggtgca

SEQ ID NO: 185079 - DNA, 1061 bp, Homo sapiens
  Payload ID: 16443
  Gene Symbol: SP1
  Gene Name: Sp1 transcription factor
  ENST ID: ENST00000548560
  CDS Start-End: 372-1061
gttgttttatgccttacctgtccttttcctttttttcccttaggatactttttcttatttagaaactctcaccatgcctaccgtccttcacatttcctatccccaaagcactttttgaatgttttcttagtttaattttgtacaagggagaattaaggcccacttttggcacattgaacctagttcatgtcctgcatgccctgcagctcccctctgccctccaatccattttctttatactggtggctttcgccttcctgttagtcattgctatttcatcatagcctccttttatccttcctacttcatttcttttcttccctcaagtttacgttgtttgttttttaattattttagaccaagatcactccatggatgaaatgacagctgtggtgaaaattgaaaaaggagttggtggcaataatgggggcaatggtaatggtggtggtgccttttcacaggctcgaagtagcagcacaggcagtagcagcagcactggaggaggagggcaggagtcccagccatcccctttggctctgctggcagcaacttgcagcagaattgagtcacccaatgagaacagcaacaactcccagggcccgagtcagtcagggggaacaggtgagcttgacctcacagccacacaactttcacagggtgccaatggctggcagatcatctcttcctcctctggggctacccctacctcaaaggaacagagtggcagcagtaccaatggcagcaatggcagtgagtcttccaagaatcgcacagtctctggtgggcagtatgttgtggctgccgctcccaacttacagaaccagcaagttctgacaggactacctggagtgatgcctaatattcagtatcaagtaatcccacagttccagaccgttgatgggcaacagctgcagtttgctgccactggggcccaagtgcagcaggatggttctggtcaaatacagatcataccaggtgcaaaccaacagattatcacaaatcgaggaagtggaggcaacatcattgctgctatgccaaacctactccagcaggctgtcccc

SEQ ID NO: 185080 - DNA, 3882 bp, Homo sapiens
  Payload ID: 16444
  Gene Symbol: SP100
  Gene Name: SP100 nuclear antigen
  Uniprot ID: P23497
  ENST ID: ENST00000264052
  CDS Start-End: 356-2995
gtattgcacaaacaagtggacacccgggagctggccctgctcgtcccctgggccctccttccctggtcctgcaggtcttgctgcttgtcaggcctctcctccaaccctctgccacatttcagaaaagctgagaatcccttggagtgaaaaaggaggagaaacacagtgtccgtagcccagaaggaggttaaatactttcacttctcttttccccatttgggcggagccctttctgagtcagtctgtcggccgacttcctgcttggggcctgggcagccacactgcacgcaggctgggccgactgaggggctcagaggccaggctctgaggcccacgcagggcctagggtgggaagatggcaggtgggggcggcgacctgagcaccaggaggctgaatgaatgtatttcaccagtagcaaatgagatgaaccatcttcctgcacacagccacgatttgcaaaggatgttcacggaagaccagggtgtagatgacaggctgctctatgacattgtattcaagcacttcaaaagaaataaggtggagatttcaaatgcaataaaaaagacatttccattcctcgagggcctccgtgatcgtgatctcatcacaaataaaatgtttgaagattctcaagattcttgtagaaacctggtccctgtacagagagtggtgtacaatgttcttagtgaactggagaagacatttaacctgccagttctggaagcactgttcagcgatgtcaacatgcaggaataccccgatttaattcacatttataaaggctttgaaaatgtaatccatgacaaattgcctctccaagaaagtgaagaagaagagagggaggagaggtctggcctccaactaagtcttgaacaaggaactggtgaaaactcttttcgaagcctgacttggccaccttcgggttccccatctcatgctggtacaaccccacctgaaaatggactctcagagcacccctgtgaaacagaacagataaatgcaaagagaaaagatacaaccagtgacaaagatgattcgctaggaagccaacaaacaaatgaacaatgtgctcaaaaggctgagccaacagagtcctgcgaacaaattgctgtccaagtgaataatggggatgctggaagggagatgccctgcccgttgccctgtgatgaagaaagcccagaggcagagctacacaaccatggaatccaaattaattcctgttctgtgcgactggtggatataaaaaaggaaaagccattttctaattcaaaagttgagtgccaagcccaagcaagaactcatcataaccaggcatctgacataatagtcatcagcagtgaggactctgaaggatccactgacgttgatgagcccttagaagtcttcatctcagcaccgagaagtgagcctgtgatcaataatgacaaccctttagaatcaaatgatgaaaaggagggccaagaagccacttgctcacgaccccagattgtaccagagcccatggatttcagaaaattatctacattcagagaaagttttaagaaaagagtgataggacaagaccacgacttttcagaatccagtgaggaggaggcgcccgcagaagcctcgagcggggcactgagaagcaagcatggtgagaaggctcctatgacttctagaagtacatctacttggagaatacccagcaggaagagacgtttcagcagtagtgacttttcagacctgagtaatggagaagagcttcaggaaacctgcagctcatccctaagaagagggtcaggatcacagccacaagaacctgaaaataagaagtgctcctgtgtcatgtgttttccaaaaggtgtgccaagaagccaagaagcaaggactgaaagtagtcaagcatctgacatgatggataccatggatgttgaaaacaattctactttggaaaaacacagtgggaaaagaagaaaaaagagaaggcatagatctaaagtaaatggtctccaaagagggagaaagaaagacagacctagaaaacatttaactctgaataacaaagtccaaaagaaaagatggcaacaaagaggaagaaaagccaacactagacctttgaaaagaagaagaaaaagaggtccaagaattcccaaagatgaaaatattaattttaaacaatctgaacttcctgtgacctgtggtgaggtgaagggcactctatataaggagcgattcaaacaaggaacctcaaagaagtgtatacagagtgaggataaaaagtggttcactcccagggaatttgaaattgaaggagaccgcggagcatccaagaactggaagctaagtatacgctgcggtggatataccctgaaagtcctgatggagaacaaatttctgccagaaccaccaagcacaagaaaaaagagaatactggaatctcacaacaataccttagttgacccttgtgaggagcataagaagaagaacccagatgcttcagtcaagttctcagagtttttaaagaagtgctcagagacatggaagaccatttttgctaaagagaaaggaaaatttgaagatatggcaaaggcggacaaggcccattatgaaagagaaatgaaaacctatatccctcctaaaggggagaaaaaaaagaagttcaaggatcccaatgcacccaagaggcctcctttggcctttttcctgttctgctctgagtatcgcccaaaaatcaaaggagaacatcctggcctgtccattgatgatgttgtgaagaaactggcagggatgtggaataacaccgctgcagctgacaagcagttttatgaaaagaaggctgcaaagctgaaggaaaaatacaaaaaggatattgctgcatatcgagctaaaggaaagcctaattcagcaaaaaagagagttgtcaaggctgaaaaaagcaagaaaaagaaggaagaggaagaagatgaagaggatgaacaagaggaggaaaatgaagaagatgatgataaataagttgcttctagtgcagtttttttcttgtctataaagcatttaagctgcctgtacacaactcactccttttaaagaaaaaaacttcaacgtaagactgtgtaagatttgtttttaaaccgtacactgtgtttttttgtatagttaaccactaccgaatgtgtcttcagatagccctgtcctggtggtatttagccactaacctttgcctggtacagtatgggggttgtaaattggcatggaaatttaaagcaggttcttgttagtgcacagcacaaattagttgtatatgaggatggtagttttttcaccttcagttgtctctgatgtagcttatacaaaacatttgttgttctgttaactgaatgccactctgtaattgcaaaaaaaaaaaacagttgcagctgttttgttgacattctgaatgcttctaagtaaatacaatttttaaaaaaccgtatgagggaactgtgtagacaaggtaccaggtcagtcttcttccatgtctattagctccacaaagccaatctcaatccctcaaaacaatcttgtcatacttgaaaatatgacactctagtcaaagccttggtaaaataatcagtgtttccaatctgtcctgttacaaaagaaacagattattattgaacttatgcaaataaccattgtcataagaatgtttatgaatagtttccaaattatggcaaattcatgtagagagagaaaagtaactgttttggttttgctcacaaaagtctactttacctaagggctgtcagatataagtaacttaaaagaaagagaagttttcttgacttttgaaaacaaaatatgaaaagaatcggcaatgtttcaaacaaaaagtcataaaagtcactttattcctccatcaa

SEQ ID NO: 185081 - DNA, 2926 bp, Homo sapiens
  Payload ID: 16444
  Gene Symbol: SP100
  Gene Name: SP100 nuclear antigen
  Uniprot ID: P23497
  ENST ID: ENST00000340126
  CDS Start-End: 32-2689
ctgaggcccacgcagggcctagggtgggaagatggcaggtgggggcggcgacctgagcaccaggaggctgaatgaatgtatttcaccagtagcaaatgagatgaaccatcttcctgcacacagccacgatttgcaaaggatgttcacggaagaccagggtgtagatgacaggctgctctatgacattgtattcaagcacttcaaaagaaataaggtggagatttcaaatgcaataaaaaagacatttccattcctcgagggcctccgtgatcgtgatctcatcacaaataaaatgtttgaagattctcaagattcttgtagaaacctggtccctgtacagagagtggtgtacaatgttcttagtgaactggagaagacatttaacctgccagttctggaagcactgttcagcgatgtcaacatgcaggaataccccgatttaattcacatttataaaggctttgaaaatgtaatccatgacaaattgcctctccaagaaagtgaagaagaagagagggaggagaggtctggcctccaactaagtcttgaacaaggaactggtgaaaactcttttcgaagcctgacttggccaccttcgggttccccatctcatgctggtacaaccccacctgaaaatggactctcagagcacccctgtgaaacagaacagataaatgcaaagagaaaagatacaaccagtgacaaagatgattcgctaggaagccaacaaacaaatgaacaatgtgctcaaaaggctgagccaacagagtcctgcgaacaaattgctgtccaagtgaataatggggatgctggaagggagatgccctgcccgttgccctgtgatgaagaaagcccagaggcagagctacacaaccatggaatccaaattaattcctgttctgtgcgactggtggatataaaaaaggaaaagccattttctaattcaaaagttgagtgccaagcccaagcaagaactcatcataaccaggcatctgacataatagtcatcagcagtgaggactctgaaggatccactgacgttgatgagcccttagaagtcttcatctcagcaccgagaagtgagcctgtgatcaataatgacaaccctttagaatcaaatgatgaaaaggagggccaagaagccacttgctcacgaccccagattgtaccagagcccatggatttcagaaaattatctacattcagagaaagttttaagaaaagagtgataggacaagaccacgacttttcagaatccagtgaggaggaggcgcccgcagaagcctcgagcggggcactgagaagcaagcatggtgagaaggctcctatgacttctagaagtacatctacttggagaatacccagcaggaagagacgtttcagcagtagtgacttttcagacctgagtaatggagaagagcttcaggaaacctgcagctcatccctaagaagagggtcaggatcacagccacaagaacctgaaaataagaagtgctcctgtgtcatgtgttttccaaaaggtgtgccaagaagccaagaagcaaggactgaaagtagtcaagcatctgacatgatggataccatggatgttgaaaacaattctactttggaaaaacacagtgggaaaagaagaaaaaagagaaggcatagatctaaagtaaatggtctccaaagagggagaaagaaagacagacctagaaaacatttaactctgaataacaaagtccaaaagaaaagatggcaacaaagaggaagaaaagccaacactagacctttgaaaagaagaagaaaaagaggtccaagaattcccaaagatgaaaatattaattttaaacaatctgaacttcctgtgacctgtggtgaggtgaagggcactctatataaggagcgattcaaacaaggaacctcaaagaagtgtatacagagtgaggataaaaagtggttcactcccagggaatttgaaattgaaggagaccgcggagcatccaagaactggaagctaagtatacgctgcggtggatataccctgaaagtcctgatggagaacaaatttctgccagaaccaccaagcacaagaaaaaagagaatactggaatctcacaacaataccttagttgacccttgtccggaaaactcaaatatatgtgaggtgtgcaacaaatggggacggctgttctgctgcgacacttgtccaagatcctttcatgagcactgccacatcccatccgtggaagctaacaagaacccgtggagttgcatcttctgcaggataaagactattcaggaaagatgcccagaaagccaatcaggtcatcaggaatctgaagtcctgatgaggcagatgctgcctgaggagcagttgaaatgtgaattcctcctcttgaaggtctactgtgattcgaaaagctgctttttcgcctcagaaccgtattataacagagaggggtctcagggcccacagaagcccatgtggttaaacaaagtcaagacaagtttgaatgagcagatgtacacccgagtagaagggtttgtgcaggacatgcgtctcatctttcataaccacaaggaattttacagggaagataaattcaccagactgggaattcaagtacaggacatctttgagaagaatttcagaaacatttttgcaattcaggaaacaagcaagaacattataatgtttatttagccattcttatctcctcccttcagatcctctggcagctagctacgcaatgtgcctgtggtcccactaatctgtgactgctcctgtggaaactccacatcacaattctccaaaatttatcattgccattttaaaaccgtcttttcagctttcaataaaattcaacaccccttcatgttaaaaattctcaataagctaggtattgaggaacatatcccaaaataataagagccatttatg

SEQ ID NO: 185082 - DNA, 1898 bp, Homo sapiens
  Payload ID: 16444
  Gene Symbol: SP100
  Gene Name: SP100 nuclear antigen
  Uniprot ID: P23497
  ENST ID: ENST00000409341
  CDS Start-End: 51-1493
ggggctcagaggccaggctctgaggcccacgcagggcctagggtgggaagatggcaggtgggggcggcgacctgagcaccaggaggctgaatgaatgtatttcaccagtagcaaatgagatgaaccatcttcctgcacacagccacgatttgcaaaggatgttcacggaagaccagggtgtagatgacaggctgctctatgacattgtattcaagcacttcaaaagaaataaggtggagatttcaaatgcaataaaaaagacatttccattcctcgagggcctccgtgatcgtgatctcatcacaaataaaatgtttgaagattctcaagattcttgtagaaacctggtccctgtacagagagtggtgtacaatgttcttagtgaactggagaagacatttaacctgccagttctggaagcactgttcagcgatgtcaacatgcaggaataccccgatttaattcacatttataaaggctttgaaaatgtaatccatgacaaattgcctctccaagaaagtgaagaagaagagagggaggagaggtctggcctccaactaagtcttgaacaaggaactggtgaaaactcttttcgaagcctgacttggccaccttcgggttccccatctcatgctggtacaaccccacctgaaaatggactctcagagcacccctgtgaaacagaacagataaatgcaaagagaaaagatacaaccagtgacaaagatgattcgctaggaagccaacaaacaaatgaacaatgtgctcaaaaggctgagccaacagagtcctgcgaacaaattgctgtccaagtgaataatggggatgctggaagggagatgccctgcccgttgccctgtgatgaagaaagcccagaggcagagctacacaaccatggaatccaaattaattcctgttctgtgcgactggtggatataaaaaaggaaaagccattttctaattcaaaagttgagtgccaagcccaagcaagaactcatcataaccaggcatctgacataatagtcatcagcagtgaggactctgaaggatccactgacgttgatgagcccttagaagtcttcatctcagcaccgagaagtgagcctgtgatcaataatgacaaccctttagaatcaaatgatgaaaaggagggccaagaagccacttgctcacgaccccagattgtaccagagcccatggatttcagaaaattatctacattcagagaaagttttaagaaaagagtgataggacaagaccacgacttttcagaatccagtgaggaggaggcgcccgcagaagcctcgagcggggcactgagaagcaagcatggtgagaaggctcctatgacttctagaagtacatctacttggagaatacccagcaggaagagacgtttcagcagtagtgacttttcagacctgagtaatggagaagagcttcaggaaacctgcagctcatccctaagaagagggtcaggtaaagaagattaggatgccaagacttggcctgcagaatgtcaggaatgtgaattaaaagctgctgtttccagacgctttttattctgagcaccttcactaccttgtatccagttcatctgggaactcctttttgcattttagaaaatggaaagaggcaggaaattatgataaactcatgtttaacagaaagagtttcactgactaaatgtatgtaattatattttgttgttgtagaagaaataaatagcaaatttgtggtattcttttttttaaacctgctctcattcctattaacactaagatcttagatttttatagtgataaatgggttgacatcattgtcatttgtaattgtaaagcctcaaaagacaactgttcctactatgtaattatagacagaaataaaaacttcagatc

SEQ ID NO: 185083 - DNA, 2198 bp, Homo sapiens
  Payload ID: 16444
  Gene Symbol: SP100
  Gene Name: SP100 nuclear antigen
  Uniprot ID: P23497
  ENST ID: ENST00000409112
  CDS Start-End: 32-2098
ctgaggcccacgcagggcctagggtgggaagatggcaggtgggggcggcgacctgagcaccaggaggctgaatgaatgtatttcaccagtagcaaatgagatgaaccatcttcctgcacacagccacgatttgcaaaggatgttcacggaagaccagggtgtagatgacaggctgctctatgacattgtattcaagcacttcaaaagaaataaggtggagatttcaaatgcaataaaaaagacatttccattcctcgagggcctccgtgatcgtgatctcatcacaaataaaatgtttgaagattctcaagattcttgtagaaacctggtccctgtacagagagtggtgtacaatgttcttagtgaactggagaagacatttaacctgccagttctggaagcactgttcagcgatgtcaacatgcaggaataccccgatttaattcacatttataaaggctttgaaaatgtaatccatgacaaattgcctctccaagaaagtgaagaagaagagagggaggagaggtctggcctccaactaagtcttgaacaaggaactggtgaaaactcttttcgaagcctgacttggccaccttcgggttccccatctcatgctggtacaaccccacctgaaaatggactctcagagcacccctgtgaaacagaacagataaatgcaaagagaaaagatacaaccagtgacaaagatgattcgctaggaagccaacaaacaaatgaacaatgtgctcaaaaggctgagccaacagagtcctgcgaacaaattgctgtccaagtgaataatggggatgctggaagggagatgccctgcccgttgccctgtgatgaagaaagcccagaggcagagctacacaaccatggaatccaaattaattcctgttctgtgcgactggtggatataaaaaaggaaaagccattttctaattcaaaagttgagtgccaagcccaagcaagaactcatcataaccaggcatctgacataatagtcatcagcagtgaggactctgaaggatccactgacgttgatgagcccttagaagtcttcatctcagcaccgagaagtgagcctgtgatcaataatgacaaccctttagaatcaaatgatgaaaaggagggccaagaagccacttgctcacgaccccagattgtaccagagcccatggatttcagaaaattatctacattcagagaaagttttaagaaaagagtgataggacaagaccacgacttttcagaatccagtgaggaggaggcgcccgcagaagcctcgagcggggcactgagaagcaagcatggtgagaaggctcctatgacttctagaagtacatctacttggagaatacccagcaggaagagacgtttcagcagtagtgacttttcagacctgagtaatggagaagagcttcaggaaacctgcagctcatccctaagaagagggtcaggatcacagccacaagaacctgaaaataagaagtgctcctgtgtcatgtgttttccaaaaggtgtgccaagaagccaagaagcaaggactgaaagtagtcaagcatctgacatgatggataccatggatgttgaaaacaattctactttggaaaaacacagtgggaaaagaagaaaaaagagaaggcatagatctaaagtaaatggtctccaaagagggagaaagaaagacagacctagaaaacatttaactctgaataacaaagtccaaaagaaaagatggcaacaaagaggaagaaaagccaacactagacctttgaaaagaagaagaaaaagaggtccaagaattcccaaagatgaaaatattaattttaaacaatctgaacttcctgtgacctgtggtgaggtgaagggcactctatataaggagcgattcaaacaaggaacctcaaagaagtgtatacagagtgaggataaaaagtggttcactcccagggaatttgaaattgaaggagaccgcggagcatccaagaactggaagctaagtatacgctgcggtggatataccctgaaagtcctgatggagaacaaatttctgccagaaccaccaagcacaagaaaaaaggtgatgatcaagtgatcttctgccaatgtctcgtctattatgttgttgattttctatctctgtggacttacagtctttaaattgacccatcatcataaaatttgattttataata

SEQ ID NO: 185084 - DNA, 2037 bp, Homo sapiens
  Payload ID: 16444
  Gene Symbol: SP100
  Gene Name: SP100 nuclear antigen
  Uniprot ID: P23497
  ENST ID: ENST00000409897
  CDS Start-End: 282-1619
agacgctgtggtctcacctgtcctggcaaggggcctctgccggctgttcccatgactggctcagggtctgagttcttattccatcaaccttgatcaaaagaaggaaagggaagaaaaaggcccagggaggctgaatgaatgtatttcaccagtagcaaatgagatgaaccatcttcctgcacacagccacgatttgcaaaggtttttggagaggaataaatttaatgaaagatgtacatgacttctaaaaactataagcagtgctgggtaaaattaaacacatgatgttcacggaagaccagggtgtagatgacaggctgctctatgacattgtattcaagcacttcaaaagaaataaggtggagatttcaaatgcaataaaaaagacatttccattcctcgagggcctccgtgatcgtgatctcatcacaaataaaatgtttgaagattctcaagattcttgtagaaacctggtccctgtacagagagtggtgtacaatgttcttagtgaactggagaagacatttaacctgccagttctggaagcactgttcagcgatgtcaacatgcaggaataccccgatttaattcacatttataaaggctttgaaaatgtaatccatgacaaattgcctctccaagaaagtgaagaagaagagagggaggagaggtctggcctccaactaagtcttgaacaaggaactggtgaaaactcttttcgaagcctgacttggccaccttcgggttccccatctcatgctggtacaaccccacctgaaaatggactctcagagcacccctgtgaaacagaacagataaatgcaaagagaaaagatacaaccagtgacaaagatgattcgctaggaagccaacaaacaaatgaacaatgtgctcaaaaggctgagccaacagagtcctgcgaacaaattgctgtccaagtgaataatggggatgctggaagggagatgccctgcccgttgccctgtgatgaagaaagcccagaggcagagctacacaaccatggaatccaaattaattcctgttctgtgcgactggtggatataaaaaaggaaaagccattttctaattcaaaagttgagtgccaagcccaagcaagaactcatcataaccaggcatctgacataatagtcatcagcagtgaggactctgaaggatccactgacgttgatgagcccttagaagtcttcatctcagcaccgagaagtgagcctgtgatcaataatgacaaccctttagaatcaaatgatgaaaaggagggccaagaagccacttgctcacgaccccagattgtaccagagcccatggatttcagaaaattatctacattcagagaaagttttaagaaaagagtgataggacaagaccacgacttttcagaatccagtgaggaggaggcgcccgcagaagcctcgagcggggcactgagaagcaagcatggtgagaaggctcctatgacttctagaagtacatctacttggagaatacccagcaggaagagacgtttcagcagtagtgacttttcagacctgagtaatggagaagagcttcaggaaacctgcagctcatccctaagaagagggtcaggtaaagaagattaggatgccaagacttggcctgcagaatgtcaggaatgtgaattaaaagctgctgtttccagacgctttttattctgagcaccttcactaccttgtatccagttcatctgggaactcctttttgcattttagaaaatggaaagaggcaggaaattatgataaactcatgtttaacagaaagagtttcactgactaaatgtatgtaattatattttgttgttgtagaagaaataaatagcaaatttgtggtattcttttttttaaacctgctctcattcctattaacactaagatcttagatttttatagtgataaatgggttgacatcattgtcatttgtaattgtaaagcctcaaaagacaactgttcctactatgtaattatagacagaaataaaaacttcagatcaaacactctcaaa

SEQ ID NO: 185085 - DNA, 1802 bp, Homo sapiens
  Payload ID: 16444
  Gene Symbol: SP100
  Gene Name: SP100 nuclear antigen
  ENST ID: ENST00000409824
  CDS Start-End: 58-1425
cgactgaggggctcagaggccaggctctgaggcccacgcagggcctagggtgggaagatggcaggtgggggcggcgacctgagcaccaggatgttcacggaagaccagggtgtagatgacaggctgctctatgacattgtattcaagcacttcaaaagaaataaggtggagatttcaaatgcaataaaaaagacatttccattcctcgagggcctccgtgatcgtgatctcatcacaaataaaatgtttgaagattctcaagattcttgtagaaacctggtccctgtacagagagtggtgtacaatgttcttagtgaactggagaagacatttaacctgccagttctggaagcactgttcagcgatgtcaacatgcaggaataccccgatttaattcacatttataaaggctttgaaaatgtaatccatgacaaattgcctctccaagaaagtgaagaagaagagagggaggagaggtctggcctccaactaagtcttgaacaaggaactggtgaaaactcttttcgaagcctgacttggccaccttcgggttccccatctcatgctggtacaaccccacctgaaaatggactctcagagcacccctgtgaaacagaacagataaatgcaaagagaaaagatacaaccagtgacaaagatgattcgctaggaagccaacaaacaaatgaacaatgtgctcaaaaggctgagccaacagagtcctgcgaacaaattgctgtccaagtgaataatggggatgctggaagggagatgccctgcccgttgccctgtgatgaagaaagcccagaggcagagctacacaaccatggaatccaaattaattcctgttctgtgcgactggtggatataaaaaaggaaaagccattttctaattcaaaagttgagtgccaagcccaagcaagaactcatcataaccaggcatctgacataatagtcatcagcagtgaggactctgaaggatccactgacgttgatgagcccttagaagtcttcatctcagcaccgagaagtgagcctgtgatcaataatgacaaccctttagaatcaaatgatgaaaaggagggccaagaagccacttgctcacgaccccagattgtaccagagcccatggatttcagaaaattatctacattcagagaaagttttaagaaaagagtgataggacaagaccacgacttttcagaatccagtgaggaggaggcgcccgcagaagcctcgagcggggcactgagaagcaagcatggtgagaaggctcctatgacttctagaagtacatctacttggagaatacccagcaggaagagacgtttcagcagtagtgacttttcagacctgagtaatggagaagagcttcaggaaacctgcagctcatccctaagaagagggtcaggtaaagaagattaggatgccaagacttggcctgcagaatgtcaggaatgtgaattaaaagctgctgtttccagacgctttttattctgagcaccttcactaccttgtatccagttcatctgggaactcctttttgcattttagaaaatggaaagaggcaggaaattatgataaactcatgtttaacagaaagagtttcactgactaaatgtatgtaattatattttgttgttgtagaagaaataaatagcaaatttgtggtattcttttttttaaacctgctctcattcctattaacactaagatcttagatttttatagtgataaatgggttgacatcattgtcatttgtaattgtaaagcctcaaaagacaactgttcctactatgtaa

SEQ ID NO: 185086 - DNA, 654 bp, Homo sapiens
  Payload ID: 16444
  Gene Symbol: SP100
  Gene Name: SP100 nuclear antigen
  ENST ID: ENST00000432979
  CDS Start-End: 77-654
cactgcacgcaggctgggccgactgaggggctcagaggccaggctctgaggcccacgcagggcctagggtgggaagatggcaggtgggggcggcgacctgagcaccaggatgttcacggaagaccagggtgtagatgacaggctgctctatgacattgtattcaagcacttcaaaagaaataaggtggagatttcaaatgcaataaaaaagacatttccattcctcgagggcctccgtgatcgtgatctcatcacaaataaaatgtttgaagattctcaagattcttgtagaaacctggtccctgtacagagagtggtgtacaatgttcttagtgaactggagaagacatttaacctgccagttctggaagcactgttcagcgatgtcaacatgcaggaataccccgatttaattcacatttataaaggctttgaaaatgtaatccatgacaaattgcctctccaagaaagtgaagaagaagagagggaggagaggtctggcctccaactaagtcttgaacaaggaactggtgaaaactcttttcgaagcctgacttggccaccttcgggttccccatctcatgctggttgcctaggagggtttcttcctcccacaccccttaatcacacttgctgctggttcctgctgccgct

SEQ ID NO: 185087 - DNA, 1922 bp, Homo sapiens
  Payload ID: 16444
  Gene Symbol: SP100
  Gene Name: SP100 nuclear antigen
  ENST ID: ENST00000431952
  CDS Start-End: 1-778
cactctatataaggagcgattcaaacaaggaacctcaaagaagtgtatacagagtgaggataaaaagtggttcactcccagggaatttgaaattgaaggagaccgcggagcatccaagaactggaagctaagtatacgctgcggtggatataccctgaaagtcctgatggagagaatactggaatctcacaacaataccttagttgacccttgtccggaaaactcaaatatatgtgaggtgtgcaacaaatggggacggctgttctgctgcgacacttgtccaagatcctttcatgagcactgccacatcccatccgtggaagctaacaagaacccgtggagttgcatcttctgcaggataaagactattcaggaaagatgcccagaaagccaatcaggtcatcaggaatctgaagtcctgatgaggcagatgctgcctgaggagcagttgaaatgtgaattcctcctcttgaaggtctactgtgattcgaaaagctgctttttcgcctcagaaccgtattataacagagaggggtctcagggcccacagaagcccatgtggttaaacaaagtcaagacaagtttgaatgagcagatgtacacccgagtagaagggtttgtgcaggacatgcgtctcatctttcataaccacaaggaattttacagggaagataaattcaccagactgggaattcaagtacaggacatctttgagaagaatttcagaaacatttttgcaattcaggaaacaagcaagaacattataatgtttatttagccattcttatctcctcccttcagatcctctggcagctagctacgcaatgtgcctgtggtcccactaatctgtgactgctcctgtggaaactccacatcacaattctccaaaatttatcattgccattttaaaaccgtcttttcagctttcaataaaattcaacaccccttcatgttaaaaattctcaataagctaggtattgaggaacatatcccaaaataataagagccatttatgacaaacccacagacaacattatatggaatgcgcaaaagaagcattccccttgaaaacaagcacaagacaaggattccctctctcaccactcctattcaacaaagtattggaagtcctggtcagagcagtcaggaagcagaaaaaaataaagggtatctaaataggcaaagaggaagtcaaactatccctgtttgcacacaacattgattctatatctagaaaaccccctagtctcagcccagaagctccttctgctgataaacaatttcagagatgtttcagaatacaaaattagtatatgaaaattactagtattcctatacaccagcaatagccaagccaagagccaaatcaggaaggcaatctcattcacaattgccactaaaagaataaaatacctaggaatacagctaatcagggaggtgagagagttctacaatgagaattacgaaacactgctcaaagagattggagatgacacaaacaaatggaaaaacatcccatgctcctgtgtagaaacagtcaatatcattaaaatgaccatactgcccaaagcagtttacaggttcaatgttattcctatcaaaccaccaatgacattcttcacagaactagataaaactattttaaaattcatacagaaccaaaaaagagcccaaatagccaaggcaatcctaagcaaaaagaacaaagctgaaggcatcacgttaccccacttcaaactatattacagggcttcagtaaccaaaacagcatggtactggtaccaaaaaaaaagccacatagaccaatggaacagaacgaagagcacagaataagaccacactcctatgaccatctgatcgtcgataaaaacaagcaatgggaaaaagactccctattttataaatggtgctgggataactgg

SEQ ID NO: 185088 - DNA, 1922 bp, Homo sapiens
  Payload ID: 16444
  Gene Symbol: SP100
  Gene Name: SP100 nuclear antigen
  Uniprot ID: P23497
  ENST ID: ENST00000427101
  CDS Start-End: 142-1500
atttgggcggagccctttctgagtcagtctgtcggccgacttcctgcttggggcctgggcagccacactgcacgcaggctgggccgactgaggggctcagaggccaggctctgaggcccacgcagggcctagggtgggaagatggcaggtgggggcggcgacctgagcaccaggatgttcacggaagaccagggtgtagatgacaggctgctctatgacattgtattcaagcacttcaaaagaaataaggtggagatttcaaatgcaataaaaaagacatttccattcctcgagggcctccgtgatcgtgatctcatcacaaataaaatgtttgaagattctcaagattcttgtagaaacctggtccctgtacagagagtggtgtacaatgttcttagtgaactggagaagacatttaacctgccagttctggaagcactgttcagcgatgtcaacatgcaggaataccccgatttaattcacatttataaaggctttgaaaatgtaatccatgacaaattgcctctccaagaaagtgaagaagaagagagggaggagaggtctggcctccaactaagtcttgaacaaggaactggtgaaaactcttttcgaagcctgacttggccaccttcgggttccccatctcatgctggtacaaccccacctgaaaatggactctcagagcacccctgtgaaacagaacagataaatgcaaagagaaaagatacaaccagtgacaaagatgattcgctaggaagccaacaaacaaatgaacaatgtgctcaaaaggctgagccaacagagtcctgcgaacaaattgctgtccaagtgaataatggggatgctggaagggagatgccctgcccgttgccctgtgatgaagaaagcccagaggcagagctacacaaccatggaatccaaattaattcctgttctgtgcgactggtggatataaaaaaggaaaagccattttctaattcaaaagttgagtgccaagcccaagcaagaactcatcataaccaggcatctgacataatagtcatcagcagtgaggactctgaaggatccactgacgttgatgagcccttagaagtcttcatctcagcaccgagaagtgagcctgtgatcaataatgacaaccctttagaatcaaatgatgaaaaggagggccaagaagccacttgctcacgaccccagattgtaccagagcccatggatttcagaaaattatctacattcagagaaagttttaagaaaagagtgataggacaagaccacgacttttcagaatccagtgaggaggaggcgcccgcagaagcctcgagcggggcactgagaagcaagcatgctcctatgacttctagaagtacatctacttggagaatacccagcaggaagagacgtttcagcagtagtgacttttcagacctgagtaatggagaagagcttcaggaaacctgcagctcatccctaagaagagggtcaggtaaagaagattaggatgccaagacttggcctgcagaatgtcaggaatgtgaattaaaagctgctgtttccagacgctttttattctgagcaccttcactaccttgtatccagttcatctgggaactcctttttgcattttagaaaatggaaagaggcaggaaattatgataaactcatgtttaacagaaagagtttcactgactaaatgtatgtaattatattttgttgttgtagaagaaataaatagcaaatttgtggtattcttttttttaaacctgctctcattcctattaacactaagatcttagatttttatagtgataaatgggttgacatcattgtcatttgtaattgtaaagcctcaaaagacaactgttcctactatgtaattatagacagaaataaaaacttcagatcaaacactctcaaacgtt

SEQ ID NO: 185089 - DNA, 377 bp, Homo sapiens
  Payload ID: 16444
  Gene Symbol: SP100
  Gene Name: SP100 nuclear antigen
  ENST ID: ENST00000413284
  CDS Start-End: 1-377
tcatcagcagtgaggactctgaaggatccactgacgttgatgagcccttagaagtcttcatctcagcaccgagaagtgagcctgagcccatggatttcagaaaattatctacattcagagaaagttttaagaaaagagtgataggacaagaccacgacttttcagaatccagtgaggaggaggcgcccgcagaagcctcgagcggggcactgagaagcaagcatggtgagaaggctcctatgacttctagaagtacatctacttggagaatacccagcaggaagagacgtttcagcagtagtgacttttcagacctgagtaatggagaagagcttcaggaaacctgcagctcatccctaagaagagggtcaggtaaa

SEQ ID NO: 185090 - DNA, 580 bp, Homo sapiens
  Payload ID: 16444
  Gene Symbol: SP100
  Gene Name: SP100 nuclear antigen
  ENST ID: ENST00000452345
  CDS Start-End: 1-580
gacgttgatgagcccttagaagtcttcatctcagcaccgagaagtgagcctgtgatcaataatgacaaccctttagaatcaaatgatgaaaaggagggccaagaagccacttgctcacgaccccagattgtaccagagcccatggatttcagaaaattatctacattcagagaaagttttaagaaaagagtgataggacaagaccacgacttttcagaatccagtgaggaggaggcgcccgcagaagcctcgagcggggcactgagaagcaagcatggtgagaaggctcctatgacttctagaagtacatctacttggagaatacccagcaggaagagacgtttcagcagtagtgacttttcagacctgagtaatggagaagagcttcaggaaacctgcagctcatccctaagaagagggtcaggtgtgccaagaagccaagaagcaaggactgaaagtagtcaagcatctgacatgatggataccatggatgttgaaaacaattctactttggaaaaacacagtgggaaaagaagaaaaaagagaaggcatagatctaaagtaaatggtctccaaagag

SEQ ID NO: 185091 - DNA, 2426 bp, Homo sapiens
  Payload ID: 16445
  Gene Symbol: SP110
  Gene Name: SP110 nuclear body protein
  Uniprot ID: Q9HB58
  ENST ID: ENST00000258381
  CDS Start-End: 79-2220
gtaactctcccaatcttgaggagtgatccctgtcccagcccctggaaaggggcaggaacgacaaactcaaagtccaggatgttcaccatgacaagagccatggaagaggctctttttcagcacttcatgcaccagaagctggggatcgcctatgccatacacaagccatttcccttctttgaaggcctcctagacaactccatcatcactaagagaatgtacatggaatctctggaagcctgtagaaatttgatccctgtatccagagtggtgcacaacattctcacccaactggagaggacttttaacctgtctcttctggtgacattgttcagtcaaattaacctgcgtgaatatcccaatctggtgacgatttacagaagcttcaaacgtgttggtgcttcctatgaatggcagagcagagacacaccaatcctacttgaagccccaactggcctagcagaaggaagctccctccataccccactggcgctgcccccaccacaaccccctcaaccaagctgttcaccctgtgcgccaagagtcagtgagcctggaacatcctcccagcaaagcgatgagatcctgagtgagtcgcccagcccatctgaccctgtcctgcctctccctgcactcatccaggaaggaagaagcacttcagtgaccaatgacaagttaacatccaaaatgaatgcggaagaagactcagaagagatgcccagcctcctcactagcactgtgcaagtggccagtgacaacctgatcccccaaataagagataaagaagaccctcaagagatgccccactctcccttgggctctatgccagagataagagataattctccagaaccaaatgacccagaagagccccaggaggtgtccagcacaccttcagacaagaaaggaaagaaaagaaaaagatgtatctggtcaactccaaaaaggagacataagaaaaaaagcctcccaggagggacagcctcatctagacacggaatccaaaagaagctcaaaagggtggatcaggttcctcaaaagaaagatgactcaacttgtaactccacggtagagacaagggcccaaaaggcgagaactgaatgtgcccgaaagtcgagatcagaggagatcattgatggcacttcagaaatgaatgaaggaaagaggtcccagaagacgcctagtacaccacgaagggtcacacaaggggcagcctcacctgggcatggcatccaagagaagctccaagtggtggataaggtgactcaaaggaaagacgactcaacctggaactcagaggtcatgatgagggtccaaaaggcaagaactaaatgtgcccgaaagtccagattgaaagaaaagaaaaaggagaaagatatctgttcaagctcaaaaaggagatttcagaaaaatattcaccgaagaggaaaacccaaaagtgacactgtggattttcactgttctaagctccccgtgacctgtggtgaggcgaaagggattttatataagaagaaaatgaaacacggatcctcagtgaagtgcattcggaatgaggatggaacttggttaacaccaaatgaatttgaagtcgaaggaaaaggaaggaacgcaaagaactggaaacggaatatacgttgtgaaggaatgaccctaggagagctgctgaagcggaaaaactcggatgaatgcgaggtgtgctgtcaagggggacaacttctctgctgcggtacttgtccacgagtcttccatgaggactgtcacatcccccctgtggaagccaagaggatgctgtggagttgcaccttctgcaggatgaagaggtcttcaggaagccaacagtgccatcatgtatctaagaccctggagaggcagatgcagcctcaggaccagctgaaatgtgagttcctcctcttgaaggcctactgtcatccacaaagctccttttttacgggcatcccatttaatattcgagattacggtgagccctttcaggaagcaatgtggttggacctggttaaggaaaggctgattacggaaatgtacacggtggcatggtttgtgcgagacatgcgcctgatgtttcgcaaccataaaacattttacaaggcttctgactttggccaggtaggacttgacttagaggcagaatttgaaaaagatctcaaagacgtgctcggttttcatgaagccaatgacggcggtttctggactcttccttgaccctgttctgtaaagactgaagcatccccacctcaggattcagctgatgggaccctggcttggactgttgattgccagtgagtctgggatgtaattggctgccctcaggacccaaacccagacacttcataggattatcacaccctccatctttattctttctttttacctttaaaagtctatatctacactaaaaaaaaaaaaaa

SEQ ID NO: 185092 - DNA, 2080 bp, Homo sapiens
  Payload ID: 16445
  Gene Symbol: SP110
  Gene Name: SP110 nuclear body protein
  Uniprot ID: Q9HB58
  ENST ID: ENST00000258382
  CDS Start-End: 241-1890
aagtgcccatgaggaggtggagagaggctgcaggcaccgacctgccttcagcttccggcttggcaaactccgaaaactttcacttttcttttctcggaagcccggccccttactgcgtttgtcaaagcacagacttcctgttttgcctgctagcatctccctgtaactctcccaatcttgaggagtgatccctgtcccagcccctggaaaggggcaggaacgacaaactcaaagtccaggatgttcaccatgacaagagccatggaagaggctctttttcagcacttcatgcaccagaagctggggatcgcctatgccatacacaagccatttcccttctttgaaggcctcctagacaactccatcatcactaagagaatgtacatggaatctctggaagcctgtagaaatttgatccctgtatccagagtggtgcacaacattctcacccaactggagaggacttttaacctgtctcttctggtgacattgttcagtcaaattaacctgcgtgaatatcccaatctggtgacgatttacagaagcttcaaacgtgttggtgcttcctatgaatggcagagcagagacacaccaatcctacttgaagccccaactggcctagcagaaggaagctccctccataccccactggcgctgcccccaccacaaccccctcaaccaagctgttcaccctgtgcgccaagagtcagtgagcctggaacatcctcccagcaaagcgatgagatcctgagtgagtcgcccagcccatctgaccctgtcctgcctctccctgcactcatccaggaaggaagaagcacttcagtgaccaatgacaagttaacatccaaaatgaatgcggaagaagactcagaagagatgcccagcctcctcactagcactgtgcaagtggccagtgacaacctgatcccccaaataagagataaagaagaccctcaagagatgccccactctcccttgggctctatgccagagataagagataattctccagaaccaaatgacccagaagagccccaggaggtgtccagcacaccttcagacaagaaaggaaagaaaagaaaaagatgtatctggtcaactccaaaaaggagacataagaaaaaaagcctcccaggagggacagcctcatctagacacggaatccaaaagaagctcaaaagggtggatcaggttcctcaaaagaaagatgactcaacttgtaactccacggtagagacaagggcccaaaaggcgagaactgaatgtgcccgaaagtcgagatcagaggagatcattgatggcacttcagaaatgaatgaaggaaagaggtcccagaagacgcctagtacaccacgaagggtcacacaaggggcagcctcacctgggcatggcatccaagagaagctccaagtggtggataaggtgactcaaaggaaagacgactcaacctggaactcagaggtcatgatgagggtccaaaaggcaagaactaaatgtgcccgaaagtccagattgaaagaaaagaaaaaggagaaagatatctgttcaagctcaaaaaggagatttcagaaaaatattcaccgaagaggaaaacccaaaagtgacactgtggattttcactgttctaagctccccgtgacctgtggtgaggcgaaagggattttatataagaagaaaatgaaacacggatcctcagtgaagtgcattcggaatgaggatggaacttggttaacaccaaatgaatttgaagtcgaaggaaaaggaaggaacgcaaagaactggaaacggaatatacgttgtgaaggaatgaccctaggagagctgctgaagagtggacttttgctctgtcctccaagaataaatctcaagagagagttaaatagcaagtgaatttctactaccctctcagtcaccatgttgcagactttccctgtctggaggctcaccttagagcttctgagtttccaagctctgagtcacctccacatttgggcatggcatcttcaaaacaattaatttgcatagttaatttgggatggggaagcaaatgactctaaaataaaaattaaatgaaaaagct

SEQ ID NO: 185093 - DNA, 2337 bp, Homo sapiens
  Payload ID: 16445
  Gene Symbol: SP110
  Gene Name: SP110 nuclear body protein
  Uniprot ID: Q9HB58
  ENST ID: ENST00000358662
  CDS Start-End: 80-2149
tgtaactctcccaatcttgaggagtgatccctgtcccagcccctggaaaggggcaggaacgacaaactcaaagtccaggatgttcaccatgacaagagccatggaagaggctctttttcagcacttcatgcaccagaagctggggatcgcctatgccatacacaagccatttcccttctttgaaggcctcctagacaactccatcatcactaagagaatgtacatggaatctctggaagcctgtagaaatttgatccctgtatccagagtggtgcacaacattctcacccaactggagaggacttttaacctgtctcttctggtgacattgttcagtcaaattaacctgcgtgaatatcccaatctggtgacgatttacagaagcttcaaacgtgttggtgcttcctatgaatggcagagcagagacacaccaatcctacttgaagccccaactggcctagcagaaggaagctccctccataccccactggcgctgcccccaccacaaccccctcaaccaagctgttcaccctgtgcgccaagagtcagtgagcctggaacatcctcccagcaaagcgatgagatcctgagtgagtcgcccagcccatctgaccctgtcctgcctctccctgcactcatccaggaaggaagaagcacttcagtgaccaatgacaagttaacatccaaaatgaatgcggaagaagactcagaagagatgcccagcctcctcactagcactgtgcaagtggccagtgacaacctgatcccccaaataagagataaagaagaccctcaagagatgccccactctcccttgggctctatgccagagataagagataattctccagaaccaaatgacccagaagagccccaggaggtgtccagcacaccttcagacaagaaaggaaagaaaagaaaaagatgtatctggtcaactccaaaaaggagacataagaaaaaaagcctcccaggagggacagcctcatctagacacggaatccaaaagaagctcaaaagggtggatcaggttcctcaaaagaaagatgactcaacttgtaactccacggtagagacaagggcccaaaaggcgagaactgaatgtgcccgaaagtcgagatcagaggagatcattgatggcacttcagaaatgaatgaaggaaagaggtcccagaagacgcctagtacaccacgaagggtcacacaaggggcagcctcacctgggcatggcatccaagagaagctccaagtggtggataaggtgactcaaaggaaagacgactcaacctggaactcagaggtcatgatgagggtccaaaaggcaagaactaaatgtgcccgaaagtccagattgaaagaaaagaaaaaggagaaagatatctgttcaagctcaaaaaggagatttcagaaaaatattcaccgaagaggaaaacccaaaagtgacactgtggattttcactgttctaagctccccgtgacctgtggtgaggcgaaagggattttatataagaagaaaatgaaacacggatcctcagtgaagtgcattcggaatgaggatggaacttggttaacaccaaatgaatttgaagtcgaaggaaaaggaaggaacgcaaagaactggaaacggaatatacgttgtgaaggaatgaccctaggagagctgctgaagcggaaaaactcggatgaatgcgaggtgtgctgtcaagggggacaacttctctgctgcggtacttgtccacgagtcttccatgaggactgtcacatcccccctgtggaagccaagaggatgctgtggagttgcaccttctgcaggatgaagaggtcttcaggaagccaacagtgccatcatgtatctaagaccctggagaggcagatgcagcctcaggaccagctgattcgagattacggtgagccctttcaggaagcaatgtggttggacctggttaaggaaaggctgattacggaaatgtacacggtggcatggtttgtgcgagacatgcgcctgatgtttcgcaaccataaaacattttacaaggcttctgactttggccaggtaggacttgacttagaggcagaatttgaaaaagatctcaaagacgtgctcggttttcatgaagccaatgacggcggtttctggactcttccttgaccctgttctgtaaagactgaagcatccccacctcaggattcagctgatgggaccctggcttggactgttgattgccagtgagtctgggatgtaattggctgccctcaggacccaaacccagacacttcataggattatcacaccctccatctttattctttctttttacctttaaaagtctatatcta

SEQ ID NO: 185094 - DNA, 1937 bp, Homo sapiens
  Payload ID: 16445
  Gene Symbol: SP110
  Gene Name: SP110 nuclear body protein
  ENST ID: ENST00000392048
  CDS Start-End: 102-1745
gttttgcctgctagcatctccctgtaactctcccaatcttgaggagtgatccctgtcccagcccctggaaaggggcaggaacgacaaactcaaagtccaggatgttcaccatgacaagagccatggaagaggctctttttcagcacttcatgcaccagaagctggggatcgcctatgccatacacaagccatttcccttctttgaaggcctcctagacaactccatcatcactaagagaatgtacatggaatctctggaagcctgtagaaatttgatccctgtatccagagtggtgcacaacattctcacccaactggagaggacttttaacctgtctcttctggtgacattgttcagtcaaattaacctgcgtgaatatcccaatctggtgacgatttacagaagcttcaaacgtgttggtgcttcctatgaatggcagagcagagacacaccaatcctacttgaagccccaactggcctagcagaaggaagctccctccataccccactggcgctgcccccaccacaaccccctcaaccaagctgttcaccctgtgcgccaagagtcagtgagcctggaacatcctcccagcaaagcgatgagatcctgagtgagtcgcccagcccatctgaccctgtcctgcctctccctgcactcatccaggaaggaagaagcacttcagtgaccaatgacaagttaacatccaaaatgaatgcggaagaagactcagaagagatgcccagcctcctcactagcactgtgcaagtggccagtgacaacctgatcccccaaataagagataaagaagaccctcaagagatgccccactctcccttgggctctatgccagagataagagataattctccagaaccaaatgacccagaagagccccaggaggtgtccagcacaccttcagacaagaaaggaaagaaaagaaaaagatgtatctggtcaactccaaaaaggagacataagaaaaaaagcctcccaggagcctcatctagacacggaatccaaaagaagctcaaaagggtggatcaggttcctcaaaagaaagatgactcaacttgtaactccacggtagagacaagggcccaaaaggcgagaactgaatgtgcccgaaagtcgagatcagaggagatcattgatggcacttcagaaatgaatgaaggaaagaggtcccagaagacgcctagtacaccacgaagggtcacacaaggggcagcctcacctgggcatggcatccaagagaagctccaagtggtggataaggtgactcaaaggaaagacgactcaacctggaactcagaggtcatgatgagggtccaaaaggcaagaactaaatgtgcccgaaagtccagattgaaagaaaagaaaaaggagaaagatatctgttcaagctcaaaaaggagatttcagaaaaatattcaccgaagaggaaaacccaaaagtgacactgtggattttcactgttctaagctccccgtgacctgtggtgaggcgaaagggattttatataagaagaaaatgaaacacggatcctcagtgaagtgcattcggaatgaggatggaacttggttaacaccaaatgaatttgaagtcgaaggaaaaggaaggaacgcaaagaactggaaacggaatatacgttgtgaaggaatgaccctaggagagctgctgaagagtggacttttgctctgtcctccaagaataaatctcaagagagagttaaatagcaagtgaatttctactaccctctcagtcaccatgttgcagactttccctgtctggaggctcaccttagagcttctgagtttccaagctctgagtcacctccacatttgggcatggcatcttcaaaacaattaatttgcatagttaatttgggatggggaagcaaatgactctaaaataaaaattaaatgaaaaagctca

SEQ ID NO: 185095 - DNA, 813 bp, Homo sapiens
  Payload ID: 16445
  Gene Symbol: SP110
  Gene Name: SP110 nuclear body protein
  ENST ID: ENST00000409815
  CDS Start-End: 149-813
ggggcaggaacgacaaactcaaagtccagagtccagcctgttattgtgaatggagccgagatttgccctctaccctcacctaagctctgatccttcagtgcccgcaataggcggctcatctgttatccattgtgtaaatgactagaggatgttcaccatgacaagagccatggaagaggctctttttcagcacttcatgcaccagaagctggggatcgcctatgccatacacaagccatttcccttctttgaaggcctcctagacaactccatcatcactaagagaatgtacatggaatctctggaagcctgtagaaatttgatccctgtatccagagtggtgcacaacattctcacccaactggagaggacttttaacctgtctcttctggtgacattgttcagtcaaattaacctgcgtgaatatcccaatctggtgacgatttacagaagcttcaaacgtgttggtgcttcctatgaatggcagagcagagacacaccaatcctacttgaagccccaactggcctagcagaaggaagctccctccataccccactggcgctgcccccaccacaaccccctcaaccaagctgttcaccctgtgcgccaagagtcagtgagcctggaacatcctcccagcaaagcgatgagatcctgagtgagtcgcccagcccatctgaccctgtcctgcctctccctgcactcatccaggaaggaagaagcacttcagtgaccaatgacaagttaacatccaaaatgaatgcggaagaagactcagaagagatgcccagcctcctcactagcactgtgca

SEQ ID NO: 185096 - DNA, 600 bp, Homo sapiens
  Payload ID: 16445
  Gene Symbol: SP110
  Gene Name: SP110 nuclear body protein
  ENST ID: ENST00000455674
  CDS Start-End: 121-600
agcatctccctgtaactctcccaatcttgaggagtgatccctgtcccagcccctggaaaggggcaggaacgacaaactcaaagtccaggcctcctagacaactccatcatcactaagagaatgtacatggaatctctggaagcctgtagaaatttgatccctgtatccagagtggtgcacaacattctcacccaactggagaggacttttaacctgtctcttctggtgacattgttcagtcaaattaacctgcgtgaatatcccaatctggtgacgatttacagaagcttcaaacgtgttggtgcttcctatgaatggcagagcagagacacaccaatcctacttgaagccccaactggcctagcagaaggaagctccctccataccccactggcgctgcccccaccacaaccccctcaaccaagctgttcaccctgtgcgccaagagtcagtgagcctggaacatcctcccagcaaagcgatgagatcctgagtgagtcgcccagcccatctgaccctgtcctgcctctccctgcactcatccaggaaggaagaagcacttcagtgaccaatgacaagttaacatccaaaatgaatgcg

SEQ ID NO: 185097 - DNA, 580 bp, Homo sapiens
  Payload ID: 16445
  Gene Symbol: SP110
  Gene Name: SP110 nuclear body protein
  ENST ID: ENST00000416610
  CDS Start-End: 277-580
gaaattgcctaactagctgacgtgggtgcaccaactctacagtcctccctccacccaatctccatgacgtctctcagtcaagggaggaggagcagagccagccccacgaggccacggaagacagggtcacttgttcctgccaaggaaagagggtggaaaagtcattcaactcaagcagatcaaagttgttttgagatctaaaggaagaagttcttgctgccaggatcctcagatgcccatgaaggggctttccaggtgatggggaggggcttcaggatgttcaccatgacaagagccatggaagaggctctttttcagcacttcatgcaccagaagctggggatcgcctatgccatacacaagccatttcccttctttgaaggcctcctagacaactccatcatcactaagagaatgtacatggaatctctggaagcctgtagaaatttgatccctgtatccagagtggtgcacaacattctcacccaactggagaggacttttaacctgtctcttctggtgacattgttcagtcaaattaacctgcgtgaatatcccaatctggtgacgatttacagaa

SEQ ID NO: 185098 - DNA, 2910 bp, Homo sapiens
  Payload ID: 16446
  Gene Symbol: SP140
  Gene Name: SP140 nuclear body protein
  Uniprot ID: Q13342
  ENST ID: ENST00000343805
  CDS Start-End: 101-2524
tttgactgagcaccgaggggcagttggcagcttcacctcagagctgcaggaaggaacggggcagtgaaaatcgaatcgggtgtgatcctaggccaagctcatggcccagcagggccagcaggggcagatggcaagtggagacagcaatctcaacttcaggatggtcgcagagatccagaacgtagagggtcagaacctgcaggagcaggtttgccctgagcccattttcaggttcttcagagaaaacaaggtggagattgcaagtgcaataacaaggccatttcctttccttatgggcctccgagaccgctccttcatctccgagcagatgtatgaacattttcaagaagcttttagaaacctggtcccagtgacaagagtgatgtattgtgtactcagtgaactggagaagacatttggctggtcacatctggaagcattgttcagcaggattaacctgatggcctatcctgatttaaacgagatttacagaagcttccagaatgtatgctatgaacactcacctctccaaatgaataatgtaaacgatttagaagatagacccagattactaccatatggtaaacaagagaacagcaatgcctgtcatgaaatggatgatatagcagtgcctcaggaagccttgagctcctcgccaaggtgtgagccaggtttctcttcagagtcttgtgagcagttagctctcccaaaggctggtggaggagatgctgaagatgcacccagcctactaccaggtgggggagttctagaaagcaacgggatgatagatgcggcaaggacatacagcacagcaccaggggagaaacagggagaggaggaaggcaggaacagtcccagaaaaagaaaccaagacaaggagaagtaccaagagagtccagagggaagagacaaagagacctttgatctaaaaactccccaagtcactaatgaaggagaaccagagaaggggctctgtctactaccaggtgaaggagaagagggcagtgatgactgttcagaaatgtgtgatggagaagagccccaggaagcctctagctccctagcaagatgtgggtcagagggcagtgatgactgttcggaaatgtgtgatggagaagagcgccaggaagcctctagctccctagcaagacgtgggtcagtgtctagtgaactagaaaatcacccaatgaatgaagaaggagaatcagaagagcttgcttctagcctgctatatgataatgtaccaggagcggagcaatcagcatatgaaaatgagaagtgttcctgtgtcatgtgtttctcagaagaggtgccaggaagcccagaagcaaggacggaaagtgatcaagcgtgtggcacaatggatactgtggatattgcaaacaactccactttgggaaaacccaagaggaaaagaagaaaaaagagggggcatggctggagcagaatgagaatgagaaggcaggaaaacagccaacaaaatgataatagcaaagccgacggccaggtggtctccagtgaaaagaaggcgaacgtgaatctgaaagacctttccaagattagggggagaaagagaggcaaacctggaacccgcttcactcagagtgacagagctgcacagaaaagagtccgatcaagagcttcaagaaagcacaaagatgaaactgtggattttaaggctcctttgcttccagtgacctgtggtggggtgaagggaattttacataagaagaaattgcagcaaggaatcttggtgaagtgtatacagactgaggatggaaaatggttcacccccacggaatttgaaatcaaaggaggccatgcaagatcaaagaactggaggctgagtgtgcgctgtggcgggtggcccctacgatggctgatggagaatggatttctgcctgatcctccaagaatacgttacaggaaaaaaaagagaatactgaagtctcaaaacaatagctcagttgacccttgtatgagaaacctggatgagtgtgaggtgtgccgggacggaggggagctgttctgttgcgacacttgttcaagagtcttccatgaggactgtcacatcccgcctgtggaagctgagaggaccccgtggaattgcatcttctgcaggatgaaggagtctccgggaagccaacagtgttgtcaggaatctgaggtcctggagaggcagatgtgtcctgaggaacagttgaaatgtgagttcctcctcttgaaagtctattgctgttctgagagctccttttttgccaagattccatactattattatattagagaggcgtgtcaaggcctgaaggagcccatgtggttggataaaatcaagaaaaggctgaatgagcacggttacccccaagtggaggggtttgtacaagacatgcgcctcatcttccagaaccacagggcctcttacaagtacaaggattttggccaaatgggatttagactggaggctgagtttgagaagaatttcaaggaagtgtttgctattcaggaaacaaatgggaacaattgactggattagtggatgctgaaagcattcagcaaatggcaccctaaaatatgccgctggtttgccactgacttcaaaatgaggtcacttgggcacagcacatgcagggaggggcttttctctgagcctccttcatctgcccaaagacaaatcctcaaaaggaaattcaatcatcatgaatcacaaccccaagtatctcatcagccagggaagagtaagtgggatcacagggaaggatgttggcagcgacaccatcccatacaggctcttacctcttctcctgagggctgctccagacaacatttattacccagaagaccttttgtctgaaaaccagccaagctttattcaggacacacttcttgccttcactttcccacttccgtggc

SEQ ID NO: 185099 - DNA, 814 bp, Homo sapiens
  Payload ID: 16446
  Gene Symbol: SP140
  Gene Name: SP140 nuclear body protein
  Uniprot ID: Q13342
  ENST ID: ENST00000373645
  CDS Start-End: 82-600
gcagttggcagcttcacctcagagctgcaggaaggaacggggcagtgaaaatcgaatcgggtgtgatcctaggccaagctcatggcccagcagggccagcaggggcagatggcaagtggagacagcaatctcaacttcaggatggtcgcagagatccagaacgtagagggtcagaacctgcaggagcaggtttgccctgagcccattttcaggttcttcagagaaaacaaggtggagattgcaagtgcaataacaaggccatttcctttccttatgggcctccgagaccgctccttcatctccgagcagatgtatgaacattttcaagaagcttttagaaacctggtcccagtgacaagagtgatgtattgtgtactcagtgaactggagaagacatttggctggtcacatctggaagcattgttcagcaggattaacctgatggcctatcctgatttaaacgagatttacagaagcttccagaatgaaaatttatcatccagtgcagtcctgtgtcaacttgtttctccaaacaaagactggagaagtcacgaagagagcctagcacatactggtacactgaggaggagctgcatgtgaaagctatgaagacagaaaagggggttggtgggggcctttccgaaccatgtggttgaattgcagactgtgggaggcagggtgtgagagctgactctggagaaagaagttgaagtggattctggaaggcttgacaccctgtgctaaggaatctggagtttaatttttggaaaataaagaaggaataaagggcatttaaacgggaaaagtaaaagaa

SEQ ID NO: 185100 - DNA, 3246 bp, Homo sapiens
  Payload ID: 16446
  Gene Symbol: SP140
  Gene Name: SP140 nuclear body protein
  Uniprot ID: Q13342
  ENST ID: ENST00000392045
  CDS Start-End: 115-2718
cttttcttttcctctttgactgagcaccgaggggcagttggcagcttcacctcagagctgcaggaaggaacggggcagtgaaaatcgaatcgggtgtgatcctaggccaagctcatggcccagcagggccagcaggggcagatggcaagtggagacagcaatctcaacttcaggatggtcgcagagatccagaacgtagagggtcagaacctgcaggagcaggtttgccctgagcccattttcaggttcttcagagaaaacaaggtggagattgcaagtgcaataacaaggccatttcctttccttatgggcctccgagaccgctccttcatctccgagcagatgtatgaacattttcaagaagcttttagaaacctggtcccagtgacaagagtgatgtattgtgtactcagtgaactggagaagacatttggctggtcacatctggaagcattgttcagcaggattaacctgatggcctatcctgatttaaacgagatttacagaagcttccagaatgtatgctatgaacactcacctctccaaatgaataatgtaaacgatttagaagatagacccagattactaccatatggtaaacaagagaacagcaatgcctgtcatgaaatggatgatatagcagtgcctcaggaagccttgagctcctcgccaaggtgtgagccaggtttctcttcagagtcttgtgagcagttagctctcccaaaggctggtggaggagatgctgaagatgcacccagcctactaccaggtgggggagtgtcctgtaaacttgctatacaaatagatgaaggagaatcagaagaaatgcccaagttactgccttatgatacagaagttctagaaagcaacgggatgatagatgcggcaaggacatacagcacagcaccaggggagaaacagggagaggaggaaggcaggaacagtcccagaaaaagaaaccaagacaaggagaagtaccaagagagtccagagggaagagacaaagagacctttgatctaaaaactccccaagtcactaatgaaggagaaccagagaaggggctctgtctactaccaggtgaaggagaagagggcagtgatgactgttcagaaatgtgtgatggagaagagccccaggaagcctctagctccctagcaagatgtgggtcagtttcttgtttatctgcagagacctttgatctaaagactccccaagtcactaatgaaggagaaccagagaaggagctcagtctactaccaggtgaaggagaagagggcagtgatgactgttcggaaatgtgtgatggagaagagcgccaggaagcctctagctccctagcaagacgtgggtcagtgtctagtgaactagaaaatcacccaatgaatgaagaaggagaatcagaagagcttgcttctagcctgctatatgataatgtaccaggagcggagcaatcagcatatgaaaatgagaagtgttcctgtgtcatgtgtttctcagaagaggtgccaggaagcccagaagcaaggacggaaagtgatcaagcgtgtggcacaatggatactgtggatattgcaaacaactccactttgggaaaacccaagaggaaaagaagaaaaaagagggggcatggctggagcagaatgagaatgagaaggcaggaaaacagccaacaaaatgataatagcaaagccgacggccaggtggtctccagtgaaaagaaggcgaacgtgaatctgaaagacctttccaagattagggggagaaagagaggcaaacctggaacccgcttcactcagagtgacagagctgcacagaaaagagtccgatcaagagcttcaagaaagcacaaagatgaaactgtggattttaaggctcctttgcttccagtgacctgtggtggggtgaagggaattttacataagaagaaattgcagcaaggaatcttggtgaagtgtatacagactgaggatggaaaatggttcacccccacggaatttgaaatcaaaggaggccatgcaagatcaaagaactggaggctgagtgtgcgctgtggcgggtggcccctacgatggctgatggagaatggatttctgcctgatcctccaagaatacgttacaggaaaaaaaagagaatactgaagtctcaaaacaatagctcagttgacccttgtatgagaaacctggatgagtgtgaggtgtgccgggacggaggggagctgttctgttgcgacacttgttcaagagtcttccatgaggactgtcacatcccgcctgtggaagctgagaggaccccgtggaattgcatcttctgcaggatgaaggagtctccgggaagccaacagtgttgtcaggaatctgaggtcctggagaggcagatgtgtcctgaggaacagttgaaatgtgagttcctcctcttgaaagtctattgctgttctgagagctccttttttgccaagattccatactattattatattagagaggcgtgtcaaggcctgaaggagcccatgtggttggataaaatcaagaaaaggctgaatgagcacggttacccccaagtggaggggtttgtacaagacatgcgcctcatcttccagaaccacagggcctcttacaagtacaaggattttggccaaatgggatttagactggaggctgagtttgagaagaatttcaaggaagtgtttgctattcaggaaacaaatgggaacaattgactggattagtggatgctgaaagcattcagcaaatggcaccctaaaatatgccgctggtttgccactgacttcaaaatgaggtcacttgggcacagcacatgcagggaggggcttttctctgagcctccttcatctgcccaaagacaaatcctcaaaaggaaattcaatcatcatgaatcacaaccccaagtatctcatcagccagggaagagtaagtgggatcacagggaaggatgttggcagcgacaccatcccatacaggctcttacctcttctcctgagggctgctccagacaacatttattacccagaagaccttttgtctgaaaaccagccaagctttattcaggacacacttcttgccttcactttcccacttccgtggccacctccatgcagaagccctaagcccacattctttcgatagctcacggtggtgcatgagtgtccatcatctgactcttctcggagtctcatattttgtgggactcctgtgcaaacatatgttattaaaatttttttcctcct

SEQ ID NO: 185101 - DNA, 2895 bp, Homo sapiens
  Payload ID: 16446
  Gene Symbol: SP140
  Gene Name: SP140 nuclear body protein
  Uniprot ID: Q13342
  ENST ID: ENST00000417495
  CDS Start-End: 104-2365
ctctttgactgagcaccgaggggcagttggcagcttcacctcagagctgcaggaaggaacggggcagtgaaaatcgaatcgggtgtgatcctaggccaagctcatggcccagcagggccagcaggggcagatggcaagtggagacagcaatctcaacttcaggatggtcgcagagatccagaacgtagagggtcagaacctgcaggagcaggtttgccctgagcccattttcaggttcttcagagaaaacaaggtggagattgcaagtgcaataacaaggccatttcctttccttatgggcctccgagaccgctccttcatctccgagcagatgtatgaacattttcaagaagcttttagaaacctggtcccagtgacaagagtgatgtattgtgtactcagtgaactggagaagacatttggctggtcacatctggaagcattgttcagcaggattaacctgatggcctatcctgatttaaacgagatttacagaagcttccagaatgtatgctatgaacactcacctctccaaatgaataatgtaaacgatttagaagatagacccagattactaccatatggtaaacaagagaacagcaatgcctgtcatgaaatggatgatatagcagtgcctcaggaagccttgagctcctcgccaaggtgtgagccaggtttctcttcagagtcttgtgagcagttagctctcccaaaggctggtggaggagatgctgaagatgcacccagcctactaccagtgtcctgtaaacttgctatacaaatagatgaaggagaatcagaagaaatgcccaagttactgccttatgatacagaagagacctttgatctaaaaactccccaagtcactaatgaaggagaaccagagaaggggctctgtctactaccaggtgaaggagaagagggcagtgatgactgttcggaaatgtgtgatggagaagagcgccaggaagcctctagctccctagcaagacgtgggtcagtgtctagtgaactagaaaatcacccaatgaatgaagaaggagaatcagaagagcttgcttctagcctgctatatgataatgtaccaggagcggagcaatcagcatatgaaaatgagaagtgttcctgtgtcatgtgtttctcagaagaggtgccaggaagcccagaagcaaggacggaaagtgatcaagcgtgtggcacaatggatactgtggatattgcaaacaactccactttgggaaaacccaagaggaaaagaagaaaaaagagggggcatggctggagcagaatgagaatgagaaggcaggaaaacagccaacaaaatgataatagcaaagccgacggccaggtggtctccagtgaaaagaaggcgaacgtgaatctgaaagacctttccaagattagggggagaaagagaggcaaacctggaacccgcttcactcagagtgacagagctgcacagaaaagagtccgatcaagagcttcaagaaagcacaaagatgaaactgtggattttaaggctcctttgcttccagtgacctgtggtggggtgaagggaattttacataagaagaaattgcagcaaggaatcttggtgaagtgtatacagactgaggatggaaaatggttcacccccacggaatttgaaatcaaaggaggccatgcaagatcaaagaactggaggctgagtgtgcgctgtggcgggtggcccctacgatggctgatggagaatggatttctgcctgatcctccaagaatacgttacaggaaaaaaaagagaatactgaagtctcaaaacaatagctcagttgacccttgtatgagaaacctggatgagtgtgaggtgtgccgggacggaggggagctgttctgttgcgacacttgttcaagagtcttccatgaggactgtcacatcccgcctgtggaagctgagaggaccccgtggaattgcatcttctgcaggatgaaggagtctccgggaagccaacagtgttgtcaggaatctgaggtcctggagaggcagatgtgtcctgaggaacagttgaaatgtgagttcctcctcttgaaagtctattgctgttctgagagctccttttttgccaagattccatactattattatattagagaggcgtgtcaaggcctgaaggagcccatgtggttggataaaatcaagaaaaggctgaatgagcacggttacccccaagtggaggggtttgtacaagacatgcgcctcatcttccagaaccacagggcctcttacaagtacaaggattttggccaaatgggatttagactggaggctgagtttgagaagaatttcaaggaagtgtttgctattcaggaaacaaatgggaacaattgactggattagtggatgctgaaagcattcagcaaatggcaccctaaaatatgccgctggtttgccactgacttcaaaatgaggtcacttgggcacagcacatgcagggaggggcttttctctgagcctccttcatctgcccaaagacaaatcctcaaaaggaaattcaatcatcatgaatcacaaccccaagtatctcatcagccagggaagagtaagtgggatcacagggaaggatgttggcagcgacaccatcccatacaggctcttacctcttctcctgagggctgctccagacaacatttattacccagaagaccttttgtctgaaaaccagccaagctttattcaggacacacttcttgccttcactttcccacttccgtggccacctccatgcagaagccctaagcccacattctttcgatagctcacggtggtgcatgagtgtccatcatctgactcttctcggagtctcatattttgtgggactcctgtgcaaacatatgttattaaaatttttttcctcctgt

SEQ ID NO: 185102 - DNA, 3169 bp, Homo sapiens
  Payload ID: 16446
  Gene Symbol: SP140
  Gene Name: SP140 nuclear body protein
  Uniprot ID: Q13342
  ENST ID: ENST00000420434
  CDS Start-End: 116-2638
acttttcttttcctctttgactgagcaccgaggggcagttggcagcttcacctcagagctgcaggaaggaacggggcagtgaaaatcgaatcgggtgtgatcctaggccaagctcatggcccagcagggccagcaggggcagatggcaagtggagacagcaatctcaacttcaggatggtcgcagagatccagaacgtagagggtcagaacctgcaggagcaggtttgccctgagcccattttcaggttcttcagagaaaacaaggtggagattgcaagtgcaataacaaggccatttcctttccttatgggcctccgagaccgctccttcatctccgagcagatgtatgaacattttcaagaagcttttagaaacctggtcccagtgacaagagtgatgtattgtgtactcagtgaactggagaagacatttggctggtcacatctggaagcattgttcagcaggattaacctgatggcctatcctgatttaaacgagatttacagaagcttccagaatgtatgctatgaacactcacctctccaaatgaataatgtaaacgatttagaagatagacccagattactaccatatggtaaacaagagaacagcaatgcctgtcatgaaatggatgatatagcagtgcctcaggaagccttgagctcctcgccaaggtgtgagccaggtttctcttcagagtcttgtgagcagttagctctcccaaaggctggtggaggagatgctgaagatgcacccagcctactaccaggtgggggagtgtcctgtaaacttgctatacaaatagatgaaggagaatcagaagaaatgcccaagttactgccttatgatacagaagttctagaaagcaacgggatgatagatgcggcaaggacatacagcacagcaccaggggagaaacagggagaggaggaaggcaggaacagtcccagaaaaagaaaccaagacaaggagaagtaccaagagagtccagagggaagagacaaagagacctttgatctaaaaactccccaagtcactaatgaaggagaaccagagaaggggctctgtctactaccaggtgaaggagaagagggcagtgatgactgttcagaaatgtgtgatggagaagagccccaggaagcctctagctccctagcaagatgtgggtcagtttcttgtttatctgcagagacctttgatctaaagactccccaagtcactaatgaaggagaaccagagaaggagctcagtctactaccaggtgaaggagaagtgtctagtgaactagaaaatcacccaatgaatgaagaaggagaatcagaagagcttgcttctagcctgctatatgataatgtaccaggagcggagcaatcagcatatgaaaatgagaagtgttcctgtgtcatgtgtttctcagaagaggtgccaggaagcccagaagcaaggacggaaagtgatcaagcgtgtggcacaatggatactgtggatattgcaaacaactccactttgggaaaacccaagaggaaaagaagaaaaaagagggggcatggctggagcagaatgagaatgagaaggcaggaaaacagccaacaaaatgataatagcaaagccgacggccaggtggtctccagtgaaaagaaggcgaacgtgaatctgaaagacctttccaagattagggggagaaagagaggcaaacctggaacccgcttcactcagagtgacagagctgcacagaaaagagtccgatcaagagcttcaagaaagcacaaagatgaaactgtggattttaaggctcctttgcttccagtgacctgtggtggggtgaagggaattttacataagaagaaattgcagcaaggaatcttggtgaagtgtatacagactgaggatggaaaatggttcacccccacggaatttgaaatcaaaggaggccatgcaagatcaaagaactggaggctgagtgtgcgctgtggcgggtggcccctacgatggctgatggagaatggatttctgcctgatcctccaagaatacgttacaggaaaaaaaagagaatactgaagtctcaaaacaatagctcagttgacccttgtatgagaaacctggatgagtgtgaggtgtgccgggacggaggggagctgttctgttgcgacacttgttcaagagtcttccatgaggactgtcacatcccgcctgtggaagctgagaggaccccgtggaattgcatcttctgcaggatgaaggagtctccgggaagccaacagtgttgtcaggaatctgaggtcctggagaggcagatgtgtcctgaggaacagttgaaatgtgagttcctcctcttgaaagtctattgctgttctgagagctccttttttgccaagattccatactattattatattagagaggcgtgtcaaggcctgaaggagcccatgtggttggataaaatcaagaaaaggctgaatgagcacggttacccccaagtggaggggtttgtacaagacatgcgcctcatcttccagaaccacagggcctcttacaagtacaaggattttggccaaatgggatttagactggaggctgagtttgagaagaatttcaaggaagtgtttgctattcaggaaacaaatgggaacaattgactggattagtggatgctgaaagcattcagcaaatggcaccctaaaatatgccgctggtttgccactgacttcaaaatgaggtcacttgggcacagcacatgcagggaggggcttttctctgagcctccttcatctgcccaaagacaaatcctcaaaaggaaattcaatcatcatgaatcacaaccccaagtatctcatcagccagggaagagtaagtgggatcacagggaaggatgttggcagcgacaccatcccatacaggctcttacctcttctcctgagggctgctccagacaacatttattacccagaagaccttttgtctgaaaaccagccaagctttattcaggacacacttcttgccttcactttcccacttccgtggccacctccatgcagaagccctaagcccacattctttcgatagctcacggtggtgcatgagtgtccatcatctgactcttctcggagtctcatattttgtgggactcctgtgcaaacatatgttattaaaatttttttcctcctgtt

SEQ ID NO: 185103 - DNA, 580 bp, Homo sapiens
  Payload ID: 16446
  Gene Symbol: SP140
  Gene Name: SP140 nuclear body protein
  ENST ID: ENST00000456542
  CDS Start-End: 493-580
gtgtgtggtacaagagatttccaaaagtttctaggtgccttcagtgggcaaagtgcaaggtattaaaaaaactgagagggaaggaccctgccaagaaggcggctaccatgagggagagatggaaggtgaggctgagacccagaggaggtgcaatgccagagggtgcagagaagtaaatggtctcaaccagtgaatggaaaaaggaaagtaacttcaaattttggaaagggattcagaacaaaatcatcaggttgaagatcccggaagatgactgaagctcagccagggggaagccttttgatggtgaagtgtcagagagcaaaggaggaactgtcaacaatggtgattccactaatgaaaatatccaatgtgagctggtggtcctttgcttgttgttctgagcaccgaggggcagttggcagcttcacctcagagctgcaggaaggaacggggcagtgaaaatcgaatcgggtgtgatcctaggccaagctcatggcccagcagggccagcaggggcagatggcaagtggagacagcaatctcaacttcaggtttccacaaatgctgtggtctgttgtag

SEQ ID NO: 185104 - DNA, 2502 bp, Homo sapiens
  Payload ID: 16447
  Gene Symbol: SP140L
  Gene Name: SP140 nuclear body protein-like
  ENST ID: ENST00000243810
  CDS Start-End: 1-1668
atggcaggtgggggcagcgacctgagcaccaggctgttcacggaagaccaggatgtagatgagggacttgtctatgacactgtattcaagcacttcaaaagacataagctggagatatcaaatgcaataaaaaagacatttccattccttgagggcctccgcgatcgggaactcatcacaaataaaatgtttgaagattctgaagattcttgtagaaacctggtccctgtacaaagagtggtgtacaatgttctcagtgaactggagaagacatttaacctgtcagttttggaagcactgttcagcgaggtcaacatgcaggaataccccgatttaattcacatttataaaagcttcaaaaatgcaatccaagacaaattgtctttccaagaaagtgatcgaaaagaaagggaagagaggcctgacatcaaactaagtcttaaacaaggagaagtgccagaaagcccggaagcaaggaaggaaagtgaccaagcatgtggcaaaatggatactgtggatattgcaaacaactctactttgggaaaacccaagaggaaaagaagaaaaaagaaggggcatggctggagcagaatgggaacgagaacgcagaaaaacaaccaacaaaatgataacagcaaagccgatggccagctggtctcgagtgaaaagaaggcgaacatgaatctgaaagacctttccaagattagggggagaaagagaggcaaacctggaacccactttactcagagtgacagagctccacagaaaagagtccgatcaagagcttcaagaaagcacaaagatgaaactgtggattttcaggctcctttacttccagtgacctgtggtggggtgaagggaattttacataaggagaaattggaacaaggaaccttggcaaagtgtatacagactgaggatggaaaatggttcacccccatggaatttgaaatcaaaggaggctacgcaagatcaaagaactggaggctgagtgtgcgctgtggcgggtggcccctacgacggctgatggaggaaggatctctacctaatcctccaagaatatattacaggaacaaaaagagaatactgaagtctcaaaacaatagctcagttgacccttgtatgagaaacttggatgagtgtgaggtgtgccgggacggaggggagctgttctgttgcgacacttgttcaagagtcttccatgaggactgccacatcccacctgtggaaagtgagaagaccccgtggaattgcatcttctgcaggatgaaggagtctccgggaagccaacagtgttgtcaggaatctgaggtcctggagaggcagatgtgtcctgaggaacagttgaaatgtgagttcctcctcttgaaagtctattgctgttctgagagctccttttttgccaagattccatactattattatattagagaggcgtgtcaaggcctgaaggagcccatgtggttggataaaatcaagaaaaggctgaatgagcacggttacccccaagtggaggggtttgtacaagacatgcgcctcatcttccagaaccacagggcctcttacaagtataaggattttggccaaatgggacttagactggaggctgaatttgagaaggatttcaaggaagtgtttgctattcaggaaacaaatgggaacagttgactggtttagtggatgctgaaggccttcaggaaatatgctactggttgccactgacttcaaactgagagcacttgggaaatagcacatgcagggagaggcttttctctgagcctccctcatctgcccaaaaacaaatcctcaaaagaaatttgatcatcatgaatcccatccccaagaatctcatcaaccagggaagaggaactgagatcacagggaaggagattggaggtgataccagcacagacagactctcacctcttctcctgaggtctgctccagacaacatttattactcacaagacctttttcctccgttttttttttgagatggagtctcacacagtcacccgggattggaatgcaatggcgcgatctcagctcactgcaacctctgcctcccggattcaagtgattctcctgtctcagcctcccaagtagctgggattacagtgcctgccaccatgcccagctaattttttgcatttttagtagagacggggtttcactatgttggccaggctggtctcgaactcctgacctcatgagccgcccgccttggcctcccaaagtgctgggacgtgacaggagtgagccaccacacctggccactcgcaagaccttttatctgaaaaccagccaagctttattcacgacacacttcttcccttcactctcccacttctgtggtcaactccctgcagaactcccaaactgccgttcttttcgatagctcacgatggtgtatgagtgtcaatcatctgacccttcttggagtctcatatttcgtggaactcctgtgcaaacatatattattaaattttttttcctcctgtc

SEQ ID NO: 185105 - DNA, 2397 bp, Homo sapiens
  Payload ID: 16447
  Gene Symbol: SP140L
  Gene Name: SP140 nuclear body protein-like
  ENST ID: ENST00000396563
  CDS Start-End: 1-1563
atggcaggtgggggcagcgacctgagcaccaggctgttcacggaagaccaggatgtagatgagggacttgtctatgacactgtattcaagcacttcaaaagacataagctggagatatcaaatgcaataaaaaagacatttccattccttgagggcctccgcgatcgggaactcatcacaaataaaatgtttgaagattctgaagattcttgtagaaacctggtccctgtacaaagagtggtgtacaatgttctcagtgaactggagaagacatttaacctgtcagttttggaagcactgttcagcgaggtcaacatgcaggaataccccgatttaattcacatttataaaagcttcaaaaatgcaatccaagacaaattgtctttccaagaaagtgatcgaaaagaaagggaagagaggcctgacatcaaactaagtcttaaacaaggagaagtgccagaaagcccggaagcaaggaaggaaagtgaccaagcatgtggcaaaatggatactgtggatattgcaaacaactctactttgggaaaacccaagaggaaaagaagaaaaaagaaggggcatggctggagcagaatgggaacgagaacgcagaaaaacaaccaacaaaatgataacagcaaagccgatggccagctggtctcgagtgaaaagaaggcgaacatgaatctgaaagacctttccaagattagggggagaaagagaggcaaacctggaacccactttactcagagtgacagagctccacagaaaagagtccgatcaagaggaaccttggcaaagtgtatacagactgaggatggaaaatggttcacccccatggaatttgaaatcaaaggaggctacgcaagatcaaagaactggaggctgagtgtgcgctgtggcgggtggcccctacgacggctgatggaggaaggatctctacctaatcctccaagaatatattacaggaacaaaaagagaatactgaagtctcaaaacaatagctcagttgacccttgtatgagaaacttggatgagtgtgaggtgtgccgggacggaggggagctgttctgttgcgacacttgttcaagagtcttccatgaggactgccacatcccacctgtggaaagtgagaagaccccgtggaattgcatcttctgcaggatgaaggagtctccgggaagccaacagtgttgtcaggaatctgaggtcctggagaggcagatgtgtcctgaggaacagttgaaatgtgagttcctcctcttgaaagtctattgctgttctgagagctccttttttgccaagattccatactattattatattagagaggcgtgtcaaggcctgaaggagcccatgtggttggataaaatcaagaaaaggctgaatgagcacggttacccccaagtggaggggtttgtacaagacatgcgcctcatcttccagaaccacagggcctcttacaagtataaggattttggccaaatgggacttagactggaggctgaatttgagaaggatttcaaggaagtgtttgctattcaggaaacaaatgggaacagttgactggtttagtggatgctgaaggccttcaggaaatatgctactggttgccactgacttcaaactgagagcacttgggaaatagcacatgcagggagaggcttttctctgagcctccctcatctgcccaaaaacaaatcctcaaaagaaatttgatcatcatgaatcccatccccaagaatctcatcaaccagggaagaggaactgagatcacagggaaggagattggaggtgataccagcacagacagactctcacctcttctcctgaggtctgctccagacaacatttattactcacaagacctttttcctccgttttttttttgagatggagtctcacacagtcacccgggattggaatgcaatggcgcgatctcagctcactgcaacctctgcctcccggattcaagtgattctcctgtctcagcctcccaagtagctgggattacagtgcctgccaccatgcccagctaattttttgcatttttagtagagacggggtttcactatgttggccaggctggtctcgaactcctgacctcatgagccgcccgccttggcctcccaaagtgctgggacgtgacaggagtgagccaccacacctggccactcgcaagaccttttatctgaaaaccagccaagctttattcacgacacacttcttcccttcactctcccacttctgtggtcaactccctgcagaactcccaaactgccgttcttttcgatagctcacgatggtgtatgagtgtcaatcatctgacccttcttggagtctcatatttcgtggaactcctgtgcaaacatatattattaaattttttttcctcctgtc

SEQ ID NO: 185106 - DNA, 1781 bp, Homo sapiens
  Payload ID: 16447
  Gene Symbol: SP140L
  Gene Name: SP140 nuclear body protein-like
  Uniprot ID: Q9H930
  ENST ID: ENST00000444636
  CDS Start-End: 87-1403
agggcagccacactgcacgcaggctgggccgactggggagctcataggccaggctctgacacccaggcagggcctagggtgggacgatggcaggtgggggcagcgacctgagcaccagggggctgaacggaggtgtttcacaagtagcaaatgagatgaaccatcttcctgcacacagccaaagtctgcaaaggctgttcacggaagaccaggatgtagatgagggacttgtctatgacactgtattcaagcacttcaaaagacataagctggagatatcaaatgcaataaaaaagacatttccattccttgagggcctccgcgatcgggaactcatcacaaataaaatgtttgaagattctgaagattcttgtagaaacctggtccctgtacaaagagtggtgtacaatgttctcagtgaactggagaagacatttaacctgtcagttttggaagcactgttcagcgaggtcaacatgcaggaataccccgatttaattcacatttataaaagcttcaaaaatgcaatccaagacaaattgtctttccaagaaagtgatcgaaaagaaagggaagagaggcctgacatcaaactaagtcttaaacaaggagaagtgccagaaagcccggaagcaaggaaggaaagtgaccaagcatgtggcaaaatggatactgtggatattgcaaacaactctactttgggaaaacccaagaggaaaagaagaaaaaagaaggggcatggctggagcagaatgggaacgagaacgcagaaaaacaaccaacaaaatgataacagcaaagccgatggccagctggtctcgagtgaaaagaaggcgaacatgaatctgaaagacctttccaagattagggggagaaagagaggcaaacctggaacccactttactcagagtgacagagctccacagaaaagagtccgatcaagagcttcaagaaagcacaaagatgaaactgtggattttcaggctcctttacttccagtgacctgtggtggggtgaagggaattttacataaggagaaattggaacaaggaaccttggcaaagtgtatacagactgaggatggaaaatggttcacccccatggaatttgaaatcaaaggaggctacgcaagatcaaagaactggaggctgagtgtgcgctgtggcgggtggcccctacgacggctgatggaggaaggatctctacctaatcctccaagaatatattacaggaacaaaaagagaatactgaagtctcaaaacaatagctcagttgacccttgtatgagaaacttggatgagtgtgaggtgtgccgggacggaggggagctgttctgttgcgacacttgttcaagagtcttccatgaggactgccacatcccacctgtggaaagtgagaagtaagtgacatgcaggcacctctctttcatcctttaagggaccttccacctgccatgcgcactctccagcagaatgtctgcttgtgtctagatggggaaggagcaggttcatcgggtactgggacccagcagtgtgatccagagagcagtgggagacgctggcagcaggaggtaaatgctctctgtgctctcagggacacctcctctgatatgctgaggccagtgttggggacctttgcctacatactggtattgtcctttccttgaagttttgcagtagggtctcctgtcccagggggttgaggaaaaaaaacaccagttgtttatattttgtgcttattcatacaagacaggaagcacggtcttaggcggatggaggcct

SEQ ID NO: 185107 - DNA, 1727 bp, Homo sapiens
  Payload ID: 16447
  Gene Symbol: SP140L
  Gene Name: SP140 nuclear body protein-like
  Uniprot ID: Q9H930
  ENST ID: ENST00000458341
  CDS Start-End: 259-648
ggcgggcgcccctcccccagcgtcactgccgccttgcagtttgatctcagactgctgtgctagcaatcagtgagagtccgtgggcgtaggaccttccgagccaggctgttcacggaagaccaggatgtagatgagggacttgtctatgacactgtattcaagcacttcaaaagacataagctggagatatcaaatgcaataaaaaagacatttccattccttgagggcctccgcgatcgggaactcatcacaaataaaatgtttgaagattctgaagattcttgtagaaacctggtccctgtacaaagagtggtgtacaatgttctcagtgaactggagaagacatttaacctgtcagttttggaagcactgttcagcgaggtcaacatgcaggaataccccgatttaattcacatttataaaagcttcaaaaatgcaatccaagacaaattgtctttccaagaaagtgatcgaaaagaaagggaagagaggcctgacatcaaactaagtcttaaacaaggagaagtgccagaaagcccggaagcaaggaaggaaagtgaccaagcatgtggcaaaatggatactgtggatattgcaaacaactctactttgggaaaacccaagaggaaaagaagtaagaataaataagaatttacttgcttttgatgttacaaatacatttttaatgccagagttttctttttgtcattgttactgtttctgttattatttgcaatactgtggtagagagaatgatggccaccccaaaaaacgtccacctcctaatccctggacctgtaatctgctatcttacatggcaaacgggactttacagatacaattaatttagagaccttgaaatggggagatgatcctgggttatgtggtgggcccaatctaatcttgtaggctttaaagagtggagaacttttcctggctgtggagaaaggaaaatgtgactatggaagagtcatcagaaacatgtaatgttgcaggctttgaagatggaagagggaaccaaggaatgtggatgacctctagaagctgaaaaaacaaggaaatagtttgtcctttccagcccccagaaaggaatgaaggcctacaccttgactttaggcagtaagacccgtgtcacacttctcactgacataactggaagataatatatttgtgttgttttaaaccactaaatttgtggtaatttgttatggcagcaattaagagtaatacggattttagtacttggcagtggggtgtggctatcacatattcctgaaagtgttggggtgtctttgagattgcgcagtggaaagaggttggaagaattttaaatagagtgataggaaaatcctagatgaaaaaatggaaattaagtcaattaataaccctacaatggcctgtaagtgctcaagttaaagaaagagtcggccgggcgcggtggctcacgcctgtaatcctagcactttgggaggccgagacgggcggatcacgaggtcaggagatcgagaccatcttggctaacacggtgaaaccccgtttctactaaaaatacaaaaaattagccgggcgtgttggcgggcacctgtagtcccagctgcttgggaggctgaggcaggagaatggcatgaacctgggaggcggagcttgcagtgagccaggatcgcgccactgcactccaacctgggagacacagcgagactccgtctcaaaaaaaaaaaaaaaaaaaa

SEQ ID NO: 185108 - DNA, 2665 bp, Homo sapiens
  Payload ID: 16447
  Gene Symbol: SP140L
  Gene Name: SP140 nuclear body protein-like
  Uniprot ID: Q9H930
  ENST ID: ENST00000415673
  CDS Start-End: 87-1829
agggcagccacactgcacgcaggctgggccgactggggagctcataggccaggctctgacacccaggcagggcctagggtgggacgatggcaggtgggggcagcgacctgagcaccagggggctgaacggaggtgtttcacaagtagcaaatgagatgaaccatcttcctgcacacagccaaagtctgcaaaggctgttcacggaagaccaggatgtagatgagggacttgtctatgacactgtattcaagcacttcaaaagacataagctggagatatcaaatgcaataaaaaagacatttccattccttgagggcctccgcgatcgggaactcatcacaaataaaatgtttgaagattctgaagattcttgtagaaacctggtccctgtacaaagagtggtgtacaatgttctcagtgaactggagaagacatttaacctgtcagttttggaagcactgttcagcgaggtcaacatgcaggaataccccgatttaattcacatttataaaagcttcaaaaatgcaatccaagacaaattgtctttccaagaaagtgatcgaaaagaaagggaagagaggcctgacatcaaactaagtcttaaacaaggagaagtgccagaaagcccggaagcaaggaaggaaagtgaccaagcatgtggcaaaatggatactgtggatattgcaaacaactctactttgggaaaacccaagaggaaaagaagaaaaaagaaggggcatggctggagcagaatgggaacgagaacgcagaaaaacaaccaacaaaatgataacagcaaagccgatggccagctggtctcgagtgaaaagaaggcgaacatgaatctgaaagacctttccaagattagggggagaaagagaggcaaacctggaacccactttactcagagtgacagagctccacagaaaagagtccgatcaagagcttcaagaaagcacaaagatgaaactgtggattttcaggctcctttacttccagtgacctgtggtggggtgaagggaattttacataaggagaaattggaacaaggaaccttggcaaagtgtatacagactgaggatggaaaatggttcacccccatggaatttgaaatcaaaggaggctacgcaagatcaaagaactggaggctgagtgtgcgctgtggcgggtggcccctacgacggctgatggaggaaggatctctacctaatcctccaagaatatattacaggaacaaaaagagaatactgaagtctcaaaacaatagctcagttgacccttgtatgagaaacttggatgagtgtgaggtgtgccgggacggaggggagctgttctgttgcgacacttgttcaagagtcttccatgaggactgccacatcccacctgtggaaagtgagaagaccccgtggaattgcatcttctgcaggatgaaggagtctccgggaagccaacagtgttgtcaggaatctgaggtcctggagaggcagatgtgtcctgaggaacagttgaaatgtgagttcctcctcttgaaagtctattgctgttctgagagctccttttttgccaagattccatactattattatattagagaggcgtgtcaaggcctgaaggagcccatgtggttggataaaatcaagaaaaggctgaatgagcacggttacccccaagtggaggggtttgtacaagacatgcgcctcatcttccagaaccacagggcctcttacaagtataaggattttggccaaatgggacttagactggaggctgaatttgagaaggatttcaaggaagtgtttgctattcaggaaacaaatgggaacagttgactggtttagtggatgctgaaggccttcaggaaatatgctactggttgccactgacttcaaactgagagcacttgggaaatagcacatgcagggagaggcttttctctgagcctccctcatctgcccaaaaacaaatcctcaaaagaaatttgatcatcatgaatcccatccccaagaatctcatcaaccagggaagaggaactgagatcacagggaaggagattggaggtgataccagcacagacagactctcacctcttctcctgaggtctgctccagacaacatttattactcacaagacctttttcctccgttttttttttgagatggagtctcacacagtcacccgggattggaatgcaatggcgcgatctcagctcactgcaacctctgcctcccggattcaagtgattctcctgtctcagcctcccaagtagctgggattacagtgcctgccaccatgcccagctaattttttgcatttttagtagagacggggtttcactatgttggccaggctggtctcgaactcctgacctcatgagccgcccgccttggcctcccaaagtgctgggacgtgacaggagtgagccaccacacctggccactcgcaagaccttttatctgaaaaccagccaagctttattcacgacacacttcttcccttcactctcccacttctgtggtcaactccctgcagaactcccaaactgccgttcttttcgatagctcacgatggtgtatgagtgtcaatcatctgacccttcttggagtctcatatttcgtggaactcctgtgcaaacatatattattaaattttttttcctcctgtcaa

SEQ ID NO: 185109 - DNA, 3112 bp, Homo sapiens
  Payload ID: 16448
  Gene Symbol: SP2
  Gene Name: Sp2 transcription factor
  Uniprot ID: Q02086
  ENST ID: ENST00000376741
  CDS Start-End: 138-1979
aatgttccaagcgcttattggtgaaggctgccgtcgctcgggcggtggcgggctccgggattggcggttgcttggcgggcggtgtcaggctctcggtggcggcggaggcggcggaggccagggaggaagatgtcgtaatgagcgatccacagaccagcatggctgccactgctgctgtgagtcccagtgactacctgcagcctgccgcctccaccacccaggactcccagccatctcccttagccctgcttgctgcaacatgtagcaaaattggccctccagcagttgaagctgctgtgacacctcctgctcccccacagcccacaccgcggaaacttgtccctatcaaacctgcccctctccctctcagccccggcaagaatagctttggaatcttgtcctccaaaggaaatatacttcagattcaggggtcacaactgagcgcctcctatcctggagggcagctggtgttcgctatccagaatcccaccatgatcaacaaagggacccgatcaaatgccaatatccagtaccaggcggtccctcagattcaggcaagcaattcccaaaccatccaagtacagcccaatctcaccaaccagatccagatcatccctggcaccaaccaagccatcatcaccccctcaccgtccagtcacaagcctgtccccatcaagccagcccccatccagaagtcgagtacgaccaccacccccgtgcagagcggggccaatgtggtgaagctgacaggtgggggcggcaatgtgacgctcactctgcccgtcaacaaccttgtgaacgccagtgacaccggggcccctactcagctcctcactgaaagccccccaaccccgctgtctaagactaacaagaaagcaaggaagaagagccttcctgcctcccagccccctgtggctgtggctgagcaggtggagacggtgctgatcgagaccaccgcggacaacatcatccaggcaggaaataacctgctcattgttcagagccctggtgggggccagccagctgtggtccagcaggtccaggtggtgccccccaaggccgagcagcagcaggtggtacagatcccccagcaggctctgcgggtggtgcaggcggcatctgccaccctccccactgtaccccagaagccctcccagaactttcagatccaggcagctgagccgacacctactcaggtctacatccgcacgccttccggtgaggtgcagacagtccttgtccaggacagccccccagcaacagctgcagccacctctaacaccacctgtagcagccctgcatcccgtgctccccatctgagtgggaccagcaaaaagcactcagctgcaattctccgaaaagagcgtcccctgccaaagattgccccagccgggagcatcatcagcctgaatgcagcccagttggcggcagctgcccaggcaatgcagaccatcaacatcaatggtgtccaggtccagggcgtgcctgtcaccatcaccaacacaggcgggcagcagcagctgacagtgcagaatgtttctgggaacaacctgaccatcagtgggctgagccccacccagatccagctgcaaatggaacaagccctggccggagagacccagcccggggagaagcggcgccgcatggcctgcacgtgtcccaactgcaaggatggggagaagaggtctggagagcagggcaagaagaagcacgtgtgccacatccccgactgtggcaagacgttccgtaagacgtccttgctgcgtgcccatgtgcgcctgcacactggcgagcggccctttgtctgcaactggttcttctgtgggaagaggttcacacggagtgacgagctccaacggcatgctcgcacccacacaggggacaaacgcttcgagtgcgcccagtgtcagaagcgcttcatgaggagtgaccacctcaccaagcattacaagacccacctggtcacgaagaacttgtaaggccaactgcggcgggaggccctgaagatgcagtcccccacctgtgtcctccctgggcccctggtggaaaggagccctgtggctgccttgggcctgccctcagccccactcctgttctgcaactgtccccacaggaaggggctctgttccctgtattgtcctccttctgaagccccttggctctgccttggcccttcccctcaccacgagctcccggcctgcccagactgtggacactggccgtgcccaatgagacgttctaaaccaggacgcgtgggaacccttatttccaaaggaaaaacatgcatttcactccgtcgaggagcaaagtgagcccctaccccccaccccgatccccgctcccaacactgccggagtcgcgtcatgccatgccccctctcctgcacctccctggccctgccggccactgtggacgccctggggcttggcacccacctctggagaaactcggggccacctccactccatgtgcccagccccgccacaacctctcctccagcacattccagctctatttaaaaagtaaagacacccaccgactcctgatccccctctttttctatggagaacgttgccttatactctacttcagatgatgaacactgtgtactgtgtgtgctttaaagaagttttatttaattgctcccttcttcctttccttgttattcacctccctgatgcctgctttcagttgagggttgggggcaatgatgagcatatgaattttttctcactctagcaattcccttttctaaatgacacagcatttaaactcaaatctggattcagataacagcacctgcacatcctgcacctcctccctctcccttcacctcacccctgcccggcccaagctctacttgtgtacagtgtatattgtataatagacaattgtgtctactacatgtttaaaaacacattgcttgttatttttgaggcttttaaattaaacaaaaatccaactttatttttagttgtaactgcttgaggtatgttttatgaattaagtgacagatttgttatcctttattaacgtactttgttggtcagcactgggctgacaaaaattttttcttgctaataaatttagttgcctgaggcaaaatcttcaa

SEQ ID NO: 185110 - DNA, 908 bp, Homo sapiens
  Payload ID: 16448
  Gene Symbol: SP2
  Gene Name: Sp2 transcription factor
  ENST ID: ENST00000613139
  CDS Start-End: 159-908
aatgttccaagcgcttattggtgaaggctgccgtcgctcgggcggtggcgggctccgggattggcggttgcttggcgggcggtgtcaggctctcggtggcggcggaggcggcggaggccagggaggaagatgtcgtaatgagcgatccacagaccagcatggctgccactgctgctgtgagtcccagtgactacctgcagcctgccgcctccaccacccaggactcccagccatctcccttagccctgcttgctgcaacatgtagcaaaattggccctccagcagttgaagctgctgtgacacctcctgctcccccacagcccacaccgcggaaacttgtccctatcaaacctgcccctctccctctcagccccggcaagaatagctttggaatcttgtcctccaaaggaaatatacttcagattcaggggtcacaactgagcgcctcctatcctggagggcagctggtgttcgctatccagaatcccaccatgatcaacaaagggacccgatcaaatgccaatatccagtaccaggcggtccctcagattcaggcaagcaattcccaaaccatccaagtacagcccaatctcaccaaccagatccagatcatccctggcaccaaccaagccatcatcaccccctcaccgtccagtcacaagcctgtccccatcaagccagcccccatccagaagtcgagtacgaccaccacccccgtgcagagcggggccaatgtggtgaagctgacaggtgggggcggcaatgtgacgctcactctgcccgtcaacaaccttgtgaacgccagtgacaccggggcccctactcagctcctcactgcttcctgccaaactgggatgctgaattcaacaagaatgttcttatttttggcatttattaatgtgctctaa

SEQ ID NO: 185111 - DNA, 6359 bp, Homo sapiens
  Payload ID: 16449
  Gene Symbol: SP3
  Gene Name: Sp3 transcription factor
  Uniprot ID: Q02447
  ENST ID: ENST00000310015
  CDS Start-End: 532-2877
gggacgaatttcctccccagctcagctcccctacagcttggctaggcctgctccgagcgcctgcaaggtggaggaggcctgcgcctcgggcctggcagcggcagccggcgagggaggcgggcacagcggggtaaccggcgagccgtagccgctctcgaaaacctacgctgccacggccgctcattgtctctccccttccacccgggggcaaacaggaagcgcgccgcctggcagaccgacggacaggcgcctggaccaatgagcacagccgacaaagagcacggcggcgaatgagagccaagaagaggggcgggagttccgggcgggctgtcaccctcttccccccttttgggctggaggctccaccttttgtgtttcccgcacagtcaatcaaaataggaaaaaaaaatccccggaccgctccggccgtgtccgccgccgcttcccgcatcctctcccgccgccgccgccttcgctcctcaccatgtgtaaggcggcggggagccccgcctgaggtgccctaaacacactatgaccgctcccgaaaagcccgtgaaacaagaggaaatggctgccttggacgtggatagcggcggcggcggtggcggcggcggcggccacggcgagtatctgcagcagcagcaacagcacggaaacggtgcggtggcggcggcagcggcggcccaggacactcagccgtcaccgctcgctctgctggccgctacctgcagcaagatagggccgccatcgccgggcgacgacgaggaggaggcggccgccgcagccggggcccccgccgccgccggagcgacaggtgatttggcttctgcacagttaggaggagcaccaaaccgatgggaggttttgtcagccacacctacaactataaaagatgaagctggtaatctagtccagattccaagtgctgctacttcaagtgggcagtatgttcttccccttcagaatttgcagaatcaacaaatattttccgttgcaccaggatcagattcatcaaatggtacagtgtccagtgttcaatatcaagtgataccacagatccagtcagcagatggtcagcaggttcaaattggtttcacaggctcttcagataatgggggtataaatcaagaaagcagtcaaattcagatcattcctggctctaatcaaaccttacttgcctctggaacaccttctgctaacatccagaatctcataccacagactggtcaagtccaggttcagggagttgcaattggtggttcatcttttcctggtcaaacccaagtagttgctaatgtgcctcttggtctgccaggaaatattacgtttgtaccaatcaatagtgtcgatctagattctttgggactctcgggcagttctcagacaatgactgcaggcattaatgccgacggacatttgataaacacaggacaagctatggatagttcagacaattcagaaaggactggtgagcgggtttctcctgatattaatgaaactaatactgatacagatttatttgtgccaacatcctcttcatcacagttgcctgttacgatagatagtacaggtatattacaacaaaacacaaatagcttgactacatctagtgggcaggttcattcttcagatcttcagggaaattatatccagtcgcctgtttctgaagagacacaggcacagaatattcaggtttctacagcacagcctgttgtacagcatctacaacttcaagagtctcagcagccaaccagtcaagcccaaattgtgcaaggtattacaccacagacaatccatggtgtgcaagccagtggtcaaaatatatcacaacaggctttgcaaaatcttcagttgcagctgaatcctggaacctttttaattcaggcacagacagtgaccccttctggacaggtaacttggcaaacgtttcaagtacaaggggtccagaacttgcagaatttgcaaatacagaatactgctgcccaacaaataactttgacgcctgttcaaaccctcacacttggtcaagttgcggcaggtggagccttcacttcaactccagttagtctaagcactggtcagttgccaaatctacaaacagttacagtgaactctatagattctgctggtatacagctacatccaggagagaatgctgacagtcctgcagatattaggatcaaggaagaagaacctgatcctgaagagtggcagctcagtggtgattctaccttgaataccaatgacctaacacacttaagagtacaggtggtagatgaagaaggggaccaacaacatcaagaaggaaaaagacttcggagggtagcttgcacctgtcccaactgtaaagaaggtggtggaagaggtaccaatcttgggaaaaagaagcaacacatttgtcatataccaggatgtggtaaagtctatgggaagacctcacatctgagagctcatctgcgttggcattctggagaacgcccttttgtttgtaactggatgtactgtggtaaaagatttactcgaagtgatgaattacagaggcacagaagaacacatacaggtgagaagaaatttgtttgtccagaatgttcaaaacgctttatgagaagtgaccaccttgccaaacatattaaaacacaccagaataaaaaaggtattcactctagcagtacagtgctggcatctgtggaagctgcgcgagatgatactttgattactgcaggaggaacaacgcttatccttgcaaatattcaacaaggttctgtttcagggataggaactgttaatacttccgccaccagcaatcaagatatccttaccaacactgaaatacctttacagcttgtcacagtttctggaaatgagacaatggagtaaatattacacaaatacttattcattgtggttatttttatacagtagtgagaagaatattgttcctaagttcttagatatctttttattgatgtgcaaaaatttttggattgacagtaacttggttatacatgacactgaaatgccttactttgtatgatattccatagtatattaaaaatggtaaaattgcatgggttttgtaggtacttttggaatctagaagaaatgaaattttaccaagttatataaagagaaaattgaatttaacaatgcgaatggtagtctaaccaaatgcatcaatcctgtgtggtttagtgtaaaaatgagaacatgttggtatttatctattgtaagataaaaaagctggtgggtgaaagaaatcatgttatgataaaaaattttgtaattttcttgatgactggaatttttattatgcataactgacaaatcaagtttccaagcaaatgttacatagtgtaggctttacttagcttatcaatttgtcattttgaagctaattattttaattaggttaactatgtacaatattttaagcattactcttgtaagattttgaaaactacattttaacatggaactctagggatagtcaccttttaaatcctgttgaaaagccatgtttaagatttaatttgccaaaataatgtcttgttaatattctttcaataacgaagttgggcaatataaccaatgtttaaaaaagtttaaaatgtataagttgaggcatttgggtggtaagagaatgttatagtgaattatcccttttcttgactattggaggaccaaaaaaataaggtgtattgcgtcttagcagtgatttttatccaatcttgtttccaaaaaccatgtctcccagggccttaaaagccatcatgtaaattaccagtaaagtgtaacatatgcaaacataacaaaatcacttccatagtgacgatactccaaccatatggatattagtcatagaagaactagaggttttatgatatttttttaagtcttttttttttttgtctaggtagtcagtctgcacttaaatatcaatcattttccttttttgcttcttcccttaaaatttatatgtatccagtacatttaattgagaagcgtatgttttttattatgctgtattttctttttattttttaattattgtttatattttcaattcaaaaatgtacaaaataaagttacattgctggtcttgtaagagctatacagttttcctaaatgtatacctgtaactgcagcagttcacctatttcaaaaatttggaattctgttcatttgttattcttaagaccacctcaaatttaaaggctaccttattgtacgtttaaagtgtattataacagtgtggtagttaataaaacactatttttttttcttttgagtttgttgtattcctatgcataaaaaatattgcagtggtatggggtaagaattggtggtttatttttcttcaacttggctttttatttttagattcttgattttagacactgaattgtaaacaggcatttatttgaagaagagatatatagagacactggtcatttactaattttttacctagagtaaataagaatgagcttattaaataaaatttttgaaaaaaagtcttagcccttagcccacattgattcatatcagttttatcagtaccattttgcaatttttttgttttccgttttaaagcaatgcagaatattttgatttatcgaaaacctgaatttacattaagactcctgaaaatgataagacaagcgttggtaaccatggcaggagttacttgaaaaagttgcctttgaatttgcatgtgtttcatcattataaaggcagagtaggaggaaagagtattaatgtgattgtgtattgtagatgttttaaagtaaaaatcaagtttcttaacacatgtatacagtgggggtaaagatgtccattttctgttttccaggcccagtctgactctgtctgtaatacctgattgcattggagaactctagacacgcataaacatggacagtttttctaaatgtgagacttaagcctgtgatgtaaaataggaagttctacttggaataatataaaggaaccactagaatttacaattattttgaagttacagggattagattttgaatcttaaaatcctttaggtaatttttagaatttttaaattaagattaatgtgaagagaattaagtgagcagcaggtggttcacttgagcaaactgcccattaagtcagattaaaccatttgaatgatagtagagatgttttaagtaatactggatttttacagtaagtttatggtgtactttgaatcgataggtgtccatgcatattttatgaattcgtggagaatgaatgcaatgaagaaagtaagtagtcttgaaaattatttaaataaagttgtagatttttttagtgccccctaggaatatattagtgaactttggaacttttaccaaagttatgtaacctcagtgtagataattttaaatatttctatttttatattttaaaatgttgaatatactctggaaacaacatttgaagatttgctctgatgtcaactttttctggttataaaacctattagtattgtgtataattctcagggtaggtatactctaataggtgttttgtcaattgctttatttttgtaaaggctagagttagtgcatattgaatatatttatgtacaaataattcctgttgtaacatttagtggacgcgattatctgtatacctcaaattttaatttaagaaagtatcacttaaagagcatctcattttctatagattgaggcttaattactgaaaagtgactcaaccaaaaagcacataaccttttaaaggagctacacctaccgcagaaagtcagatgccctgtaaataactttggtctttcaaaatagtggcaatgcttaagatacttaaaaatacacatacatataagctgaaagcatgtcaagcctatttcatagaaaatagttcttaaacagtattgttcattagaaattgctggggagcattttagagattccataggcctggtagccacctcagcttactaaatcaacatctctggagatggagtgtatatgtgttttgaaacagctgctcaagtggttctgttaaacactcctgcgttacaatcacttaaaatagagcaagcatccccttaggctcttaattgtagtttaaattccagtactgcctactcagacccaaaagttttgttttatgaaaaatttgtattgtgttcaatattgtttgaaatttggggttgttgcataaatgattatggaataacatttggttttaaaataatataaactgacatgttatgctacctgttacacaatttggttttcagttttaattatatgaagctggtaacaatcgtttttgttgtaaaagaattatttttcactaaacagtatgtttaaaactga

SEQ ID NO: 185112 - DNA, 3937 bp, Homo sapiens
  Payload ID: 16449
  Gene Symbol: SP3
  Gene Name: Sp3 transcription factor
  ENST ID: ENST00000418194
  CDS Start-End: 385-2526
cctcgcccgcctgccgcctttttgtgcgcgtgtgagtgtgggccccagcgtgccctcccgggggtgggttccgggcggaaggcggaggcccggcgcgcagcccgccgcccgcctgcccgcggaccggggagccggggtgcttggagcgggggacgccaggcgtgggctggcggcgggaccaggaggaggaggaggaggaggaggagagcgcgggctggcgcttgcccgggcgcagtcggcggggaccgagtcgtacttcctgtgcgaaaggcggcccgaccctaaccgccaccccctccccctgtctccctctctgaacccgcccattgggggtaggacactcagccgtcaccgctcgctctgctggccgctacctgcagcaagatagggccgccatcgccgggcgacgacgaggaggaggcggccgccgcagccggggcccccgccgccgccggagcgacaggtgatttggcttctgcacagttaggaggagcaccaaaccgatgggaggttttgtcagccacacctacaactataaaagatgaagctggtaatctagtccagattccaagtgctgctacttcaagtgggcagtatgttcttccccttcagaatttgcagaatcaacaaatattttccgttgcaccaggatcagattcatcaaatggtacagtgtccagtgttcaatatcaagtgataccacagatccagtcagcagatggtcagcaggttcaaattggtttcacaggctcttcagataatgggggtataaatcaagaaagcagtcaaattcagatcattcctggctctaatcaaaccttacttgcctctggaacaccttctgctaacatccagaatctcataccacagactggtcaagtccaggttcagggagttgcaattggtggttcatcttttcctggtcaaacccaagtagttgctaatgtgcctcttggtctgccaggaaatattacgtttgtaccaatcaatagtgtcgatctagattctttgggactctcgggcagttctcagacaatgactgcaggcattaatgccgacggacatttgataaacacaggacaagctatggatagttcagacaattcagaaaggactggtgagcgggtttctcctgatattaatgaaactaatactgatacagatttatttgtgccaacatcctcttcatcacagttgcctgttacgatagatagtacaggtatattacaacaaaacacaaatagcttgactacatctagtgggcaggttcattcttcagatcttcagggaaattatatccagtcgcctgtttctgaagagacacaggcacagaatattcaggtttctacagcacagcctgttgtacagcatctacaacttcaagagtctcagcagccaaccagtcaagcccaaattgtgcaaggtattacaccacagacaatccatggtgtgcaagccagtggtcaaaatatatcacaacaggctttgcaaaatcttcagttgcagctgaatcctggaacctttttaattcaggcacagacagtgaccccttctggacaggtaacttggcaaacgtttcaagtacaaggggtccagaacttgcagaatttgcaaatacagaatactgctgcccaacaaataactttgacgcctgttcaaaccctcacacttggtcaagttgcggcaggtggagccttcacttcaactccagttagtctaagcactggtcagttgccaaatctacaaacagttacagtgaactctatagattctgctggtatacagctacatccaggagagaatgctgacagtcctgcagatattaggatcaaggaagaagaacctgatcctgaagagtggcagctcagtggtgattctaccttgaataccaatgacctaacacacttaagagtacaggtggtagatgaagaaggggaccaacaacatcaagaaggaaaaagacttcggagggtagcttgcacctgtcccaactgtaaagaaggtggtggaagaggtaccaatcttgggaaaaagaagcaacacatttgtcatataccaggatgtggtaaagtctatgggaagacctcacatctgagagctcatctgcgttggcattctggagaacgcccttttgtttgtaactggatgtactgtggtaaaagatttactcgaagtgatgaattacagaggcacagaagaacacatacaggtgagaagaaatttgtttgtccagaatgttcaaaacgctttatgagaagtgaccaccttgccaaacatattaaaacacaccagaataaaaaaggtattcactctagcagtacagtgctggcatctgtggaagctgcgcgagatgatactttgattactgcaggaggaacaacgcttatccttgcaaatattcaacaaggttctgtttcagggataggaactgttaatacttccgccaccagcaatcaagatatccttaccaacactgaaatacctttacagcttgtcacagtttctggaaatgagacaatggagtaaatattacacaaatacttattcattgtggttatttttatacagtagtgagaagaatattgttcctaagttcttagatatctttttattgatgtgcaaaaatttttggattgacagtaacttggttatacatgacactgaaatgccttactttgtatgatattccatagtatattaaaaatggtaaaattgcatgggttttgtaggtacttttggaatctagaagaaatgaaattttaccaagttatataaagagaaaattgaatttaacaatgcgaatggtagtctaaccaaatgcatcaatcctgtgtggtttagtgtaaaaatgagaacatgttggtatttatctattgtaagataaaaaagctggtgggtgaaagaaatcatgttatgataaaaaattttgtaattttcttgatgactggaatttttattatgcataactgacaaatcaagtttccaagcaaatgttacatagtgtaggctttacttagcttatcaatttgtcattttgaagctaattattttaattaggttaactatgtacaatattttaagcattactcttgtaagattttgaaaactacattttaacatggaactctagggatagtcaccttttaaatcctgttgaaaagccatgtttaagatttaatttgccaaaataatgtcttgttaatattctttcaataacgaagttgggcaatataaccaatgtttaaaaaagtttaaaatgtataagttgaggcatttgggtggtaagagaatgttatagtgaattatcccttttcttgactattggaggaccaaaaaaataaggtgtattgcgtcttagcagtgatttttatccaatcttgtttccaaaaaccatgtctcccagggccttaaaagccatcatgtaaattaccagtaaagtgtaacatatgcaaacataacaaaatcacttccatagtgacgatactccaaccatatggatattagtcatagaagaactagaggttttatgatatttttttaagtcttttttttttttgtctaggtagtcagtctgcacttaaatatcaatcattttccttttttgcttcttcccttaaaatttatatgtatccagtacatttaattgagaagcgtatgttttttattatgctgtattttctttttattttttaattattgtttatattttcaattcaaaaatgtacaaaataaagttacattgctggtcttgtaagagctatacagttttcctaaatgtatacctgtaactgcagcagttcacctatttcaaaaatttggaattctgttcatttgttattcttaagaccacctcaaatttaaaggctaccttattgtacgtttaaagtgtattataacagtgtggtagttaataaaacactatttttttttcttttga

SEQ ID NO: 185113 - DNA, 3627 bp, Homo sapiens
  Payload ID: 16449
  Gene Symbol: SP3
  Gene Name: Sp3 transcription factor
  ENST ID: ENST00000416195
  CDS Start-End: 1-2216
ctcccgaaaagcccgtgaaacaagaggaaatggctgccttggacgtggatagcggcggcggcggtggcggcggcggcggccacggcgagtatctgcagcagcagcaacagcacggaaacggtgcggtggcggcggcagcggcggcccagacaggtgatttggcttctgcacagttaggaggagcaccaaaccgatgggaggttttgtcagccacacctacaactataaaagatgaagctggtaatctagtccagattccaagtgctgctacttcaagtgggcagtatgttcttccccttcagaatttgcagaatcaacaaatattttccgttgcaccaggatcagattcatcaaatggtacagtgtccagtgttcaatatcaagtgataccacagatccagtcagcagatggtcagcaggttcaaattggtttcacaggctcttcagataatgggggtataaatcaagaaagcagtcaaattcagatcattcctggctctaatcaaaccttacttgcctctggaacaccttctgctaacatccagaatctcataccacagactggtcaagtccaggttcagggagttgcaattggtggttcatcttttcctggtcaaacccaagtagttgctaatgtgcctcttggtctgccaggaaatattacgtttgtaccaatcaatagtgtcgatctagattctttgggactctcgggcagttctcagacaatgactgcaggcattaatgccgacggacatttgataaacacaggacaagctatggatagttcagacaattcagaaaggactggtgagcgggtttctcctgatattaatgaaactaatactgatacagatttatttgtgccaacatcctcttcatcacagttgcctgttacgatagatagtacaggtatattacaacaaaacacaaatagcttgactacatctagtgggcaggttcattcttcagatcttcagggaaattatatccagtcgcctgtttctgaagagacacaggcacagaatattcaggtttctacagcacagcctgttgtacagcatctacaacttcaagagtctcagcagccaaccagtcaagcccaaattgtgcaaggtattacaccacagacaatccatggtgtgcaagccagtggtcaaaatatatcacaacaggctttgcaaaatcttcagttgcagctgaatcctggaacctttttaattcaggcacagacagtgaccccttctggacaggtaacttggcaaacgtttcaagtacaaggggtccagaacttgcagaatttgcaaatacagaatactgctgcccaacaaataactttgacgcctgttcaaaccctcacacttggtcaagttgcggcaggtggagccttcacttcaactccagttagtctaagcactggtcagttgccaaatctacaaacagttacagtgaactctatagattctgctggtatacagctacatccaggagagaatgctgacagtcctgcagatattaggatcaaggaagaagaacctgatcctgaagagtggcagctcagtggtgattctaccttgaataccaatgacctaacacacttaagagtacaggtggtagatgaagaaggggaccaacaacatcaagaaggaaaaagacttcggagggtagcttgcacctgtcccaactgtaaagaaggtggtggaagaggtaccaatcttgggaaaaagaagcaacacatttgtcatataccaggatgtggtaaagtctatgggaagacctcacatctgagagctcatctgcgttggcattctggagaacgcccttttgtttgtaactggatgtactgtggtaaaagatttactcgaagtgatgaattacagaggcacagaagaacacatacaggtgagaagaaatttgtttgtccagaatgttcaaaacgctttatgagaagtgaccaccttgccaaacatattaaaacacaccagaataaaaaaggtattcactctagcagtacagtgctggcatctgtggaagctgcgcgagatgatactttgattactgcaggaggaacaacgcttatccttgcaaatattcaacaaggttctgtttcagggataggaactgttaatacttccgccaccagcaatcaagatatccttaccaacactgaaatacctttacagcttgtcacagtttctggaaatgagacaatggagtaaatattacacaaatacttattcattgtggttatttttatacagtagtgagaagaatattgttcctaagttcttagatatctttttattgatgtgcaaaaatttttggattgacagtaacttggttatacatgacactgaaatgccttactttgtatgatattccatagtatattaaaaatggtaaaattgcatgggttttgtaggtacttttggaatctagaagaaatgaaattttaccaagttatataaagagaaaattgaatttaacaatgcgaatggtagtctaaccaaatgcatcaatcctgtgtggtttagtgtaaaaatgagaacatgttggtatttatctattgtaagataaaaaagctggtgggtgaaagaaatcatgttatgataaaaaattttgtaattttcttgatgactggaatttttattatgcataactgacaaatcaagtttccaagcaaatgttacatagtgtaggctttacttagcttatcaatttgtcattttgaagctaattattttaattaggttaactatgtacaatattttaagcattactcttgtaagattttgaaaactacattttaacatggaactctagggatagtcaccttttaaatcctgttgaaaagccatgtttaagatttaatttgccaaaataatgtcttgttaatattctttcaataacgaagttgggcaatataaccaatgtttaaaaaagtttaaaatgtataagttgaggcatttgggtggtaagagaatgttatagtgaattatcccttttcttgactattggaggaccaaaaaaataaggtgtattgcgtcttagcagtgatttttatccaatcttgtttccaaaaaccatgtctcccagggccttaaaagccatcatgtaaattaccagtaaagtgtaacatatgcaaacataacaaaatcacttccatagtgacgatactccaaccatatggatattagtcatagaagaactagaggttttatgatatttttttaagtcttttttttttttgtctaggtagtcagtctgcacttaaatatcaatcattttccttttttgcttcttcccttaaaatttatatgtatccagtacatttaattgagaagcgtatgttttttattatgctgtattttctttttattttttaattattgtttatattttcaattcaaaaatgtacaaaataaagttacattgctggtcttgtaagagctatacagttttcctaaatgtatacctgtaactgcagcagttcacctatttcaaaaatttggaattctgttcatttgttattcttaagaccacctcaaatttaaaggctaccttattgtacgtttaaagtgtattataacagtgtggtagttaataaaacactatttttttttcttttga

SEQ ID NO: 185114 - DNA, 6126 bp, Homo sapiens
  Payload ID: 16450
  Gene Symbol: SP4
  Gene Name: Sp4 transcription factor
  Uniprot ID: Q02446
  ENST ID: ENST00000222584
  CDS Start-End: 219-2573
atcaagggcgagtcagccgggctcgggcggagagaggagctgctacgccacagcccagcggcggccattcgcggaaaaagaggcagagcctgtgccagctacagcctcctccgagccaccgcgggcgggcgggaccggcctctcctcccgcctcgcccccacccccacccacctctatcccagtgtctccgtctgagggtttgtcctgttaatgcgggatgagcgatcagaagaaggaggaggaggaggaggcggcagcggcagcggcgatggctacagaaggagggaaaacctctgagccagagaataacaataaaaaacccaaaacctcaggctcccaggactctcagccctctcctctggctttactggcagctacttgcagcaaaatagggactcctggtgaaaatcaagcaactggacaacaacaaattattatagatccaagtcaaggattggtgcaacttcaaaatcaaccacaacagctagaactggtaacaacgcaacttgctggaaacgcttggcaacttgttgcctccactcctcctgcttcaaaagagaataacgtttctcaaccagcctctagttcgtctagttcttccagcagtaataacgggagtgcatctcctacaaaaactaaatcaggtaattcttccacccctggtcaatttcaagtcatacaagtacaaaatccaagtggtagtgtacagtaccaagtaattccacaacttcagacagtggaaggtcaacaaattcaaatcaatccaactagtagttcatctctacaggatttgcagggtcaaattcagctcatttctgcaggtaataatcaagctatactcacagctgctaacaggacagcttctgggaatattcttgctcaaaacctggcaaatcagacagttccggtccaaattagacctggtgtttcaataccactgcagttacagactcttcctggtactcaggctcaagttgtaacaaccctaccaattaacattggaggagtgactctagctttgccagtgataaacaacgtggctgccggaggagggactgggcaggttggccagcctgctgctactgctgatagtgggacttccaatgggaatcaattagtttccacacccaccaacaccactacttctgccagtactatgccagaatctccctcctcctccactacctgcacaaccactgcttcaacgtctttgacaagcagtgacacattagtgagctcagcagatactggccagtatgcaagcacatcagccagtagttctgaacgcaccattgaagaatctcaaacacctgctgctactgagtctgaagcccagagctccagtcagcttcagcctaatggaatgcagaatgcacaggatcaatcaaattctcttcagcaggtgcaaattgtaggccaacctatcttacagcagatccagatccaacagcctcagcaacagatcattcaggctattccaccacagtcgtttcaactccagtcagggcagacgattcagaccatccagcagcagcctttacagaatgttcaacttcaagcagtaaatccgactcaggtgcttatcagggctccaactttaacaccttcagggcaaatcagttggcaaactgtacaggttcagaatattcagagtctttcaaatttgcaagttcagaatgctgggttatcccaacaattaaccatcaccccagtgtcttcaagtggtggcacaactcttgctcagattgctcctgtggctgttgctggtgccccaataactttgaatactgcccagcttgcatcagtgcctaaccttcagacagtgagcgttgccaacctgggtgctgcaggtgttcaagtgcagggagttcccgttacaatcactagtgttgcaggtcagcagcaaggacaagatggagtaaaagtccagcaagctactatagctcctgtaactgtagcagttggaggaattgctaatgccacgataggtgctgttagtcctgaccaactcacacaagtgcatttgcagcaaggccagcagacttctgatcaagaggtacaacctggcaagaggcttcgaagagttgcctgttcctgtcctaattgtagggaaggagaaggaagaggcagtaatgaaccaggaaaaaagaagcagcatatctgtcatattgaaggatgtggtaaagtttatggcaaaacatctcatttacgagcacatcttcgctggcatactggagaaagaccttttatatgcaactggatgttttgtggcaaaagattcacacggagtgatgagctccagagacatagaagaacccatacaggtgaaaagagatttgaatgcccggaatgttctaaaaggtttatgcggagtgatcatctctccaaacatgtcaaaacgcaccagaataaaaaaggtggtgggacagctcttgccattgttacctcgggagaactggactcatctgttacagaggtgcttggctccccaagaattgtcacagttgcagccatttctcaagattcgaatccagcaactcccaatgtttcaaccaacatggaagaattctgaaaagttatttataacagagacctctagtgctgcacttgtttacacacctttgaaaatctggaaatgggctggtcaagtggattacagagtaggaaattatgttttcattcttggcttctttaagtattccagggtttggggtcaacacgtgaagtgttgaattttaaaaaatacaaaaagcagactgatgtactggaaacagaaaagtatttcctccatactataagttgtagttgtttggaaatatatcacataacctttatacagaatcttcccatctcttaatatcatgtgttaacatgtttaaaaagaccttagtagtttgcaggctggaccttaattggacttattttctttgaaagtactttgttataaattcagtcagtaataatttacgtgtattctttttctctatagcacagaaaacagatagttaactgatgatagggataatactgtatttccttagcttgatttttggaaaatcaaccgaaaatagtttggccgtcttttctaaatgttagaaattcttcaacagttgaattaggtaagttccaaaacagtaatctgagatgcatctcagatctttattaccactacattatagtagtgtgtatgcagacaatcagtgaagtccaattactttctccatttggagacacaagaggaacatagagttaaatcttaggttaaattttaggttgacaccttaggaaaatgctgggaaaaaaatggttaaaacaaaactcatcatagcttcagaaaaataaaatgaggcatcttaacatgcaatgttctaaagttaggattgattatattcctaaccctaggttgaaccacaaaatttcatttaaaatgtttatatttggaaatatttgcatagagtgtaaattgttctgtagtttcatattttgtaaatatgagttatgttgacaatgtgcagaattctttatgctttgatgtggtagccaaagaaagaattacacttttttccaaggccagcagaaaattctcttttaactacattgtaattcttgttttcctctactaaaaattggccagtcccattttatttctagtgctatgtaagaaggtaattaggaattataacacagtaatgtttttatgttacatcaataactgaattttccctaaaaattagcctaatatataatagatatattatgaagcaaaacttttatttttgaaaaggcagaataattttcagtgaagtaagtgactaaagaaaaaaactatattattgtttatgcaagggtcttacaggaaagggtctttttttttttttttttgagatggagtctcgctctcttgcccaggctggagtgcaatggcacgatctcagcttactgcaaccgccgcctcccaggttcaagcgattctcctgtcttagcctcctgagtagctgggattaacaggcgcctgccaccatgcctggctaatttttgtatttttagtagagacagggtttcgccatgttggccaggctggtttcaaactcctgacctcaggtgatctgcccacctcggcctcccagagtgctgggattacaggcatgagccaccatgcccggctaggaaagggtcttactaggaaagatggccaaaagtttcatatgaaaaaaattggattataaaccagtaacttaaatattaataaggatattttatgttttaaaaaagtatttacacagaatcataatcagtgaaattgaccatttgaaaactaaaagtttttacctacctgctcaatttattaacatcattgctttggggactgtttgaatataggtacgtgttttcttgtgcattctctataatttcaggaaaagtactaatgcgaattctcttccaaaattgtgatgtttcttgtatttttgatgaaggagaaatactgtaatgatcactgtttacactatgtacactttaggccagccctttgtagcgttatataaaactgaaggtcttttgtgctttcagtttgtataaaaaagctttgagattaaaggaaaaaaaaaatttttacactgtggttataaatttcaagtttcttaaagcttttgtagacttgtaacagagtctttaaatttaagttggattttgtaaattgttttgtatattttatttaatgtactcttaacaactgatgtatctggctttaaaacatcagaattggtttgttgttttgtttggtacagaggagcatttggtagtgttcattttaattttattatataggagctgaaacatcaaatatatattttatctatcattatgctacacaatcagtgctataaatttttttatgcaaagaaactttcttaatgttttaatcatgtttcctcagagtgacactttttgttgttgttaataccaagtatgaacactctgcatcattattccatgaaccagttctaatgcaaacctatgtatgtccattagaaatggaagttattttttaatcaacaatgaggcctattataaatttatcagatgaatctagatagctttatagcatataaaatatgttaatttgtgttagcaggtgcacatttcaccactgaaattagaaatattttgacagtctgttctgcataccattctgagtctacttttctgtctttagaagaatcgtaaatttcagtgtcctttatttgactcagtgggatatagctgttataagtaatagggcacagatgtgcagtagagtcttgtttaatggcatttcactgttcattccctttaccaccgttataaaacttttctttattgtaattatcagtgcaaagctatgtatttatcatggtaaaactccagtgttagaatagttttttcttacagtatactttctttggttaggtttgtgtatgtgttgctgattacattagaacttgatgttaagtcatttatcacactctcatgagagcagtaataaaagtgtgtaatctaggagaaaaagttaatttgtcaaacttagataagcatgatgtttaggtcctatttttcaattttataactgttttattgcaacaatatttgtatttaagtctccattttaatgccttgtggtgtttttttatgcatgtcactaagttgtcatcccacataaattgatgtgcagcatagggtattaaatctacataatgattttaaaacagaaatagttgatggtaaaatgtaaatgttttgcaaaaattccttataaaaagttttgtagtaacatttcacttgtaaattttttttgtaaaaaaaaaaaaatgaaaaaaaaagatgaatccagaaaaaaacctgtttcccatattctagaatttagacaattattctgccagcaaagcctctggggctgtaattgacatttttacagtgctgatttgtataaaatttgttttttgtggatttggaaataaaatcatgtacaagttgttgcctgcaataacaattgcaagtaacctattaaaaattcccttgagtttaacatgtttcatttaattatgtatactataaagcagcaataaattatttgaactatcaaccta

SEQ ID NO: 185115 - DNA, 4293 bp, Homo sapiens
  Payload ID: 16450
  Gene Symbol: SP4
  Gene Name: Sp4 transcription factor
  ENST ID: ENST00000448246
  CDS Start-End: 209-358
agtcagccgggctcgggcggagagaggagctgctacgccacagcccagcggcggccattcgcggaaaaagaggcagagcctgtgccagctacagcctcctccgagccaccgcgggcgggcgggaccggcctctcctcccgcctcgcccccacccccacccacctctatcccagtgtctccgtctgagggtttgtcctgttaatgcgggatgagcgatcagaagaaggaggaggaggaggaggcggcagcggcagcggcgatggctacagaaggagggaaaacctctgagccagagaataacaataaaaaacccaaaacctcaggctcccaggtcagcagcaaggacaagatggagtaaaagtccagcaagctactatagctcctgtaactgtagcagttggaggaattgctaatgccacgataggtgctgttagtcctgaccaactcacacaagtgcatttgcagcaaggccagcagacttctgatcaagaggtacaacctggcaagaggcttcgaagagttgcctgttcctgtcctaattgtagggaaggagaaggaagaggcagtaatgaaccaggaaaaaagaagcagcatatctgtcatattgaaggatgtggtaaagtttatggcaaaacatctcatttacgagcacatcttcgctggcatactggagaaagaccttttatatgcaactggatgttttgtggcaaaagattcacacggagtgatgagctccagagacatagaagaacccatacaggtgaaaagagatttgaatgcccggaatgttctaaaaggtttatgcggagtgatcatctctccaaacatgtcaaaacgcaccagaataaaaaaggtggtgggacagctcttgccattgttacctcgggagaactggactcatctgttacagaggtgcttggctccccaagaattgtcacagttgcagccatttctcaagattcgaatccagcaactcccaatgtttcaaccaacatggaagaattctgaaaagttatttataacagagacctctagtgctgcacttgtttacacacctttgaaaatctggaaatgggctggtcaagtggattacagagtaggaaattatgttttcattcttggcttctttaagtattccagggtttggggtcaacacgtgaagtgttgaattttaaaaaatacaaaaagcagactgatgtactggaaacagaaaagtatttcctccatactataagttgtagttgtttggaaatatatcacataacctttatacagaatcttcccatctcttaatatcatgtgttaacatgtttaaaaagaccttagtagtttgcaggctggaccttaattggacttattttctttgaaagtactttgttataaattcagtcagtaataatttacgtgtattctttttctctatagcacagaaaacagatagttaactgatgatagggataatactgtatttccttagcttgatttttggaaaatcaaccgaaaatagtttggccgtcttttctaaatgttagaaattcttcaacagttgaattaggtaagttccaaaacagtaatctgagatgcatctcagatctttattaccactacattatagtagtgtgtatgcagacaatcagtgaagtccaattactttctccatttggagacacaagaggaacatagagttaaatcttaggttaaattttaggttgacaccttaggaaaatgctgggaaaaaaatggttaaaacaaaactcatcatagcttcagaaaaataaaatgaggcatcttaacatgcaatgttctaaagttaggattgattatattcctaaccctaggttgaaccacaaaatttcatttaaaatgtttatatttggaaatatttgcatagagtgtaaattgttctgtagtttcatattttgtaaatatgagttatgttgacaatgtgcagaattctttatgctttgatgtggtagccaaagaaagaattacacttttttccaaggccagcagaaaattctcttttaactacattgtaattcttgttttcctctactaaaaattggccagtcccattttatttctagtgctatgtaagaaggtaattaggaattataacacagtaatgtttttatgttacatcaataactgaattttccctaaaaattagcctaatatataatagatatattatgaagcaaaacttttatttttgaaaaggcagaataattttcagtgaagtaagtgactaaagaaaaaaactatattattgtttatgcaagggtcttacaggaaagggtctttttttttttttttttgagatggagtctcgctctcttgcccaggctggagtgcaatggcacgatctcagcttactgcaaccgccgcctcccaggttcaagcgattctcctgtcttagcctcctgagtagctgggattaacaggcgcctgccaccatgcctggctaatttttgtatttttagtagagacagggtttcgccatgttggccaggctggtttcaaactcctgacctcaggtgatctgcccacctcggcctcccagagtgctgggattacaggcatgagccaccatgcccggctaggaaagggtcttactaggaaagatggccaaaagtttcatatgaaaaaaattggattataaaccagtaacttaaatattaataaggatattttatgttttaaaaaagtatttacacagaatcataatcagtgaaattgaccatttgaaaactaaaagtttttacctacctgctcaatttattaacatcattgctttggggactgtttgaatataggtacgtgttttcttgtgcattctctataatttcaggaaaagtactaatgcgaattctcttccaaaattgtgatgtttcttgtatttttgatgaaggagaaatactgtaatgatcactgtttacactatgtacactttaggccagccctttgtagcgttatataaaactgaaggtcttttgtgctttcagtttgtataaaaaagctttgagattaaaggaaaaaaaaaatttttacactgtggttataaatttcaagtttcttaaagcttttgtagacttgtaacagagtctttaaatttaagttggattttgtaaattgttttgtatattttatttaatgtactcttaacaactgatgtatctggctttaaaacatcagaattggtttgttgttttgtttggtacagaggagcatttggtagtgttcattttaattttattatataggagctgaaacatcaaatatatattttatctatcattatgctacacaatcagtgctataaatttttttatgcaaagaaactttcttaatgttttaatcatgtttcctcagagtgacactttttgttgttgttaataccaagtatgaacactctgcatcattattccatgaaccagttctaatgcaaacctatgtatgtccattagaaatggaagttattttttaatcaacaatgaggcctattataaatttatcagatgaatctagatagctttatagcatataaaatatgttaatttgtgttagcaggtgcacatttcaccactgaaattagaaatattttgacagtctgttctgcataccattctgagtctacttttctgtctttagaagaatcgtaaatttcagtgtcctttatttgactcagtgggatatagctgttataagtaatagggcacagatgtgcagtagagtcttgtttaatggcatttcactgttcattccctttaccaccgttataaaacttttctttattgtaattatcagtgcaaagctatgtatttatcatggtaaaactccagtgttagaatagttttttcttacagtatactttctttggttaggtttgtgtatgtgttgctgattacattagaacttgatgttaagtcatttatcacactctcatgagagcagtaataaaagtgtgtaatctaggagaaaaagttaatttgtcaaacttagataagcatgatgtttaggtcctatttttcaattttataactgttttattgcaacaatatttgtatttaagtctccattttaatgccttgtggtgtttttttatgcatgtcactaagttgtcatcccacataaattgatgtgcagcatagggtattaaatctacataatgattttaaaacagaaatagttgatggtaaaatgtaaatgttttgcaaaaattccttataaaaagttttgtagtaacatttcacttgtaaattttttttgtaaaaaaaaaaaaatgaaaaaaaa

SEQ ID NO: 185116 - DNA, 377 bp, Homo sapiens
  Payload ID: 16450
  Gene Symbol: SP4
  Gene Name: Sp4 transcription factor
  ENST ID: ENST00000432066
  CDS Start-End: 210-377
gagtcagccgggctcgggcggagagaggagctgctacgccacagcccagcggcggccattcgcggaaaaagaggcagagcctgtgccagctacagcctcctccgagccaccgcgggcgggcgggaccggcctctcctcccgcctcgcccccacccccacccacctctatcccagtgtctccgtctgagggtttgtcctgttaatgcgggatgagcggtcagcagcaaggacaagatggagtaaaagtccagcaagctactatagctcctgtaactgtagcagttggaggaattgctaatgccacgataggtgctgttagtcctgaccaactcacacaagtgcatttgcagcaaggccagcagacttctgatcaagag

SEQ ID NO: 185117 - DNA, 2033 bp, Homo sapiens
  Payload ID: 16451
  Gene Symbol: SP5
  Gene Name: Sp5 transcription factor
  Uniprot ID: Q6BEB4
  ENST ID: ENST00000375281
  CDS Start-End: 163-1359
gcgagcgagcggggcgcggcgaggggcaagggcggggagggccccggcgctcagagcaggcgccagggaggcaggctgggcggcccttcgtcctcgccttcgggtgtccatgcctcggcggcggcgtcccgctccgcagccaggggcctgcaagccgtagccatggccgcggtggccgtcctccggaacgactcgctgcaggcctttctccaggaccgcacccccagcgcctccccggacctgggcaagcactcgcccctggcattgctggccgccacctgtagccgcatcggccagccgggcgcggcggcgcccccggacttcctgcaggtgccctacgaccccgcgctgggctcaccctccaggctcttccacccgtggaccgccgacatgccggcgcactcgccaggcgcactgccgcccccgcatcccagcttggggctgacgccgcagaagacgcacctgcagccgtccttcggggctgcgcacgagcttccccttacaccccccgccgacccctcgtacccctacgagttctcgccggtcaagatgctgccctcgagcatggcggctctgcccgccagctgcgcgcccgcctacgtgccctacgcggcgcaggccgcgctgccgccaggctactccaacctgctgcctccgccgccgccaccgcccccgccgcccacctgccgccagttgtcacccaacccggcccccgacgacctcccgtggtggagcatcccgcaggcgggcgccgggccgggggcctccggggttccgggaagcggcctctccggcgcctgtgccggggccccccacgcgccccgcttccccgcctctgcggccgctgctgctgcggccgccgccgccctacaaagaggcctggtgttgggcccgtcggactttgcgcagtaccagagccagatcgccgcgctgctgcagaccaaggcccccctggcggccacggccaggaggtgccgccgctgccgctgtcccaactgccaggcggcgggcggcgcccccgaggcggagccggggaagaagaagcagcacgtgtgccacgtgccgggctgcggcaaggtgtacgggaagacgtcgcacctgaaggcgcacctgcgctggcacacgggcgagcgacccttcgtgtgcaactggctcttctgcgggaagagcttcacgcgctcggacgagctgcagcggcacctgcggactcacacgggcgagaagcgctttgcctgtcccgagtgcggcaagcgcttcatgcgcagcgaccacctcgcgaagcacgtcaagactcaccagaataagaagctcaaagtcgctgaggccggggttaagcgggaggacgcgcgggacctgtgagccctcccggaggtggacccccttcccagcacctctgcgagagatccggggacctgtgggcagctggcggaggggagactcagcagacggaccctctccgttgcctgcctcccaaaatggagccaggcttccaacttccgctgccttcggacatagggacccagttcccaggagcggggaggtagggttggggctggggcatttggattgtaattgggagctctgccgtacgccagggcggttccaaactctaaaccgttcccaccgtcagggagacctacagtttcgggggaccaccctggtctggccttgtatataggaaatgctgctgaactgaatagaaaggaacttgggagatttgaaacagtgctcgggttttcgctaggaccggtttgggctttgtacaggttatttaatagctttgttaaagataattataataattataacattaataaaaatgttgcttttgtcttcagctccatgcagagctacagcatgatatgtctctgtaaagtgatcagcagttgcagcgtgaaaataaatactttaactcaggggtcactacaggaagaccccgttgagccggtctcatttgatcttttcttcttctgggtggctgtactaagcggtcgggtttccccgggaatttgatggttcctatagtctgcctg

SEQ ID NO: 185118 - DNA, 3800 bp, Homo sapiens
  Payload ID: 16452
  Gene Symbol: SP6
  Gene Name: Sp6 transcription factor
  Uniprot ID: Q3SY56
  ENST ID: ENST00000342234
  CDS Start-End: 279-1409
gactcagatctcacctcctaccactcccctaggagagctgggggccactgtttcctggattatcctaaaagcttctgaggccgtgaggacttggcagcatccctgctccctccttcacctccccctttggcactgcctgtcacctcctttataaagcctggctcttttatcaccgccacttggccctcactgccgccgccagctctgggctccatggactggtcccgtctgaggtgcccctgaccgtccctgccctcaccccaccccggatcccggcaatgctaaccgctgtctgcggctctctgggcagccagcacacggaagcgccgcacgcctccccgccgcgcctcgacctgcagcctctccaaacttaccagggccacacgagccctgaggccggggactacccctccccgctgcagcctggagagctgcagagcctcccgctgggcccggaggtggacttctcgcagggctatgagctgccaggggcctcctcgcgggtaacctgcgaggacctggaaagcgacagtcccttggccccgggccccttttccaagctcctgcagccggacatgtcacaccattatgaatcgtggttcaggccgactcacccaggcgcggaggatggctcgtggtgggaccttcatccgggcaccagctggatggacctcccccacactcagggcgcgctgacctcacctggccacccgggggcgcttcaggcgggcttggggggctacgtcggagaccaccagctttgtgccccgccaccccacccgcatgcgcaccacctccttccagctgccggagggcagcatctcctagggccgcccgacggggctaaggccttggaagtagccgccccggagtctcaagggctggattccagcctggacggggcggcgcgtcccaaaggctcccggcggtcggtgccccgcagctcaggccagaccgtctgtcgctgccccaactgtctggaggcggagcgactgggggctccatgtgggcccgatgggggcaagaagaagcatttgcacaactgccacatcccgggctgcgggaaagcctacgccaagacgtcgcacctgaaggcgcacctgcgctggcacagcggcgaccgtcccttcgtgtgcaactggctcttctgcggcaagcgcttcacgcgctcggacgagctgcagcgccacctccagacccacaccggcaccaagaagttcccctgtgcagtctgcagccgcgtcttcatgcgcagcgaccacctggccaagcacatgaaaacccacgagggcgccaaggaggaggcggctggggcggcctcgggagagggcaaggccggcggcgcagtggagccccccgggggcaaaggcaaacgcgaggccgagggcagcgtggctccctccaactgagctcctcagtgccgcctccctgcgggtatcccggggggcactggatgcgagcccccaggtctgacgtccttgggggtggcttgaggaagaggggaaggtgcgtatttattcagggaggaggaaaagtggtgcagggacagggagatggggcgctaggggttcttagtctctggggctactaggcaggatgaatttgactgggtcggtaggagctgcgcaatgcccctctgttctcccctgcctcacagtttccctcgcccctgggctggggggttggggtgggacacccgtaccgcggctggctggcggggacaggctagaggagacagcaagtcccagtccccggagcagagagaagtggggccggcccggggcgctggtggtggctgtctggacacgtccttagcgcctgggaaccaggacataaaagcgcctccggagccgccctgcggcggggtccctttcatcccacttaaagtgcttctgcccctagggtttccggagggagagccgagatgggatgggggagcctgggggtcccccttggcaggggtgtctctttctggtttggagggttgttgctgtaaaaataactcctttgatgagcttccttattaaccctttcagacccagtctgttggagccatgaaggaagagggaaagagggctgccattcctgacagcctcccagccagggctggcgataaaggaccgagatagatggagggggcgagtagggaagtcctcttctaaaatgagagatagggatttggtggggtatggaaggaactaaccccttccctctccacctctgattcagcccttaattcttggtctatgataaataaagttcagtagtctcacattccccatctattaccctaggtgtgttttcaaggcagccagcggtagaatccatgtagttcccaccagttgccttcccctcagggatggaaggaagagggtttcttgggctggttgagggcagattgggggtgtctcatcagagggacctccactggttcccactcagagtggaggcctgcagcctacctgaccatctctttagctgtcaccaagaaaataaaccccactgtctctctagcttggcccttgtctttcccttgcccctgccatagcatgttcattaggggattccttcctccccctcatctcacaggggaagggagaggaaagagttgttctcccactggaaggggttctgccttctgaggtgacatccaggaagctgtccccattcccttctcctttagatgctagaaacacattttgattctgatcatggggtgggggagagaggaaaggagggaggggagaagcccagcagaagctgagccaggcagaggggaaagaagctgatatgaggaagggtctgacaggccacagcccttgcagccggagggctttcccacactcaagagaggggccttacagtccctctgacacccctcccccttcccctcgctccctttcttcacccggagccctctgcagagattagctgtgtattgatttttaagttataagcaaagggtattttatttaatattaggttatgtgtgtgcatgttgtgtgtacctgtgtgcatgtatgtgtgtttctctactgagcctggggtctctagccagggagaccccatcttattcaccatgtccaagatcctgggatctgggcccagcatctcttcctcctttgtagatgctggagcccagccaaggtctgggagctatatgggaagtgggggctgggatctgggtgggaatatgtgtttgtatacaaaggggccctccttaaaagggacaggatgaccttcccgaggaactcattggcctggggtagtttaagaagtaatgttctttctttctttctcttttccctacctcctgctaacccaaccagagatccccttccttgctgagagggttgggggcaggaggagatttggcagtgcctgcaggttgcctggccaggtggagagggggaaagaggaagggcaccgtgggtgtaagatgcctttctcctccacccatcgaaaccagccaccccttccctgtgccaccaagacagccttttccagtggccatcctaaggggaactcccaaatgggtgttgctggtggacacagatgctccccccaatggaagccccaagctctgaggtatgcgggtagaggctttggataggttttcttctgctcccctcttttatagatctaggctgcttggctgcctgtctttctaggcagtccccctagaggaaaaatgtaggaatttattttttctttaactgctgtgaactcactttgagggggtaggaggagggagaaacagcctgtgttttttatgcaataaagtcatcaactacatcatg

SEQ ID NO: 185119 - DNA, 3848 bp, Homo sapiens
  Payload ID: 16452
  Gene Symbol: SP6
  Gene Name: Sp6 transcription factor
  Uniprot ID: Q3SY56
  ENST ID: ENST00000536300
  CDS Start-End: 333-1463
aaaaagcagcgctggggagaggatgaaggcagagagcgcgggtgagtcacgggcggagctggccttgttcgctcgctggctcctgcccgccctccgtcctccgccctctcgccagcgctcacctccgccgcctgccgcctgccgccagccgccgggtctggctcgccctgggctcctgccccttaccgctggagagctcgccggcgcacagggcctatgagcgaccgtcagtagcgcaccagccagccgtgcccggagcccgccgcagcctcgaggtcccgtctgaggtgcccctgaccgtccctgccctcaccccaccccggatcccggcaatgctaaccgctgtctgcggctctctgggcagccagcacacggaagcgccgcacgcctccccgccgcgcctcgacctgcagcctctccaaacttaccagggccacacgagccctgaggccggggactacccctccccgctgcagcctggagagctgcagagcctcccgctgggcccggaggtggacttctcgcagggctatgagctgccaggggcctcctcgcgggtaacctgcgaggacctggaaagcgacagtcccttggccccgggccccttttccaagctcctgcagccggacatgtcacaccattatgaatcgtggttcaggccgactcacccaggcgcggaggatggctcgtggtgggaccttcatccgggcaccagctggatggacctcccccacactcagggcgcgctgacctcacctggccacccgggggcgcttcaggcgggcttggggggctacgtcggagaccaccagctttgtgccccgccaccccacccgcatgcgcaccacctccttccagctgccggagggcagcatctcctagggccgcccgacggggctaaggccttggaagtagccgccccggagtctcaagggctggattccagcctggacggggcggcgcgtcccaaaggctcccggcggtcggtgccccgcagctcaggccagaccgtctgtcgctgccccaactgtctggaggcggagcgactgggggctccatgtgggcccgatgggggcaagaagaagcatttgcacaactgccacatcccgggctgcgggaaagcctacgccaagacgtcgcacctgaaggcgcacctgcgctggcacagcggcgaccgtcccttcgtgtgcaactggctcttctgcggcaagcgcttcacgcgctcggacgagctgcagcgccacctccagacccacaccggcaccaagaagttcccctgtgcagtctgcagccgcgtcttcatgcgcagcgaccacctggccaagcacatgaaaacccacgagggcgccaaggaggaggcggctggggcggcctcgggagagggcaaggccggcggcgcagtggagccccccgggggcaaaggcaaacgcgaggccgagggcagcgtggctccctccaactgagctcctcagtgccgcctccctgcgggtatcccggggggcactggatgcgagcccccaggtctgacgtccttgggggtggcttgaggaagaggggaaggtgcgtatttattcagggaggaggaaaagtggtgcagggacagggagatggggcgctaggggttcttagtctctggggctactaggcaggatgaatttgactgggtcggtaggagctgcgcaatgcccctctgttctcccctgcctcacagtttccctcgcccctgggctggggggttggggtgggacacccgtaccgcggctggctggcggggacaggctagaggagacagcaagtcccagtccccggagcagagagaagtggggccggcccggggcgctggtggtggctgtctggacacgtccttagcgcctgggaaccaggacataaaagcgcctccggagccgccctgcggcggggtccctttcatcccacttaaagtgcttctgcccctagggtttccggagggagagccgagatgggatgggggagcctgggggtcccccttggcaggggtgtctctttctggtttggagggttgttgctgtaaaaataactcctttgatgagcttccttattaaccctttcagacccagtctgttggagccatgaaggaagagggaaagagggctgccattcctgacagcctcccagccagggctggcgataaaggaccgagatagatggagggggcgagtagggaagtcctcttctaaaatgagagatagggatttggtggggtatggaaggaactaaccccttccctctccacctctgattcagcccttaattcttggtctatgataaataaagttcagtagtctcacattccccatctattaccctaggtgtgttttcaaggcagccagcggtagaatccatgtagttcccaccagttgccttcccctcagggatggaaggaagagggtttcttgggctggttgagggcagattgggggtgtctcatcagagggacctccactggttcccactcagagtggaggcctgcagcctacctgaccatctctttagctgtcaccaagaaaataaaccccactgtctctctagcttggcccttgtctttcccttgcccctgccatagcatgttcattaggggattccttcctccccctcatctcacaggggaagggagaggaaagagttgttctcccactggaaggggttctgccttctgaggtgacatccaggaagctgtccccattcccttctcctttagatgctagaaacacattttgattctgatcatggggtgggggagagaggaaaggagggaggggagaagcccagcagaagctgagccaggcagaggggaaagaagctgatatgaggaagggtctgacaggccacagcccttgcagccggagggctttcccacactcaagagaggggccttacagtccctctgacacccctcccccttcccctcgctccctttcttcacccggagccctctgcagagattagctgtgtattgatttttaagttataagcaaagggtattttatttaatattaggttatgtgtgtgcatgttgtgtgtacctgtgtgcatgtatgtgtgtttctctactgagcctggggtctctagccagggagaccccatcttattcaccatgtccaagatcctgggatctgggcccagcatctcttcctcctttgtagatgctggagcccagccaaggtctgggagctatatgggaagtgggggctgggatctgggtgggaatatgtgtttgtatacaaaggggccctccttaaaagggacaggatgaccttcccgaggaactcattggcctggggtagtttaagaagtaatgttctttctttctttctcttttccctacctcctgctaacccaaccagagatccccttccttgctgagagggttgggggcaggaggagatttggcagtgcctgcaggttgcctggccaggtggagagggggaaagaggaagggcaccgtgggtgtaagatgcctttctcctccacccatcgaaaccagccaccccttccctgtgccaccaagacagccttttccagtggccatcctaaggggaactcccaaatgggtgttgctggtggacacagatgctccccccaatggaagccccaagctctgaggtatgcgggtagaggctttggataggttttcttctgctcccctcttttatagatctaggctgcttggctgcctgtctttctaggcagtccccctagaggaaaaatgtaggaatttattttttctttaactgctgtgaactcactttgagggggtaggaggagggagaaacagcctgtgttttttatgcaataaagtcatcaactac

SEQ ID NO: 185120 - DNA, 2971 bp, Homo sapiens
  Payload ID: 16453
  Gene Symbol: SP7
  Gene Name: Sp7 transcription factor
  Uniprot ID: Q8TDD2
  ENST ID: ENST00000303846
  CDS Start-End: 109-1404
attctcccattctccctccctctcccttttctctctctaccccccccaccccccggctcagctctctccatctgcctggctccttgggacccgttccccagcctcaggatggcgtcctccctgcttgaggaggaagttcactatggctccagtcccctggccatgctgacggcagcgtgcagcaaatttggtggctctagccctctgcgggactcaacaactctgggcaaagcaggcacaaagaagccgtactctgtgggcagtgacctttcagcctccaaaaccatgggggatgcttatccagccccctttacaagcactaatgggctcctttcacctgcaggcagtcctccagcacccacctcaggctatgctaatgattaccctcccttttcccactcattccctgggcccacaggcacccaggaccctgggctactagtgcccaaggggcacagctcttctgactgtctgcccagtgtctacacctctctggacatgacacacccctatggctcctggtacaaggcaggcatccatgcaggcatttcaccaggcccaggcaacactcctactccatggtgggatatgcaccctggaggcaactggctaggtggtgggcagggccagggtgatgggctgcaagggacactgcccacaggtccagctcagcctccactgaacccccagctgcccacctacccatctgactttgctccccttaatccagccccctacccagctccccacctcttgcaaccagggccccagcatgtcttgccccaagatgtctataaacccaaggcagtgggaaatagtgggcagctagaagggagtggtggagccaaacccccacggggtgcaagcactgggggtagtggtggatatgggggcagtggggcagggcgctcctcctgcgactgccctaattgccaggagctagagcggctgggagcagcagcggctgggctgcggaagaagcccatccacagctgccacatccctggctgcggcaaggtgtatggcaaggcttcgcacctgaaggcccacttgcgctggcacacaggcgagaggcccttcgtctgcaactggctcttctgcggcaagaggttcactcgttcggatgagctggagcgtcatgtgcgcactcacacccgggagaagaagttcacctgcctgctctgctccaagcgctttacccgaagcgaccacctgagcaaacaccagcgcacccatggagaaccaggcccgggtccccctcccagtggccccaaggagctgggggagggccgcagcacgggggaagaggaggccagtcagacgccccgaccttctgcctcgccagcaaccccagagaaagcccctggaggcagccctgagcagagcaacttgctggagatctgagccgggtggaaggtctcccaccccagggctgccctgacagtctctcttggctctctagaccactgcttgccaatcactctctttaccccatgcatgccatccttcggggctctctccctctgtctccctcctggccattctgggcttgggtatctccttgcatgcctcctcagctcaccttctctcttcaccatgagactggctttccacaaactctcatctcaggccctccccttgtgcctgatacctgcactccggcttcctagactctggccctgccacaccaacacactttctatttgggctcccaacactatttctccatctcactccttgacatgtacccctttctgcttctcaagcttatttcctgctgtccctcagcctccaggcttcagtcttcccaacttcttacaccattgctttccattctccagaactcttttttcctttttacaaacacaatgataatgataatttattgccccctggtggcctcttcatcaggggtattggggttagtgacctggccagagggtgccaagaggggggcagaccagtggggatctgatcccaaagatggggtgaccccagggtcagggaggctgcccccaggcctgtatatttaacccctatgtaccaggagtaatgaatagtaataattctatttatgtaagttatgatgacgggtcaggtagagtgagctggggagggaagtggatccatttctgctaaggaaattctagtcaaatgcatctctgtatagacaaaatgttagtggagaagatcttgttaatagaatgtctatcatcagaatctcagttgatagggtttctcttgtaatgaagtctctacaaattgggttagctacatctctgctaaacagttgatggggtatctcttgattagggggatccctaatatccccagccccagccagaagctgtgaaacctcaagtcctatggaggggagaaggactggaatgtaccccatctcccttgactgcagagcaggttcctccactgccccaccccttagacaccatgaccccatcaggttaatcccctgttgccatggttatggagagcttgcagctgccatcttagatgtgctctttggggaagcccatctaacaggaggacattggtttgggggtgcacctcctgaagaatgggtggggaaggctttctctaggatcagattcaaataagtatgtattgagtgcctactctgtgcaaggcactatgctagatctggtgcctagaagccctgagaaagaacttaaagagctaggaggacagaggcccccaagctgatctggtggtgcatccacgcacccccaccctgggactttggatgctcccatctccacctccagtgacttttaaagccgcttcgtgcctttcctgtaacgttggatcctccttttctgtcccctgctgtctcaaggccccaagttaaagggttaaagccgctggagcttggggagagaacattgtggaatggaagggatcatgccctttgtggagtcttttttttttaatttaataaataaaagttggattt

SEQ ID NO: 185121 - DNA, 1472 bp, Homo sapiens
  Payload ID: 16453
  Gene Symbol: SP7
  Gene Name: Sp7 transcription factor
  Uniprot ID: Q8TDD2
  ENST ID: ENST00000537210
  CDS Start-End: 231-1472
agcagccgccgagcagcagcaaggactctggagtcagagtaggactgtaggaccggagcctgagtggaacaggagtggagctggcctgggagagagcggatccctcccagcaccctcaggccacccgttgcctgcactctccctgccagacctccagagaggagagactcgggacagccagccccaggttcccccaggaggaagttcactatggctccagtcccctggccatgctgacggcagcgtgcagcaaatttggtggctctagccctctgcgggactcaacaactctgggcaaagcaggcacaaagaagccgtactctgtgggcagtgacctttcagcctccaaaaccatgggggatgcttatccagccccctttacaagcactaatgggctcctttcacctgcaggcagtcctccagcacccacctcaggctatgctaatgattaccctcccttttcccactcattccctgggcccacaggcacccaggaccctgggctactagtgcccaaggggcacagctcttctgactgtctgcccagtgtctacacctctctggacatgacacacccctatggctcctggtacaaggcaggcatccatgcaggcatttcaccaggcccaggcaacactcctactccatggtgggatatgcaccctggaggcaactggctaggtggtgggcagggccagggtgatgggctgcaagggacactgcccacaggtccagctcagcctccactgaacccccagctgcccacctacccatctgactttgctccccttaatccagccccctacccagctccccacctcttgcaaccagggccccagcatgtcttgccccaagatgtctataaacccaaggcagtgggaaatagtgggcagctagaagggagtggtggagccaaacccccacggggtgcaagcactgggggtagtggtggatatgggggcagtggggcagggcgctcctcctgcgactgccctaattgccaggagctagagcggctgggagcagcagcggctgggctgcggaagaagcccatccacagctgccacatccctggctgcggcaaggtgtatggcaaggcttcgcacctgaaggcccacttgcgctggcacacaggcgagaggcccttcgtctgcaactggctcttctgcggcaagaggttcactcgttcggatgagctggagcgtcatgtgcgcactcacacccgggagaagaagttcacctgcctgctctgctccaagcgctttacccgaagcgaccacctgagcaaacaccagcgcacccatggagaaccaggcccgggtccccctcccagtggccccaaggagctgggggagggccgcagcacgggggaagaggaggccagtcagacgccccgaccttctgcctcgccagcaaccccagagaaagcccctggaggcagccctgagcagagcaacttgctggagatctga

SEQ ID NO: 185122 - DNA, 3151 bp, Homo sapiens
  Payload ID: 16453
  Gene Symbol: SP7
  Gene Name: Sp7 transcription factor
  Uniprot ID: Q8TDD2
  ENST ID: ENST00000536324
  CDS Start-End: 285-1580
ggcgggcggcagcagcctaggcagcagcagtagcagaagcagcagccgccgagcagcagcaaggactctggagtcagagtaggactgtaggaccggagcctgagtggaacaggagtggagctggcctgggagagagcggatccctcccagcaccctcaggccacccgttgcctgcactctccctgccagacctccagagaggagagactcgggacagccagccccaggttcccccagctctctccatctgcctggctccttgggacccgttccccagcctcaggatggcgtcctccctgcttgaggaggaagttcactatggctccagtcccctggccatgctgacggcagcgtgcagcaaatttggtggctctagccctctgcgggactcaacaactctgggcaaagcaggcacaaagaagccgtactctgtgggcagtgacctttcagcctccaaaaccatgggggatgcttatccagccccctttacaagcactaatgggctcctttcacctgcaggcagtcctccagcacccacctcaggctatgctaatgattaccctcccttttcccactcattccctgggcccacaggcacccaggaccctgggctactagtgcccaaggggcacagctcttctgactgtctgcccagtgtctacacctctctggacatgacacacccctatggctcctggtacaaggcaggcatccatgcaggcatttcaccaggcccaggcaacactcctactccatggtgggatatgcaccctggaggcaactggctaggtggtgggcagggccagggtgatgggctgcaagggacactgcccacaggtccagctcagcctccactgaacccccagctgcccacctacccatctgactttgctccccttaatccagccccctacccagctccccacctcttgcaaccagggccccagcatgtcttgccccaagatgtctataaacccaaggcagtgggaaatagtgggcagctagaagggagtggtggagccaaacccccacggggtgcaagcactgggggtagtggtggatatgggggcagtggggcagggcgctcctcctgcgactgccctaattgccaggagctagagcggctgggagcagcagcggctgggctgcggaagaagcccatccacagctgccacatccctggctgcggcaaggtgtatggcaaggcttcgcacctgaaggcccacttgcgctggcacacaggcgagaggcccttcgtctgcaactggctcttctgcggcaagaggttcactcgttcggatgagctggagcgtcatgtgcgcactcacacccgggagaagaagttcacctgcctgctctgctccaagcgctttacccgaagcgaccacctgagcaaacaccagcgcacccatggagaaccaggcccgggtccccctcccagtggccccaaggagctgggggagggccgcagcacgggggaagaggaggccagtcagacgccccgaccttctgcctcgccagcaaccccagagaaagcccctggaggcagccctgagcagagcaacttgctggagatctgagccgggtggaaggtctcccaccccagggctgccctgacagtctctcttggctctctagaccactgcttgccaatcactctctttaccccatgcatgccatccttcggggctctctccctctgtctccctcctggccattctgggcttgggtatctccttgcatgcctcctcagctcaccttctctcttcaccatgagactggctttccacaaactctcatctcaggccctccccttgtgcctgatacctgcactccggcttcctagactctggccctgccacaccaacacactttctatttgggctcccaacactatttctccatctcactccttgacatgtacccctttctgcttctcaagcttatttcctgctgtccctcagcctccaggcttcagtcttcccaacttcttacaccattgctttccattctccagaactcttttttcctttttacaaacacaatgataatgataatttattgccccctggtggcctcttcatcaggggtattggggttagtgacctggccagagggtgccaagaggggggcagaccagtggggatctgatcccaaagatggggtgaccccagggtcagggaggctgcccccaggcctgtatatttaacccctatgtaccaggagtaatgaatagtaataattctatttatgtaagttatgatgacgggtcaggtagagtgagctggggagggaagtggatccatttctgctaaggaaattctagtcaaatgcatctctgtatagacaaaatgttagtggagaagatcttgttaatagaatgtctatcatcagaatctcagttgatagggtttctcttgtaatgaagtctctacaaattgggttagctacatctctgctaaacagttgatggggtatctcttgattagggggatccctaatatccccagccccagccagaagctgtgaaacctcaagtcctatggaggggagaaggactggaatgtaccccatctcccttgactgcagagcaggttcctccactgccccaccccttagacaccatgaccccatcaggttaatcccctgttgccatggttatggagagcttgcagctgccatcttagatgtgctctttggggaagcccatctaacaggaggacattggtttgggggtgcacctcctgaagaatgggtggggaaggctttctctaggatcagattcaaataagtatgtattgagtgcctactctgtgcaaggcactatgctagatctggtgcctagaagccctgagaaagaacttaaagagctaggaggacagaggcccccaagctgatctggtggtgcatccacgcacccccaccctgggactttggatgctcccatctccacctccagtgacttttaaagccgcttcgtgcctttcctgtaacgttggatcctccttttctgtcccctgctgtctcaaggccccaagttaaagggttaaagccgctggagcttggggagagaacattgtggaatggaagggatcatgccctttgtggagtcttttttttttaatttaataaataaaagttggatttgaaa

SEQ ID NO: 185123 - DNA, 1042 bp, Homo sapiens
  Payload ID: 16453
  Gene Symbol: SP7
  Gene Name: Sp7 transcription factor
  ENST ID: ENST00000547755
  CDS Start-End: 236-1042
tgcattggggagcggaggataagagaatgggggagctctgagatccctactcctctctgtgtggggtgatggggaagagaaagggcatgagagactggcaggctgggggccaacgggatgttggcaccgtcgggacctcgggcactgcaagatccggaggaagaagcttggatgcagcctcgagaaagctacggcggaagaggaggaagttcactatggctccagtcccctggccatgctgacggcagcgtgcagcaaatttggtggctctagccctctgcgggactcaacaactctgggcaaagcaggcacaaagaagccgtactctgtgggcagtgacctttcagcctccaaaaccatgggggatgcttatccagccccctttacaagcactaatgggctcctttcacctgcaggcagtcctccagcacccacctcaggctatgctaatgattaccctcccttttcccactcattccctgggcccacaggcacccaggaccctgggctactagtgcccaaggggcacagctcttctgactgtctgcccagtgtctacacctctctggacatgacacacccctatggctcctggtacaaggcaggcatccatgcaggcatttcaccaggcccaggcaacactcctactccatggtgggatatgcaccctggaggcaactggctaggtggtgggcagggccagggtgatgggctgcaagggacactgcccacaggtccagctcagcctccactgaacccccagctgcccacctacccatctgactttgctccccttaatccagccccctacccagctccccacctcttgcaaccagggccccagcatgtcttgccccaagatgtctataaacccaaggcagtgggaaatagtgggcagctagaagggagtggtggagccaaacccccacggggtgcaagcactgggggtagtggtggatatgggggcagtggggcagggcgctcctcctgcgactgccctaattgccaggagctagagcggctgggagcagcagcggctggg

SEQ ID NO: 185124 - DNA, 1714 bp, Homo sapiens
  Payload ID: 16454
  Gene Symbol: SP8
  Gene Name: Sp8 transcription factor
  Uniprot ID: Q8IXZ3
  ENST ID: ENST00000361443
  CDS Start-End: 239-1711
attgtattgcacacctctaaaaaaaacactgcctctgatttatcaatataaaaaagatcctctgagaggaggagggcacttttgtgtgatggcaacttcacttctagggcgtggtgcttgctcccgaatcagacgccggcagccaaacttgtcccctcctgtagagtaggaagcggccgggcgccggggctgttgggggtgccaggaagaaccgaggttgggatcgactcctctggccatgcttgccgctacctgtaataagataggcagccccagcccgtctccctcctccctctcggacagctcttcttccttcggcaaaggcttccacccctggaaacgctcctcgtcctcttcttccgccagctgcaacgtagtgggttccagtctctcaagcttcggcgtgtccggggcctccaggaacggcggctcgtcctcggcggctgcggcggccgcggcagcagccgcggctgccgcggccctggtgtccgactcgttcagctgcggcggctcgcctggctccagcgccttctccctcacctccagcagcgccgcagccgccgccgccgccgccgcagccgccgcctccagctcgcccttcgccaacgactactctgttttccaggcccccggagtttccgggggcagcggcggcggcggcgggggcggcggcggcggctcctccgcgcactcgcaggacggctcccaccagccggtgttcatctccaaggtgcacacctctgtggacgggctgcagggcatctacccgcgggtgggcatggcgcacccgtacgagtcgtggtttaagccctcgcacccgggcctgggtgctgcgggcgaggtgggctcggccggcgcctccagctggtgggacgtgggggccggctggatcgacgtgcagaacccgaacagcgcggctgcgctgcccggctcgctgcaccctgccgccggggggctccaaacctcgctgcactcgccgctcggaggctacaactcggattactcgggcctgagtcactcggccttcagcagcggcgcctcctcgcacctgctcagccccgccgggcagcacctcatggacggcttcaagccagtgctacccggctcctacccggactcggccccgtcgccgctggccggcgcggggggctccatgttgagcgctgggccttcggcgccgctggggggctccccgcgctcctcagctcgccgctactccggccgcgccacctgcgactgccccaactgccaggaggcagagcggctgggccctgccggggcgagcttgcggcgcaagggcctgcacagctgccacatcccgggctgcggcaaggtgtacggcaagacttcgcacctcaaggcgcacctgcgctggcacacgggcgagcggcccttcgtgtgcaactggcttttctgcggcaagcgcttcacgcgctccgacgagctgcagcggcacctgcggacccacaccggcgagaagcgcttcgcctgtccagtttgcaacaagcgcttcatgcgcagcgaccacctcagcaagcacgtgaagacgcacagtggcggcggcggcggcggcggctcggcgggctcgggcagcggcggcaagaagggcagcgacaccgacagcgagcacagcgccgcgggcagcccgccctgccactccccagagctgctgcagccccccgagcccgggcaccgcaacggcctagagtgacgc

SEQ ID NO: 185125 - DNA, 1618 bp, Homo sapiens
  Payload ID: 16454
  Gene Symbol: SP8
  Gene Name: Sp8 transcription factor
  Uniprot ID: Q8IXZ3
  ENST ID: ENST00000418710
  CDS Start-End: 89-1615
attgtattgcacacctctaaaaaaaacactgcctctgatttatcaatataaaaaagatcctctgagaggaggagggcacttttgtgtgatggcaacttcacttctaggggaagaaccgaggttgggatcgactcctctggccatgcttgccgctacctgtaataagataggcagccccagcccgtctccctcctccctctcggacagctcttcttccttcggcaaaggcttccacccctggaaacgctcctcgtcctcttcttccgccagctgcaacgtagtgggttccagtctctcaagcttcggcgtgtccggggcctccaggaacggcggctcgtcctcggcggctgcggcggccgcggcagcagccgcggctgccgcggccctggtgtccgactcgttcagctgcggcggctcgcctggctccagcgccttctccctcacctccagcagcgccgcagccgccgccgccgccgccgcagccgccgcctccagctcgcccttcgccaacgactactctgttttccaggcccccggagtttccgggggcagcggcggcggcggcgggggcggcggcggcggctcctccgcgcactcgcaggacggctcccaccagccggtgttcatctccaaggtgcacacctctgtggacgggctgcagggcatctacccgcgggtgggcatggcgcacccgtacgagtcgtggtttaagccctcgcacccgggcctgggtgctgcgggcgaggtgggctcggccggcgcctccagctggtgggacgtgggggccggctggatcgacgtgcagaacccgaacagcgcggctgcgctgcccggctcgctgcaccctgccgccggggggctccaaacctcgctgcactcgccgctcggaggctacaactcggattactcgggcctgagtcactcggccttcagcagcggcgcctcctcgcacctgctcagccccgccgggcagcacctcatggacggcttcaagccagtgctacccggctcctacccggactcggccccgtcgccgctggccggcgcggggggctccatgttgagcgctgggccttcggcgccgctggggggctccccgcgctcctcagctcgccgctactccggccgcgccacctgcgactgccccaactgccaggaggcagagcggctgggccctgccggggcgagcttgcggcgcaagggcctgcacagctgccacatcccgggctgcggcaaggtgtacggcaagacttcgcacctcaaggcgcacctgcgctggcacacgggcgagcggcccttcgtgtgcaactggcttttctgcggcaagcgcttcacgcgctccgacgagctgcagcggcacctgcggacccacaccggcgagaagcgcttcgcctgtccagtttgcaacaagcgcttcatgcgcagcgaccacctcagcaagcacgtgaagacgcacagtggcggcggcggcggcggcggctcggcgggctcgggcagcggcggcaagaagggcagcgacaccgacagcgagcacagcgccgcgggcagcccgccctgccactccccagagctgctgcagccccccgagcccgggcaccgcaacggcctagagtgacgc

SEQ ID NO: 185126 - DNA, 3496 bp, Homo sapiens
  Payload ID: 16454
  Gene Symbol: SP8
  Gene Name: Sp8 transcription factor
  ENST ID: ENST00000617581
  CDS Start-End: 89-1489
attgtattgcacacctctaaaaaaaacactgcctctgatttatcaatataaaaaagatcctctgagaggaggagggcacttttgtgtgatggcaacttcacttctaggggaagaaccgaggttgggatcgactcctctggccatgcttgccgctacctgtaataagataggcagccccagcccgtctccctcctccctctcggacagctcttcttccttcggcaaaggcttccacccctggaaacgctcctcgtcctcttcttccgccagctgcaacgtagtgggttccagtctctcaagcttcggcgtgtccggggcctccaggaacggcggctcgtcctcggcggctgcggcggccgcggcagcagccgcggctgccgcggccctggtgtccgactcgttcagctgcggcggctcgcctggctccagcgccttctccctcacctccagcggcggctcctccgcgcactcgcaggacggctcccaccagccggtgttcatctccaaggtgcacacctctgtggacgggctgcagggcatctacccgcgggtgggcatggcgcacccgtacgagtcgtggtttaagccctcgcacccgggcctgggtgctgcgggcgaggtgggctcggccggcgcctccagctggtgggacgtgggggccggctggatcgacgtgcagaacccgaacagcgcggctgcgctgcccggctcgctgcaccctgccgccggggggctccaaacctcgctgcactcgccgctcggaggctacaactcggattactcgggcctgagtcactcggccttcagcagcggcgcctcctcgcacctgctcagccccgccgggcagcacctcatggacggcttcaagccagtgctacccggctcctacccggactcggccccgtcgccgctggccggcgcggggggctccatgttgagcgctgggccttcggcgccgctggggggctccccgcgctcctcagctcgccgctactccggccgcgccacctgcgactgccccaactgccaggaggcagagcggctgggccctgccggggcgagcttgcggcgcaagggcctgcacagctgccacatcccgggctgcggcaaggtgtacggcaagacttcgcacctcaaggcgcacctgcgctggcacacgggcgagcggcccttcgtgtgcaactggcttttctgcggcaagcgcttcacgcgctccgacgagctgcagcggcacctgcggacccacaccggcgagaagcgcttcgcctgtccagtttgcaacaagcgcttcatgcgcagcgaccacctcagcaagcacgtgaagacgcacagtggcggcggcggcggcggcggctcggcgggctcgggcagcggcggcaagaagggcagcgacaccgacagcgagcacagcgccgcgggcagcccgccctgccactccccagagctgctgcagccccccgagcccgggcaccgcaacggcctagagtgacgcccaccctgcgcccgcccctctccccgacctcctcccaccaagtcctcttgggccctgtctgtccggacttcaactccagcctttccctattgcatccgactcgctctctgtctctttctgtttctgcccctcttccttcttccttctgtgacttaactttgtaaaggggatatggacaagtaagtaacacgcatcgctgtcccgggccctggctttccctttccacgggtaacgctgcctgaacccgttgcagccggaacccgcgcctcgtcgggcctttatttctcgttctctcttccttgtcctcccctcctccaccccccaggttgtgaagggcgtaacttttagagggaacggccactggaggtagagctggactaatccagtgcctggtagacagcgggcctcgcgcgggcaggagcggctcggctgacaagcctgagcggagcggtggagagggagaggctggaggcctgggcagaacagcgccgcccgggcagacggctgcttggttccagagccgctgtactgagcacctcggcttcggagcaccctgccaggcccctgggcatcgccggacgtcctactcaggctgtcggggcttggtgggggtgacttttggcagcccgagacccagagtttgtagagtttagatctcccaatgtcagtctgcctctttttctttgttccctgaggtggaaccgatgcaagtttcagcaaagggcagtcttgtcgaatcgctgcagcagctttctttcatctttatagcatatattttatttttaaaaaaactagggggaaaatagcaaccttccatttggtttcccttctataatagttttttcctctaacggggagcaatctttctctcgaaactgctaatattgatcccaaagttactttgactgcattaacttaacttacggggtgggggcgggggtgagggtaggtgcttttttcttatgcaaaaatactcctttccggtgagaccagattaactatctccatgtttgtccttttctacctcgttttttcaccactcccaaacataacctcccaatcttttttgttagtccggccgtcaattgtatagtaccaatttcgtaaattctctcaattcatgaagatcgtagggttaaacttttttgtgtgtgatttaaacttacaaacaagtgaagaagctatcgtttatttcagacgaggctgtagtttaaataccaaaagagggaaaataaaaaagaacctttgtaaaatatatctgaacctaatggtttgtacaactggagaatcgttctagattagttaccaattaaatataactccgccagtgtaagggtgtgaggtgcagttgtccaggagacgattttgtatagtatttttcttgtacattacttccagtaaatatttgaaaatatattgaagtaaacttgattttttttttttgtcacaagaaaatattaagagttattgttgcagttctgatgagctgcaggttttttgaactcacttctggaggtgcagagccacaaacgcactttcggggcctagttttgctcgaatatgaatttagataggtatcaagctgtaactaagacaatatttgataaatgttggatgacatttaatttaatggagcatgtacttatttgcatttgctggcagttcaggcatagttaaagtgagagttctcctatatttcataataagtggtctgccaaaacccatgtattaaataaattgtccaagtgaaactcgactaactttggcctttgtgtatttcctgaaggtaatattgttaactgttaataaatacttctgacactacatttaaatgtttgcagattctgcaaactaattgctcattgtaatgttgaaataatttggatatttcacattgaaatgaaaagcctttctctggagcattttagatttgcattttaaatgcatgaaatgtaattgatttatttgtaatattttaaatggtataataaactcagataaaag

SEQ ID NO: 185127 - DNA, 2554 bp, Homo sapiens
  Payload ID: 16455
  Gene Symbol: SP9
  Gene Name: Sp9 transcription factor
  Uniprot ID: P0CG40
  ENST ID: ENST00000394967
  CDS Start-End: 148-1602
cttaggctgagtttagccggcgggagcctggagtccgctcggcacgagcgcggggacgcgggagccgcgcgggacccaagcagtttttccgagcagccgccaggctcagccccgctcccagcctcgctgcgcagccagagacctgctatggccacgtctatactcggggaagagccgcgcttcggaacgaccccgttggccatgctggcggcgacctgcaacaagatcggcaacacgagcccgctgacgacgctgccagagtcgagcgccttcgccaaaggcggctttcacccctggaagcgctcctcgtccagctgcaacctcggctccagcctctcgggcttcgcggtggccaccgggggccgtggctcgggcggcctggcgggcggctcgggcgccgccaacagcgccttctgcctggcctccacgtcgcccacgtcgtccgccttcagcagcgactacggcggcctcttctccaactcggcggctgccgcggcggcagcggccggggtgtccccgcaggaggcgggtggccagtcggccttcatttccaaggtgcacacgacggcagccgacgggctgtacccgcgcgtgggcatggcgcacccgtacgagtcctggtacaagtcgggcttccattcgacgctggcggccggcgaggtgaccaacggcgcggcgtcgtcgtggtgggacgtgcacagcagcccgggctcgtggctggaagtgcagaaccccgctggggggctccagagctcgctgcactcgggcgccccccaggcctcgctgcactcgcagctgggcacctacaaccccgacttcagctcgctcacgcactccgccttcagctccacgggcctcggctcctccgccgccgccgcctcccacctgctctccaccagccagcacctgctggcccaggacggcttcaagccggtgttgccctcctattcggactccagcgccgccgtggcagccgccgccgccagcgccatgatatcgggcgccgcggctgccgccgccggggggagctcggcacgctctgcccgccgctactcgggccgcgccacctgcgactgccccaactgccaggaggcggagcggctgggcccggccggggcgagcctgcggcgcaagggcctgcacagctgccacattccgggctgcggcaaggtgtacgggaagacgtcgcacctgaaggcgcacctgcgctggcacacgggcgagcggcccttcgtgtgcaactggctcttctgcggcaagcgcttcacgcgctcggacgagctgcagcggcatctgcggactcacacgggcgagaagcgcttcgcctgtccggtgtgcaacaagcgcttcatgcgcagcgaccacctgagcaaacacattaagacgcacaacgggggcggcgggggcaaaaagggcagcgacagtgacacggacgccagcaacctggagacgccccgttccgaatcccccgacctcatcctgcatgactccggcgtcagtgccgcccgggcggcggcagcggcggcggcggcagcggcggcggcggcggcggcggcctccgcgggaggcaaggaagcagcgtctggccccaacgactcttagaggccgggcgagaggcgcgagcacacaagcgagtagagacaccgagaacgaacgagaggttcggagggcgagcgagcgggaggcgggagggcaggggcttcagtgacgcccccagggcccgggctgggcgcgaggtggagccgctcagggctcccgggctgcggttcgcccgctgtgcgaggagctcccctctgccttccgcgcccggataagaatcgaacgcgtggtccggaaacaaaagcgaaccatcctccgacacaaacactttaaaaactgtactcccagacgtacacatacaccggagacctacaaccacaagcacgcacactcgcgcgcgcacacacataccactcgcccaaacttctcgagcgaagagcaatacatagaaaggctccctctttgcccactctccacctccctccaacacccgtctctttccttttctcaaaaacaagccaccacccagcaaaggactgtcagaacatttgaaaacaaacgggaccgataaaaacaccctttgtttggattatattatatataaaatgctccaagtcctgcctgatatctacttacaatgagacttttttcctaaaaaaggaagcatcaaaaggcttaaggtgagaaattaaactggaagtctagcgacagtttctctgtatttcataacatctgtataaatagggttcaaaagattgtgttctcttttattttcttgtaaatgttcattcgaatagagtttttttgggtgaatccctgaaattcagggagttttttttaattttctgatgcactttgtgaaagtcagtatatatgtaaaagatatttaaaatgttgagttatcatttcactcacaaacacgtaagttaaggtcatctaaagaaattaaatgcgtttatctgtatcaagaaaatcttgacatcatattttcattttggtattattaaaggactct

SEQ ID NO: 185128 - DNA, 5146 bp, Homo sapiens
  Payload ID: 16456
  Gene Symbol: SALL1
  Gene Name: spalt-like transcription factor 1
  Uniprot ID: Q9NSC2
  ENST ID: ENST00000251020
  CDS Start-End: 35-4009
tttttattctgccccagctgatgtttgagccagcatgtcgcggaggaagcaagcgaagcctcaacatttccaatccgaccccgaagtggcctcgctcccccggcgagatggagacacagaaaagggtcaaccgagtcgccctactaagagcaaggatgcccacgtctgtggccggtgctgtgccgagttctttgaattatcagatcttctgctccacaagaagaactgtactaaaaatcaattagttttaatcgtaaatgaaaatccagcctccccacccgaaaccttctcccccagcccccctcctgataatcctgatgaacaaatgaatgacacagttaacaaaacagatcaagtggactgcagcgacctttcagaacacaacggacttgacagggaagagtccatggaggtggaggccccggttgctaacaaaagcggcagcggcacttccagcggcagccacagcagtaccgccccaagcagcagcagcagcagcagcagcagcagcggcggcggcggcagctcctccacaggtacctcagcgatcacaacctctctacctcaactcggggacctgacaacactgggcaacttctccgtaatcaacagcaacgtcatcatcgagaacctccagagcaccaaggtggcggtggcccagttctcccaggaagcgaggtgcggcggggcctctgggggcaagctggccgtcccagccctcatggaacaactcctagctctgcagcagcagcagatccaccagctgcaattgatcgaacagattcgtcaccaaatattgctgttggcttctcagaatgcagacttgccaacatcttctagtccttctcaaggtactttacgaacatctgccaaccccttgtccacgctaagttcccatttatctcagcagctggcagcagcagctggattggcacagagcctcgccagccaatctgccagcattagtggtgtgaaacagctacccccaatccagctacctcagagcagttctggcaacaccatcattccatccaacagcggctcttctcccaatatgaacatattggcagcggcagttaccaccccgtcctctgaaaaagtggcttcaagtgctggggcctcccatgtcagcaacccagcggtctcatcatcgtcctcaccagcttttgcaataagcagtttattaagtcctgcgtctaatccacttctacctcagcaagcctccgctaactcggttttccccagccctttgcccaacatcggaacaactgcagaggatttaaactccttgtctgccttggcccagcaaagaaaaagcaagccaccaaatgtcactgcctttgaagcgaaaagtacttccgatgaggcattcttcaaacacaagtgcaggttctgcgcgaaggtctttgggagtgacagtgccttgcagatccacttgcgttcccataccggagagaggccattcaagtgcaacatctgcgggaacaggttctccaccaaggggaatctgaaagtccactttcagcgccacaaagagaaataccctcatatccagatgaacccctatcctgtgcctgagcatttggacaatatccccacgagtactggcatcccatatggcatgtccatccctccagagaagccagtcaccagctggctagacaccaaaccagtcctgcctactctgaccacttcagtcggcctgccgttgcccccaaccctcccaagcctcatacccttcatcaagacggaagagccagcccccatccccatcagccattctgccaccagccccccaggctcagtcaaaagtgactccgggggccctgagtcagccacaagaaacctaggtgggctcccagaggaagccgaagggtccactctgccaccctctggtggcaaaagcgaagagagtggcatggtcaccaactcagtcccgacggcgagcagtagcgtcctgagctccccagcggcagactgcggccccgcgggcagtgccaccaccttcaccaaccctttgttgccgctcatgtccgagcagttcaaggccaagtttccttttgggggactcctggactcagctcaggcatcagagacgtccaagcttcagcaactggtagaaaacattgacaagaaggccactgaccccaatgagtgcatcatctgccaccgggttctcagctgccagagcgccttgaaaatgcactacaggacacacactggggagaggccctttaagtgtaagatctgtggccgggctttcaccacgaaagggaatcttaaaacccactacagtgtccatcgtgctatgcccccgctcagagtccagcattcctgccccatctgccagaagaagttcacgaacgctgtggtcctgcagcagcacatccgaatgcatatgggaggccagatccccaacaccccagtccccgacagctactctgagtccatggagtctgacacaggttcctttgatgagaaaaattttgatgacctagacaacttctctgatgaaaacatggaagactgtcctgagggcagcatccctgatacacctaagtctgcagacgcctcccaagacagcttatcctcttcgcctttgcccctcgagatgtcgagcatcgctgctttggaaaatcagatgaagatgatcaatgctggcctggcagagcagctacaggccagcctgaagtcagtggagaatgggtccatcgagggggatgtcctgaccaatgattcatcctcagtgggtggtgacatggaaagccaaagtgctggcagcccagccatctcagagtctacctcttccatgcaggctctgtccccgtccaacagcacgcaggagttccacaagtcacccagcattgaggagaaaccacagagagcggtcccaagcgagtttgccaatggtttgtctcccaccccagtgaatggtggggctttggatttgacatctagtcacgcagagaaaatcatcaaagaagattctttggggatcctcttcccttttagagaccggggtaaatttaaaaacactgcttgtgacatttgtggcaaaacatttgcttgtcagagtgccttggacattcactatagaagtcataccaaagagagaccatttatttgcacagtttgcaatcgtggcttttccacaaagggtaatttgaagcagcacatgttgacacatcagatgcgagatctgccatcccagctctttgagcccagttccaaccttggccccaatcagaactcagcggtgattcccgccaactcgttgtcatctctcatcaagacagaggtcaacggcttcgtgcatgtttctcctcaggacagtaaggacacccccaccagtcacgtcccgtctgggcctctgtcttcctctgccacatccccagttctgctccctgctctgcccaggagaactcccaagcagcactactgcaacacatgtggcaaaaccttctcctcatcgagtgccctgcagattcacgagagaactcacactggagagaaaccctttgcttgcactatttgtggaagagctttcacgactaaaggcaatcttaaggtacacatgggcactcacatgtggaatagcacccctgcacgacggggtcggcggctctctgtggatggccccatgacatttctaggaggcaatcccgtcaagttcccagaaatgttccagaaggatttggcggcaagatcaggaagtggggatccttccagcttctggaatcagtatgcagcagcgctctccaacgggctggcgatgaaggccaacgagatctccgtcattcagaacggtggcatccctccaattcctggaagcctcggcagtgggaacagctcacctgttagtgggctgacgggaaacctggagaggctccagaactcagagcccaatgctcccctggccggcctggagaaaatggcaagcagtgagaacggaaccaacttccgcttcacccgcttcgtggaggacagcaaggagatcgtcacgagttaaagcagctcgggctggagacatagcattcattcctgttcagaatgcgacctatggtggcctcctactccttgccccccaccccgccccgccccttccttctgttccccagatctatgaactacaacattatgaagacattcttttgtaccttgttcaactttagagttctaagaaagcttatttattagcgatataaccttgctttgcaaacagaatgcaagcgttaactttggtcttctgtattttggactaaatactaattgactagagtgctgtaaacttgctgtaacatttatggcaattgcaagttgccctgctaggcagttgtaatctggcattaacttattttctatatccagtttaatatgaatctggtgttgatgcaatgcctcagtgatgcattagatctctaataaagtctgtatatacatgtacactttgatcctgctggaaaattttatcagcaaacacattgtctaatctttcaaaacagatttaaggaaaggactgaaagtacagactgaacagtgtggttctttgaaaggtttggttttttaatttttattctaaaattcaacctttttttttgtcgatttaaccatttccattttgaactgctatttgtattgtgctttttacttgagtcgtcttcaatgttaataagtttctgtacagtaataagcacgcagaattctttagagaaaaagaaaacaagcgttgttttggtagttgaaactgagacgtaacattttgccttgtaggtatattcacgatagaaaatgtgtgctggaatttcacaatgctgctaagtatagcatcttgaacaaccttcagtggagaaaatgtagatgctcttgtatatacaataagaaatatcactttcattcaaatgtacatatgttccttacaagagcaaatgcttcttcttgatcaagagagcaggtatagtgtttgtttattttgtcttaggtatggaagaaaaaaattggactgttacatgcactttcttggaaagttgaaaggaaagggggggtccaatttctttaacatttaatacttactaacaacagagatactgtaattttactcaagtaatcaaatacattttttttgcaacagataaaacaaaatactgtg

SEQ ID NO: 185129 - DNA, 5253 bp, Homo sapiens
  Payload ID: 16456
  Gene Symbol: SALL1
  Gene Name: spalt-like transcription factor 1
  Uniprot ID: Q9NSC2
  ENST ID: ENST00000440970
  CDS Start-End: 433-4116
ctttggaggttcagagctgcaagaagatggggactggtgtcggggcgccagcgcctgacccgctggggttgcggccggggtggagagtgctgctggccgccagttgttccggagacggtgcaaacggacggggaaagtgtcggggtctggctcgcaaaatttatctccgcatctcttcccacaacacttgcaccctctgccccccaaaatctttctggagacacagaaaagggtcaaccgagtcgccctactaagagcaaggatgcccacgtctgtggccggtgctgtgccgagttctttgaattatcagatcttctgctccacaagaagaactgtactaaaaatcaattagttttaatcgtaaatgaaaatccagcctccccacccgaaaccttctcccccagcccccctcctgataatcctgatgaacaaatgaatgacacagttaacaaaacagatcaagtggactgcagcgacctttcagaacacaacggacttgacagggaagagtccatggaggtggaggccccggttgctaacaaaagcggcagcggcacttccagcggcagccacagcagtaccgccccaagcagcagcagcagcagcagcagcagcagcggcggcggcggcagctcctccacaggtacctcagcgatcacaacctctctacctcaactcggggacctgacaacactgggcaacttctccgtaatcaacagcaacgtcatcatcgagaacctccagagcaccaaggtggcggtggcccagttctcccaggaagcgaggtgcggcggggcctctgggggcaagctggccgtcccagccctcatggaacaactcctagctctgcagcagcagcagatccaccagctgcaattgatcgaacagattcgtcaccaaatattgctgttggcttctcagaatgcagacttgccaacatcttctagtccttctcaaggtactttacgaacatctgccaaccccttgtccacgctaagttcccatttatctcagcagctggcagcagcagctggattggcacagagcctcgccagccaatctgccagcattagtggtgtgaaacagctacccccaatccagctacctcagagcagttctggcaacaccatcattccatccaacagcggctcttctcccaatatgaacatattggcagcggcagttaccaccccgtcctctgaaaaagtggcttcaagtgctggggcctcccatgtcagcaacccagcggtctcatcatcgtcctcaccagcttttgcaataagcagtttattaagtcctgcgtctaatccacttctacctcagcaagcctccgctaactcggttttccccagccctttgcccaacatcggaacaactgcagaggatttaaactccttgtctgccttggcccagcaaagaaaaagcaagccaccaaatgtcactgcctttgaagcgaaaagtacttccgatgaggcattcttcaaacacaagtgcaggttctgcgcgaaggtctttgggagtgacagtgccttgcagatccacttgcgttcccataccggagagaggccattcaagtgcaacatctgcgggaacaggttctccaccaaggggaatctgaaagtccactttcagcgccacaaagagaaataccctcatatccagatgaacccctatcctgtgcctgagcatttggacaatatccccacgagtactggcatcccatatggcatgtccatccctccagagaagccagtcaccagctggctagacaccaaaccagtcctgcctactctgaccacttcagtcggcctgccgttgcccccaaccctcccaagcctcatacccttcatcaagacggaagagccagcccccatccccatcagccattctgccaccagccccccaggctcagtcaaaagtgactccgggggccctgagtcagccacaagaaacctaggtgggctcccagaggaagccgaagggtccactctgccaccctctggtggcaaaagcgaagagagtggcatggtcaccaactcagtcccgacggcgagcagtagcgtcctgagctccccagcggcagactgcggccccgcgggcagtgccaccaccttcaccaaccctttgttgccgctcatgtccgagcagttcaaggccaagtttccttttgggggactcctggactcagctcaggcatcagagacgtccaagcttcagcaactggtagaaaacattgacaagaaggccactgaccccaatgagtgcatcatctgccaccgggttctcagctgccagagcgccttgaaaatgcactacaggacacacactggggagaggccctttaagtgtaagatctgtggccgggctttcaccacgaaagggaatcttaaaacccactacagtgtccatcgtgctatgcccccgctcagagtccagcattcctgccccatctgccagaagaagttcacgaacgctgtggtcctgcagcagcacatccgaatgcatatgggaggccagatccccaacaccccagtccccgacagctactctgagtccatggagtctgacacaggttcctttgatgagaaaaattttgatgacctagacaacttctctgatgaaaacatggaagactgtcctgagggcagcatccctgatacacctaagtctgcagacgcctcccaagacagcttatcctcttcgcctttgcccctcgagatgtcgagcatcgctgctttggaaaatcagatgaagatgatcaatgctggcctggcagagcagctacaggccagcctgaagtcagtggagaatgggtccatcgagggggatgtcctgaccaatgattcatcctcagtgggtggtgacatggaaagccaaagtgctggcagcccagccatctcagagtctacctcttccatgcaggctctgtccccgtccaacagcacgcaggagttccacaagtcacccagcattgaggagaaaccacagagagcggtcccaagcgagtttgccaatggtttgtctcccaccccagtgaatggtggggctttggatttgacatctagtcacgcagagaaaatcatcaaagaagattctttggggatcctcttcccttttagagaccggggtaaatttaaaaacactgcttgtgacatttgtggcaaaacatttgcttgtcagagtgccttggacattcactatagaagtcataccaaagagagaccatttatttgcacagtttgcaatcgtggcttttccacaaagggtaatttgaagcagcacatgttgacacatcagatgcgagatctgccatcccagctctttgagcccagttccaaccttggccccaatcagaactcagcggtgattcccgccaactcgttgtcatctctcatcaagacagaggtcaacggcttcgtgcatgtttctcctcaggacagtaaggacacccccaccagtcacgtcccgtctgggcctctgtcttcctctgccacatccccagttctgctccctgctctgcccaggagaactcccaagcagcactactgcaacacatgtggcaaaaccttctcctcatcgagtgccctgcagattcacgagagaactcacactggagagaaaccctttgcttgcactatttgtggaagagctttcacgactaaaggcaatcttaaggtacacatgggcactcacatgtggaatagcacccctgcacgacggggtcggcggctctctgtggatggccccatgacatttctaggaggcaatcccgtcaagttcccagaaatgttccagaaggatttggcggcaagatcaggaagtggggatccttccagcttctggaatcagtatgcagcagcgctctccaacgggctggcgatgaaggccaacgagatctccgtcattcagaacggtggcatccctccaattcctggaagcctcggcagtgggaacagctcacctgttagtgggctgacgggaaacctggagaggctccagaactcagagcccaatgctcccctggccggcctggagaaaatggcaagcagtgagaacggaaccaacttccgcttcacccgcttcgtggaggacagcaaggagatcgtcacgagttaaagcagctcgggctggagacatagcattcattcctgttcagaatgcgacctatggtggcctcctactccttgccccccaccccgccccgccccttccttctgttccccagatctatgaactacaacattatgaagacattcttttgtaccttgttcaactttagagttctaagaaagcttatttattagcgatataaccttgctttgcaaacagaatgcaagcgttaactttggtcttctgtattttggactaaatactaattgactagagtgctgtaaacttgctgtaacatttatggcaattgcaagttgccctgctaggcagttgtaatctggcattaacttattttctatatccagtttaatatgaatctggtgttgatgcaatgcctcagtgatgcattagatctctaataaagtctgtatatacatgtacactttgatcctgctggaaaattttatcagcaaacacattgtctaatctttcaaaacagatttaaggaaaggactgaaagtacagactgaacagtgtggttctttgaaaggtttggttttttaatttttattctaaaattcaacctttttttttgtcgatttaaccatttccattttgaactgctatttgtattgtgctttttacttgagtcgtcttcaatgttaataagtttctgtacagtaataagcacgcagaattctttagagaaaaagaaaacaagcgttgttttggtagttgaaactgagacgtaacattttgccttgtaggtatattcacgatagaaaatgtgtgctggaatttcacaatgctgctaagtatagcatcttgaacaaccttcagtggagaaaatgtagatgctcttgtatatacaataagaaatatcactttcattcaaatgtacatatgttccttacaagagcaaatgcttcttcttgatcaagagagcaggtatagtgtttgtttattttgtcttaggtatggaagaaaaaaattggactgttacatgcactttcttggaaagttgaaaggaaagggggggtccaatttctttaacatttaatacttactaacaacagagatactgtaattttactcaagtaatcaaatacattttttttgcaacagataaaacaaaatactgtg

SEQ ID NO: 185130 - DNA, 565 bp, Homo sapiens
  Payload ID: 16456
  Gene Symbol: SALL1
  Gene Name: spalt-like transcription factor 1
  ENST ID: ENST00000566102
  CDS Start-End: 1-105
atgtcgcggaggaagcaagcgaagcctcaacatttccaatccgaccccgaagtggcctcgctcccccggcgagatggtacacatgggcactcacatgtggaatagcacccctgcacgacggggtcggcggctctctgtggatggccccatgacatttctaggaggcaatcccgtcaagttcccagaaatgttccagaaggatttggcggcaagatcaggaagtggggatccttccagcttctggaatcagtatgcagcagcgctctccaacgggctggcgatgaaggccaacgagatctccgtcattcagaacggtggcatccctccaattcctggaagcctcggcagtgggaacagctcacctgttagtgggctgacgggaaacctggagaggctccagaactcagagcccaatgctcccctggccggcctggagaaaatggcaagcagtgagaacggaaccaacttccgcttcacccgcttcgtggaggacagcaaggagatcgtcacgagttaaagcagctcgggctggagacatagcattcattcctgttcagaatgcgac

SEQ ID NO: 185131 - DNA, 3896 bp, Homo sapiens
  Payload ID: 16456
  Gene Symbol: SALL1
  Gene Name: spalt-like transcription factor 1
  ENST ID: ENST00000570206
  CDS Start-End: 433-3896
ctttggaggttcagagctgcaagaagatggggactggtgtcggggcgccagcgcctgacccgctggggttgcggccggggtggagagtgctgctggccgccagttgttccggagacggtgcaaacggacggggaaagtgtcggggtctggctcgcaaaatttatctccgcatctcttcccacaacacttgcaccctctgccccccaaaatctttctggagacacagaaaagggtcaaccgagtcgccctactaagagcaaggatgcccacgtctgtggccggtgctgtgccgagttctttgaattatcagatcttctgctccacaagaagaactgtactaaaaatcaattagttttaatcgtaaatgaaaatccagcctccccacccgaaaccttctcccccagcccccctcctgataatcctgatgaacaaatgaatgacacagttaacaaaacagatcaagtggactgcagcgacctttcagaacacaacggacttgacagggaagagtccatggaggtggaggccccggttgctaacaaaagcggcagcggcacttccagcggcagccacagcagtaccgccccaagcagcagcagcagcagcagcagcagcagcggcggcggcggcagctcctccacaggtacctcagcgatcacaacctctctacctcaactcggggacctgacaacactgggcaacttctccgtaatcaacagcaacgtcatcatcgagaacctccagagcaccaaggtggcggtggcccagttctcccaggaagcgaggtgcggcggggcctctgggggcaagctggccgtcccagccctcatggaacaactcctagctctgcagcagcagcagatccaccagctgcaattgatcgaacagattcgtcaccaaatattgctgttggcttctcagaatgcagacttgccaacatcttctagtccttctcaaggtactttacgaacatctgccaaccccttgtccacgctaagttcccatttatctcagcagctggcagcagcagctggattggcacagagcctcgccagccaatctgccagcattagtggtgtgaaacagctacccccaatccagctacctcagagcagttctggcaacaccatcattccatccaacagcggctcttctcccaatatgaacatattggcagcggcagttaccaccccgtcctctgaaaaagtggcttcaagtgctggggcctcccatgtcagcaacccagcggtctcatcatcgtcctcaccagcttttgcaataagcagtttattaagtcctgcgtctaatccacttctacctcagcaagcctccgctaactcggttttccccagccctttgcccaacatcggaacaactgcagaggatttaaactccttgtctgccttggcccagcaaagaaaaagcaagccaccaaatgtcactgcctttgaagcgaaaagtacttccgatgaggcattcttcaaacacaagtgcaggttctgcgcgaaggtctttgggagtgacagtgccttgcagatccacttgcgttcccataccggagagaggccattcaagtgcaacatctgcgggaacaggttctccaccaaggggaatctgaaagtccactttcagcgccacaaagagaaataccctcatatccagatgaacccctatcctgtgcctgagcatttggacaatatccccacgagtactggcatcccatatggcatgtccatccctccagagaagccagtcaccagctggctagacaccaaaccagtcctgcctactctgaccacttcagtcggcctgccgttgcccccaaccctcccaagcctcatacccttcatcaagacggaagagccagcccccatccccatcagccattctgccaccagccccccaggctcagtcaaaagtgactccgggggccctgagtcagccacaagaaacctaggtgggctcccagaggaagccgaagggtccactctgccaccctctggtggcaaaagcgaagagagtggcatggtcaccaactcagtcccgacggcgagcagtagcgtcctgagctccccagcggcagactgcggccccgcgggcagtgccaccaccttcaccaaccctttgttgccgctcatgtccgagcagttcaaggccaagtttccttttgggggactcctggactcagctcaggcatcagagacgtccaagcttcagcaactggtagaaaacattgacaagaaggccactgaccccaatgagtgcatcatctgccaccgggttctcagctgccagagcgccttgaaaatgcactacaggacacacactggggagaggccctttaagtgtaagatctgtggccgggctttcaccacgaaagggaatcttaaaacccactacagtgtccatcgtgctatgcccccgctcagagtccagcattcctgccccatctgccagaagaagttcacgaacgctgtggtcctgcagcagcacatccgaatgcatatgggaggccagatccccaacaccccagtccccgacagctactctgagtccatggagtctgacacaggttcctttgatgagaaaaattttgatgacctagacaacttctctgatgaaaacatggaagactgtcctgagggcagcatccctgatacacctaagtctgcagacgcctcccaagacagcttatcctcttcgcctttgcccctcgagatgtcgagcatcgctgctttggaaaatcagatgaagatgatcaatgctggcctggcagagcagctacaggccagcctgaagtcagtggagaatgggtccatcgagggggatgtcctgaccaatgattcatcctcagtgggtggtgacatggaaagccaaagtgctggcagcccagccatctcagagtctacctcttccatgcaggctctgtccccgtccaacagcacgcaggagttccacaagtcacccagcattgaggagaaaccacagagagcggtcccaagcgagtttgccaatggtttgtctcccaccccagtgaatggtggggctttggatttgacatctagtcacgcagagaaaatcatcaaagaagattctttggggatcctcttcccttttagagaccggggtaaatttaaaaacactgcttgtgacatttgtggcaaaacatttgcttgtcagagtgccttggacattcactatagaagtcataccaaagagagaccatttatttgcacagtttgcaatcgtggcttttccacaaagggtaatttgaagcagcacatgttgacacatcagatgcgagatctgccatcccagctctttgagcccagttccaaccttggccccaatcagaactcagcggtgattcccgccaactcgttgtcatctctcatcaagacagaggtcaacggcttcgtgcatgtttctcctcaggacagtaaggacacccccaccagtcacgtcccgtctgggcctctgtcttcctctgccacatccccagttctgctccctgctctgcccaggagaactcccaagcagcactactgcaacacatgtggcaaaaccttctcctcatcgagtgccctgcagattcacgagagaactcacactggagagaaaccctttgcttgcactatttgtggaagagctttcacgactaaaggcaatcttaaggtacacatgggcactcacatgtggaatagcacccctgcacgacggggtcggcggctctctgtggatggccccatgacatttctaggaggcaatcccgtcaagttcccagaaatgttccagaaggatttggcggcaagatcaggaagtggggatccttccagcttctggaatcagtatgcagcagcgctctccaacgggctggcgatgaaggccaacgagat

SEQ ID NO: 185132 - DNA, 3178 bp, Homo sapiens
  Payload ID: 16457
  Gene Symbol: SALL2
  Gene Name: spalt-like transcription factor 2
  ENST ID: ENST00000450879
  CDS Start-End: 101-2821
ctgggtgcagaggctgccgcagacccagcggccatcgcctccctcaatcccaatatccattgtctcccaccccacctggccctccacttcccccacaaccatggcgcacgaatccgagaggagctctcgtctcggggtgccctgcggggagccggcagagctcggaggtgatgctagcgaggaggatcacccccaagtctgtgccaagtgctgcgcacaattcactgacccaactgaattcctcgcccaccagaacgcatgttctactgaccctcctgtaatggtgataattgggggccaggagaaccccaacaactcttcggcctcctctgaaccccggcctgagggtcacaataatcctcaggtcatggacacagagcatagcaaccccccagattctgggtcctccgtgcccacggatcccacctggggcccagagaggagaggagaggagtcttcagggcatttcctggtcgctgccacaggggcagaaacgcccaagcaggccttcttccacctttaccacccactggggtcacagcatcctttctctgctggaggggttgggcgaagccacaaacccacccctgccccttccccagccttgccaggcagcacagatcagctgattgcctcgcctcatctggcattcccaagcaccacgggactactggcagcacagtgtcttggggcagcccgaggccttgaggccactgcctccccagggctcctgaagccaaagaatggaagtggtgagctgagctacggagaagtgatgggtcccttggagaagcctggtggaaggcacaaatgccgcttctgtgccaaagtatttggcagtgacagtgccctgcagatccaccttcgttcccacacgggtgagaggccctataagtgcaatgtctgtggaaaccgttttaccacccgtggcaacctcaaagtgcatttccaccggcatcgtgagaagtacccacatgtgcagatgaacccacacccagtaccagagcacctagactatgtcattaccagcagtggcttgccttatggtatgtccgtgccaccagagaaggccgaggaggaggcagccactccaggtggaggggttgagcgcaagcctctggtggcctccacaacagcactcagtgccacagagagcctgactctgctctccaccagtgcaggcacagccacggctccaggactccctgctttcaataagtttgtgctcatgaaagcagtggaacccaagaataaagctgatgaaaacacccccccagggagtgagggctcagccatcagtggagtggcagaaagtagcacggcaactcgcatgcaactaagtaagttggtgacttcactaccaagctgggcactgcttaccaaccacttcaagtccactggcagcttccccttcccctatgtgctagagcccttgggggcctcaccctctgagacatcaaagctgcagcaactggtagaaaagattgaccggcaaggagctgtggcggtgacctcagctgcctcaggagcccccaccacctctgcccctgcaccttcatcctcagcctcttctggacctaaccagtgtgtcatctgtctccgagtgcttagctgtcctcgggccctacgccttcattatggccaacatggaggtgagaggcccttcaaatgcaaagtgtgtggcagagccttctccaccaggggtaatctgcgtgcacatttcgtgggccacaaggccagtccagctgcccgggcacagaattcctgccccatctgccagaagaagttcaccaatgctgtcactctgcagcagcatgtccggatgcacctggggggccagatccccaacggtggtactgcactccctgaaggtggaggagctgctcaggagaatggctccgagcaatctacagtctccggggcacggagtttcccccagcagcagtcccagcagccatcaccggaagaggagttgtctgaggaggaggaagaggaggatgaggaagaagaggaagatgtgactgatgaagattccctggcagggagaggctcagagagtggaggtgagaaggcaatatcagtgagaggtgattcagaagaggcatctggggcagaggaggaggtggggacagtggcggcagcagccacagctgggaaggagatggacagtaatgagaaaactactcaacagtcttctttgccaccaccaccaccacctgacagcctggatcagcctcagccaatggagcagggaagcagtggtgttttaggaggcaaggaagaggggggcaaaccggagagaagctcaagtccggcatcagcactcaccccagaaggggaagccaccagcgtgaccttggtagaggagctgagcctgcaggaggcaatgagaaaggagccaggagagagcagcagcagaaaggcctgcgaagtgtgtggccaggcctttccctcccaggcagctctggaggagcatcagaagacccaccccaaggaggggccgctcttcacttgtgttttctgcaggcagggctttcttgagcgggctaccctcaagaagcatatgctcctggcacaccaccagaaccagtatgtggcattcctgtcaaatggcctgcccatgaagccctggaattccagctccacctccactaccactccaagcctggccccaccagtgctgtttggcctaggaactgtggctgggaaggtgcctccaacaatgggatccagggaagccaaggagaagacagcccccctcctatttcagcctcctgcacccaaggcagtgcctgagaagcccatcatagacaagaagtagcaaactgtacattccttcttcctccccctgctccagaaggtgccggtactgaagatgctccagtaattggtgacccaaccctaggaagtagggagaaatgaaggaagggcataggaaaattttcccagtaaatcccctgatggtcacattaaggtaaaggttttggctggtcagtgtgccaagacctctccagcttctcattcatgatgacctctcaaagttgggaaacaagctgatttcttgccaagaggtctcccaggagatatttgggaaatgtgaagttcgtatctttaaggagcatttttggtcagcatggttgatgaactaatgatgagagagttaaggaatgttgctaga

SEQ ID NO: 185133 - DNA, 659 bp, Homo sapiens
  Payload ID: 16457
  Gene Symbol: SALL2
  Gene Name: spalt-like transcription factor 2
  ENST ID: ENST00000537235
  CDS Start-End: 87-659
tgccgcagacccagcggccatcgcctccctcaatcccaatatccattgtctcccaccccacctggccctccacttcccccacaaccatggcgcacgaatccgagaggagctctcgtctcggggtgccctgcggggagccggcagagctcggaggtgatgctagcgaggaggatcacccccaagtctgtgccaagtgctgcgcacaattcactgacccaactgaattcctcgcccaccagaacgcatgttctactgaccctcctgtaatggtgataattgggggccaggagaaccccaacaactcttcggcctcctctgaaccccggcctgagggtcacaataatcctcaggtcatggacacagagcatagcaaccccccagattctgggtcctccgtgcccacggatcccacctggggcccagagaggagaggagaggagtcttcagggcatttcctggtcgctgccacaggtacagcggctgggggaggcgggggcctgatcttggccagtcccaagctgggagcaaccccattacctccagaatcgacccctgcaccccctcctcctccaccaccccctccgcccccaggggtaggcagtggccacttgaatatccccctgatcttggaagagctacgggtgctgcagcagcggcag

SEQ ID NO: 185134 - DNA, 553 bp, Homo sapiens
  Payload ID: 16457
  Gene Symbol: SALL2
  Gene Name: spalt-like transcription factor 2
  ENST ID: ENST00000541965
  CDS Start-End: 257-553
agagaatcagagagagagagagagtctgtgtctctgggaaagaagaacatctctgcttcacagtgatttgcgctgggggagaggcatcaattggcttcggacccaagggggagacgagaccaggtcaccccggttaagaccaagtgatgctagcgaggaggatcacccccaagtctgtgccaagtgctgcgcacaattcactgacccaactgaattcctcgcccaccagaacgcatgttctactgaccctcctgtaatggtgataattgggggccaggagaaccccaacaactcttcggcctcctctgaaccccggcctgagggtcacaataatcctcaggtcatggacacagagcatagcaaccccccagattctgggtcctccgtgcccacggatcccacctggggcccagagaggagaggagaggagtcttcagggcatttcctggtcgctgccacaggtacagcggctgggggaggcgggggcctgatcttggccagtcccaagctgggagcaaccccattacctccagaatcgacccctgcaccccct

SEQ ID NO: 185135 - DNA, 3094 bp, Homo sapiens
  Payload ID: 16457
  Gene Symbol: SALL2
  Gene Name: spalt-like transcription factor 2
  ENST ID: ENST00000546363
  CDS Start-End: 1-2708
ggaaaccccaacagttaatctcggactgcgaaggtcccagcgcgtctgagaacggtgatgctagcgaggaggatcacccccaagtctgtgccaagtgctgcgcacaattcactgacccaactgaattcctcgcccaccagaacgcatgttctactgaccctcctgtaatggtgataattgggggccaggagaaccccaacaactcttcggcctcctctgaaccccggcctgagggtcacaataatcctcaggtcatggacacagagcatagcaaccccccagattctgggtcctccgtgcccacggatcccacctggggcccagagaggagaggagaggagtcttcagggcatttcctggtcgctgccacaggggcagaaacgcccaagcaggccttcttccacctttaccacccactggggtcacagcatcctttctctgctggaggggttgggcgaagccacaaacccacccctgccccttccccagccttgccaggcagcacagatcagctgattgcctcgcctcatctggcattcccaagcaccacgggactactggcagcacagtgtcttggggcagcccgaggccttgaggccactgcctccccagggctcctgaagccaaagaatggaagtggtgagctgagctacggagaagtgatgggtcccttggagaagcctggtggaaggcacaaatgccgcttctgtgccaaagtatttggcagtgacagtgccctgcagatccaccttcgttcccacacgggtgagaggccctataagtgcaatgtctgtggaaaccgttttaccacccgtggcaacctcaaagtgcatttccaccggcatcgtgagaagtacccacatgtgcagatgaacccacacccagtaccagagcacctagactatgtcattaccagcagtggcttgccttatggtatgtccgtgccaccagagaaggccgaggaggaggcagccactccaggtggaggggttgagcgcaagcctctggtggcctccacaacagcactcagtgccacagagagcctgactctgctctccaccagtgcaggcacagccacggctccaggactccctgctttcaataagtttgtgctcatgaaagcagtggaacccaagaataaagctgatgaaaacacccccccagggagtgagggctcagccatcagtggagtggcagaaagtagcacggcaactcgcatgcaactaagtaagttggtgacttcactaccaagctgggcactgcttaccaaccacttcaagtccactggcagcttccccttcccctatgtgctagagcccttgggggcctcaccctctgagacatcaaagctgcagcaactggtagaaaagattgaccggcaaggagctgtggcggtgacctcagctgcctcaggagcccccaccacctctgcccctgcaccttcatcctcagcctcttctggacctaaccagtgtgtcatctgtctccgagtgcttagctgtcctcgggccctacgccttcattatggccaacatggaggtgagaggcccttcaaatgcaaagtgtgtggcagagccttctccaccaggggtaatctgcgtgcacatttcgtgggccacaaggccagtccagctgcccgggcacagaattcctgccccatctgccagaagaagttcaccaatgctgtcactctgcagcagcatgtccggatgcacctggggggccagatccccaacggtggtactgcactccctgaaggtggaggagctgctcaggagaatggctccgagcaatctacagtctccggggcacggagtttcccccagcagcagtcccagcagccatcaccggaagaggagttgtctgaggaggaggaagaggaggatgaggaagaagaggaagatgtgactgatgaagattccctggcagggagaggctcagagagtggaggtgagaaggcaatatcagtgagaggtgattcagaagaggcatctggggcagaggaggaggtggggacagtggcggcagcagccacagctgggaaggagatggacagtaatgagaaaactactcaacagtcttctttgccaccaccaccaccacctgacagcctggatcagcctcagccaatggagcagggaagcagtggtgttttaggaggcaaggaagaggggggcaaaccggagagaagctcaagtccggcatcagcactcaccccagaaggggaagccaccagcgtgaccttggtagaggagctgagcctgcaggaggcaatgagaaaggagccaggagagagcagcagcagaaaggcctgcgaagtgtgtggccaggcctttccctcccaggcagctctggaggagcatcagaagacccaccccaaggaggggccgctcttcacttgtgttttctgcaggcagggctttcttgagcgggctaccctcaagaagcatatgctcctggcacaccaccagaaccagtatgtggcattcctgtcaaatggcctgcccatgaagccctggaattccagctccacctccactaccactccaagcctggccccaccagtgctgtttggcctaggaactgtggctgggaaggtgcctccaacaatgggatccagggaagccaaggagaagacagcccccctcctatttcagcctcctgcacccaaggcagtgcctgagaagcccatcatagacaagaagtagcaaactgtacattccttcttcctccccctgctccagaaggtgccggtactgaagatgctccagtaattggtgacccaaccctaggaagtagggagaaatgaaggaagggcataggaaaattttcccagtaaatcccctgatggtcacattaaggtaaaggttttggctggtcagtgtgccaagacctctccagcttctcattcatgatgacctctcaaagttgggaaacaagctgatttcttgccaagaggtctcccaggagatatttgggaaatgtgaagttcgtatctttaaggagcatttttggtcagcatggttgatgaactaatgatgagagagttaaggaatgttgctagaacatagggcttgctggtacctatgtgact

SEQ ID NO: 185136 - DNA, 1566 bp, Homo sapiens
  Payload ID: 16457
  Gene Symbol: SALL2
  Gene Name: spalt-like transcription factor 2
  ENST ID: ENST00000613414
  CDS Start-End: 14-616
tctctacccgggaatgtctcggcgaaagcagcggaaaccccaacagttaatctcggactgcgaaggtcccagcgcgtctgagaacggtgatgctagcgaggaggatcacccccaagtctgtgccaagtgctgcgcacaattcactgacccaactgaattcctcgcccaccagaacgcatgttctactgaccctcctgtaatggtgataattgggggccaggagaaccccaacaactcttcggcctcctctgaaccccggcctgagggtcacaataatcctcaggtcatggacacagagcatagcaaccccccagattctgggtcctccgtgcccacggatcccacctggggcccagagaggagaggagaggagtcttcagggcatttcctggtcgctgccacagaaccagtatgtggcattcctgtcaaatggcctgcccatgaagccctggaattccagctccacctccactaccactccaagcctggccccaccagtgctgtttggcctaggaactgtggctgggaaggtgcctccaacaatgggatccagggaagccaaggagaagacagcccccctcctatttcagcctcctgcacccaaggcagtgcctgagaagcccatcatagacaagaagtagcaaactgtacattccttcttcctccccctgctccagaaggtgccggtactgaagatgctccagtaattggtgacccaaccctaggaagtagggagaaatgaaggaagggcataggaaaattttcccagtaaatcccctgatggtcacattaaggtaaaggttttggctggtcagtgtgccaagacctctccagcttctcattcatgatgacctctcaaagttgggaaacaagctgatttcttgccaagaggtctcccaggagatatttgggaaatgtgaagttcgtatctttaaggagcatttttggtcagcatggttgatgaactaatgatgagagagttaaggaatgttgctagaacatagggcttgctggtacctatgtgactaagaaagggacatgatgtaagggaaaaggcctcaaattcttgtgaatgtctggacattctcgttaatattcttttgggctaatagtgacatagtgtgcagaggtgtaccagggatcatgggggatttcctagcactagtatgcttctagttttagataactccctcctttattccctggccccttgtattttccttatcttcctctttcaagacccctacccattttgcctatccgtaggctggggcttgtgtctttgtcattgtctggttcttaagagtcccagactttgggagaccagctccaggtggcgtcctccctgcctctccgtcttgtaatgagttgtagtatttactcttaacataggatcatttggaacaggagttctgaggaggagagagtgagggttttgctattgactgacttgaacgatggcttctcctcaagctgtaggctccagagcttcctaacctagtaaaatgtcaagaacagacgggagatattagtgtctttccctctatcattaaaggtgttttaacc

SEQ ID NO: 185137 - DNA, 4942 bp, Homo sapiens
  Payload ID: 16457
  Gene Symbol: SALL2
  Gene Name: spalt-like transcription factor 2
  Uniprot ID: Q9Y467
  ENST ID: ENST00000614342
  CDS Start-End: 296-3319
gcttttacaatgggagctgcagaagcgtagggaagaagctgaagaaaaaaagggggcgtctcccctttaaagacttgcaaagattgagagagaaagagagagagtcaagaacagagaatcagagagagagagagagtctgtgtctctgggaaagaagaacatctctgcttcacagtgatttgcgctgggggagaggcatcaattggcttcggacccaagggggagacgagaccaggtcaccccggttaagaccaagtgagcgttgcccctccctctcccaactctctacccgggaatgtctcggcgaaagcagcggaaaccccaacagttaatctcggactgcgaaggtcccagcgcgtctgagaacggtgatgctagcgaggaggatcacccccaagtctgtgccaagtgctgcgcacaattcactgacccaactgaattcctcgcccaccagaacgcatgttctactgaccctcctgtaatggtgataattgggggccaggagaaccccaacaactcttcggcctcctctgaaccccggcctgagggtcacaataatcctcaggtcatggacacagagcatagcaaccccccagattctgggtcctccgtgcccacggatcccacctggggcccagagaggagaggagaggagtcttcagggcatttcctggtcgctgccacaggtacagcggctgggggaggcgggggcctgatcttggccagtcccaagctgggagcaaccccattacctccagaatcgacccctgcaccccctcctcctccaccaccccctccgcccccaggggtaggcagtggccacttgaatatccccctgatcttggaagagctacgggtgctgcagcagcggcagatccatcagatgcagatgactgagcaaatctgcaggcaggtgctgttgcttggctccttaggccagacggtgggtgcccctgccagtccctcagagctacctgggacagggactgcctcttccaccaagcccctactacccctcttcagccccatcaagcctgtccaaaccagcaagacactggcatcttcctcctcctcctcctcttcctcttcaggggcagaaacgcccaagcaggccttcttccacctttaccacccactggggtcacagcatcctttctctgctggaggggttgggcgaagccacaaacccacccctgccccttccccagccttgccaggcagcacagatcagctgattgcctcgcctcatctggcattcccaagcaccacgggactactggcagcacagtgtcttggggcagcccgaggccttgaggccactgcctccccagggctcctgaagccaaagaatggaagtggtgagctgagctacggagaagtgatgggtcccttggagaagcctggtggaaggcacaaatgccgcttctgtgccaaagtatttggcagtgacagtgccctgcagatccaccttcgttcccacacgggtgagaggccctataagtgcaatgtctgtggaaaccgttttaccacccgtggcaacctcaaagtgcatttccaccggcatcgtgagaagtacccacatgtgcagatgaacccacacccagtaccagagcacctagactatgtcattaccagcagtggcttgccttatggtatgtccgtgccaccagagaaggccgaggaggaggcagccactccaggtggaggggttgagcgcaagcctctggtggcctccacaacagcactcagtgccacagagagcctgactctgctctccaccagtgcaggcacagccacggctccaggactccctgctttcaataagtttgtgctcatgaaagcagtggaacccaagaataaagctgatgaaaacacccccccagggagtgagggctcagccatcagtggagtggcagaaagtagcacggcaactcgcatgcaactaagtaagttggtgacttcactaccaagctgggcactgcttaccaaccacttcaagtccactggcagcttccccttcccctatgtgctagagcccttgggggcctcaccctctgagacatcaaagctgcagcaactggtagaaaagattgaccggcaaggagctgtggcggtgacctcagctgcctcaggagcccccaccacctctgcccctgcaccttcatcctcagcctcttctggacctaaccagtgtgtcatctgtctccgagtgcttagctgtcctcgggccctacgccttcattatggccaacatggaggtgagaggcccttcaaatgcaaagtgtgtggcagagccttctccaccaggggtaatctgcgtgcacatttcgtgggccacaaggccagtccagctgcccgggcacagaattcctgccccatctgccagaagaagttcaccaatgctgtcactctgcagcagcatgtccggatgcacctggggggccagatccccaacggtggtactgcactccctgaaggtggaggagctgctcaggagaatggctccgagcaatctacagtctccggggcacggagtttcccccagcagcagtcccagcagccatcaccggaagaggagttgtctgaggaggaggaagaggaggatgaggaagaagaggaagatgtgactgatgaagattccctggcagggagaggctcagagagtggaggtgagaaggcaatatcagtgagaggtgattcagaagaggcatctggggcagaggaggaggtggggacagtggcggcagcagccacagctgggaaggagatggacagtaatgagaaaactactcaacagtcttctttgccaccaccaccaccacctgacagcctggatcagcctcagccaatggagcagggaagcagtggtgttttaggaggcaaggaagaggggggcaaaccggagagaagctcaagtccggcatcagcactcaccccagaaggggaagccaccagcgtgaccttggtagaggagctgagcctgcaggaggcaatgagaaaggagccaggagagagcagcagcagaaaggcctgcgaagtgtgtggccaggcctttccctcccaggcagctctggaggagcatcagaagacccaccccaaggaggggccgctcttcacttgtgttttctgcaggcagggctttcttgagcgggctaccctcaagaagcatatgctcctggcacaccaccaggtacagccctttgccccccatggccctcagaatattgctgctctttctctagtccctggctgttcgccttccatcacctccacagggctctccccctttccccgaaaagatgaccccacgatcccatgagcctgtttttctgtacctgctgctctttgtcccacagagcagaaacagcttcacaaaaggacctcccagagttatgagccctgattttgtctttttctctaagttcttaacatgttatgtccctagtggcttttctgtagtccctgagcttggaaattactgtgcttacaaggggatggccccctaaggaatttttcttccctcctcattctttgtacctgaggaacatagattctctgcagctttctcaaggggaaccctctccagcttccctggtgtgacccttcttccccctcctctctcctctccctttccctttggtaggtgcacctgagcacctacatttggcattgcagcctagccaaaaagggctggcagctgtctctggagggcccagtgccactcctctggggtgacctttctgctcagctggtgggtatgggtcccctatctttctagaaccagtatgtggcattcctgtcaaatggcctgcccatgaagccctggaattccagctccacctccactaccactccaagcctggccccaccagtgctgtttggcctaggaactgtggctgggaaggtgcctccaacaatgggatccagggaagccaaggagaagacagcccccctcctatttcagcctcctgcacccaaggcagtgcctgagaagcccatcatagacaagaagtagcaaactgtacattccttcttcctccccctgctccagaaggtgccggtactgaagatgctccagtaattggtgacccaaccctaggaagtagggagaaatgaaggaagggcataggaaaattttcccagtaaatcccctgatggtcacattaaggtaaaggttttggctggtcagtgtgccaagacctctccagcttctcattcatgatgacctctcaaagttgggaaacaagctgatttcttgccaagaggtctcccaggagatatttgggaaatgtgaagttcgtatctttaaggagcatttttggtcagcatggttgatgaactaatgatgagagagttaaggaatgttgctagaacatagggcttgctggtacctatgtgactaagaaagggacatgatgtaagggaaaaggcctcaaattcttgtgaatgtctggacattctcgttaatattcttttgggctaatagtgacatagtgtgcagaggtgtaccagggatcatgggggatttcctagcactagtatgcttctagttttagataactccctcctttattccctggccccttgtattttccttatcttcctctttcaagacccctacccattttgcctatccgtaggctggggcttgtgtctttgtcattgtctggttcttaagagtcccagactttgggagaccagctccaggtggcgtcctccctgcctctccgtcttgtaatgagttgtagtatttactcttaacataggatcatttggaacaggagttctgaggaggagagagtgagggttttgctattgactgacttgaacgatggcttctcctcaagctgtaggctccagagcttcctaacctagtaaaatgtcaagaacagacgggagatattagtgtctttccctctatcattaaaggtgttttaaccaa

SEQ ID NO: 185138 - DNA, 1466 bp, Homo sapiens
  Payload ID: 16457
  Gene Symbol: SALL2
  Gene Name: spalt-like transcription factor 2
  ENST ID: ENST00000611430
  CDS Start-End: 374-970
acagcacctgtcactgcgcctccggaaactctcccgagctctgagctcccgcccccacgcccccgctagcgctcccttctcccgcctcctctagctcccgcctccctccccagcagctcctccccataaactcccctcctcatcagctcctcccagatctcccctctccccgctttctcactccagcttctccccgcctcctcgctcccctccccctccgccgctgctccctgcccccgccgctgccgatctccatctccgcagtctgggccgctgggtgcagaggctgccgcagacccagcggccatcgcctccctcaatcccaatatccattgtctcccaccccacctggccctccacttcccccacaaccatggcgcacgaatccgagaggagctctcgtctcggggtgccctgcggggagccggcagagctcggaggtgatgctagcgaggaggatcacccccaagtctgtgccaagtgctgcgcacaattcactgacccaactgaattcctcgcccaccagaacgcatgttctactgaccctcctgtaatggtgataattgggggccaggagaaccccaacaactcttcggcctcctctgaaccccggcctgagggtcacaataatcctcaggtcatggacacagagcatagcaaccccccagattctgggtcctccgtgcccacggatcccacctggggcccagagaggagaggagaggagtcttcagggcatttcctggtcgctgccacagaaccagtatgtggcattcctgtcaaatggcctgcccatgaagccctggaattccagctccacctccactaccactccaagcctggccccaccagtgctgtttggcctaggaactgtggctgggaaggtgcctccaacaatgggatccagggaagccaaggagaagacagcccccctcctatttcagcctcctgcacccaaggcagtgcctgagaagcccatcatagacaagaagtagcaaactgtacattccttcttcctccccctgctccagaaggtgccggtactgaagatgctccagtaattggtgacccaaccctaggaagtagggagaaatgaaggaagggcataggaaaattttcccagtaaatcccctgatggtcacattaaggtaaaggttttggctggtcagtgtgccaagacctctccagcttctcattcatgatgacctctcaaagttgggaaacaagctgatttcttgccaagaggtctcccaggagatatttgggaaatgtgaagttcgtatctttaaggagcatttttggtcagcatggttgatgaactaatgatgagagagttaaggaatgttgctagaacatagggcttgctggtacctatgtgactaagaaagggacatgatgtaagggaaaaggcctcaaattcttgtgaatgtctggacattctcgttaatattcttttgggctaatag

SEQ ID NO: 185139 - DNA, 3997 bp, Homo sapiens
  Payload ID: 16458
  Gene Symbol: SALL3
  Gene Name: spalt-like transcription factor 3
  Uniprot ID: Q9BXA9
  ENST ID: ENST00000536229
  CDS Start-End: 710-3997
tgttaagtgaactggcaaaggcatctctaattttgctggaaatgaggaagccggatggtaaaggggaatcctaatgagcccatcgaaagccggctttgtactcaacagacagggtagccgcagattgtatgaaaatattggaaatcaatggcttctatggaatttcattaagaagcaggatccacaattgatagggcctcataatttgatggattgggctaagaaaatgattagctagctagaaagagtcatagaatacgcacgctgggacgtcagaaatgtcgaagtggggtaatttgtacaaaataaaaaatattgattttactcgtgcaaaattttgagacggagggcgggcgccgagccccggctgactcactctcttggtcttgcagccgccccgggggaaggtgcggaggacgcagacagcgggcccgagagccgcagcgggggcgaggagaccagcgtgtgcgagaaatgctgcgccgagttcttcaagtgggcggacttcctggagcaccagcggagctgcaccaagctcccgcccgtgctgatcgtgcacgaggacgcgcccgcgccgccccccgaggacttccccgagccttcgcccgccagctcccccagcgagcgcgccgaaagcgaggcggccgaggaggcgggtgcggagggcgcggagggcgaggccaggccggtggagaaggaggccgagcccatggacgcggaacccgcgggggacacgcgcgcgccccggcccccgcctgcggcccctgcacccccaacgcccgcctacggcgcgcccagcaccaacgtgaccctggaggcgctgctgagcaccaaggtggcggtggcgcagttctcgcagggcgcgcgcgcggcaggcggctcgggagcaggtggaggcgtggcagctgcagccgtgcccctgatcctggaacagctcatggccctgcagcagcagcagatccaccagctgcagctcatcgagcagatccgcagccaggtggccctcatgcagcgcccgccgccgcggccctcactcagccccgcggccgccccgagcgcaccgggcccggcccccagccagctgcccgggctggccgcgctcccgctgtcggccggggcccctgccgccgccatcgcgggctcgggccccgccgccccggccgccttcgagggcgcgcagccgctgtcccggcccgagtctggcgccagcacccccggcggccctgcggagcccagcgcgcccgccgcccccagcgccgcccctgcccccgctgcccccgccccggcgccagcgccgcagagcgcagcctcgtcgcagccgcagagcgcatccacgccgcctgccctggccccggggtccctgctgggtgcggcgcccggcctgccaagtccgcttctacctcagacttccgccagcggcgtcatcttccccaacccgctggtcagcatcgcggccacggccaacgctctggacccgctgtccgcgctcatgaagcaccgcaagggcaagccgcccaatgtgtcggtgttcgagcccaaagccagcgccgaggacccgttcttcaagcacaaatgccgcttctgcgccaaggtcttcggcagcgacagcgcgctccagatccacctgcgctcgcacacaggcgagcggcccttcaagtgcaacatctgcgggaaccgcttctccaccaaaggcaacctgaaggtgcacttccagaggcacaaggagaagtacccccacatccagatgaacccttacccggtccccgagtacctggacaacgtgcccacctgctcgggcatcccctacggcatgtcgctgccccccgagaagcccgtgaccacctggctggacagcaagcccgtgctgcccaccgtgcccacgtccgtggggctgcaactgccgcccactgtccctggcgcgcacggctacgccgactctcccagcgccaccccagccagccgctccccgcagaggccctcgcccgcctccagcgagtgcgcctccttgtccccaggcctcaaccacgtggagtccggcgtgtcggccaccgccgagtccccacagtcgctcctcggcgggccgcccctcactaaagccgagcccgtcagcctgccctgcaccaacgccagggccggggacgctcccgtgggcgcgcaggctagcgctgcacccacatcggtggacggcgcacccacgagcctcggcagccccgggctgcccgccgtctccgagcagttcaaggcccagtttccgttcggggggctgctagactcgatgcaaacgtcggaaacctcgaagctgcagcagctggtggagaacatcgacaagaagatgacggacccgaaccagtgcgtcatctgccaccgggtgctgagctgccagagcgcgctgaagatgcactaccggacgcacacgggggagcggccgttcaagtgcaagatctgcggccgcgccttcaccaccaagggcaacctcaagacgcacttcggcgtgcaccgtgcaaagccgcccctgcgcgtgcagcactcctgccccatctgccagaagaagttcaccaacgccgtggtcctgcagcagcacatccgcatgcacatgggcggccagatccccaacacgccgctgccggagggcttccaggatgccatggactccgagctggcctacgacgacaagaacgcggagaccctgagcagctacgatgacgacatggacgagaactccatggaggacgacgctgagctgaaggacgcggccaccgacccggccaagccactcctgtcctacgcggggtcctgcccgccctccccgccctcggtcatctccagcattgccgccctggagaaccagatgaagatgatcgactcggtcatgagctgccagcagctgaccggcctcaagtccgtggagaacgggtccggggagagtgaccgcctgagcaacgactcctcgtcggccgtgggcgacctggagagccgcagcgcgggcagccccgccctgtccgagtcctcgtcctcgcaggccctgtcgccggcccccagcaatggtgagagcttccgctccaagtccccgggcctgggcgccccggaggagccccaggaaatcccgctcaagaccgagaggccggacagcccagccgccgccccgggcagcggaggcgcccctggccgcgcgggcatcaaggaggaggcgcccttcagcctgctgttcctgagcagggagcggggtcccagccaaagcactcctagcctgatctccagcgccgcacccaccatgatcaaaatggaagtgaacggtcacggcaaggccatggcgctgggcgagggtcccccgctgcccgcgggcgtccaggtccccgccgggcctcagacagtgatgggcccgggcctggcgcccatgctggcccccccaccgcgccggacgcccaagcagcacaactgccagtcgtgcgggaagaccttctcctcggccagcgccctgcagatccatgagcgcacgcacaccggcgagaagccgttcggctgcaccatctgcggccgggccttcaccactaagggcaacctcaaggtgcacatggggacacacatgtggaataacgcccccgcgagacgcggccgccgcctgtctgtggagaaccccatggctctcctagggggtgatgccctgaagttctctgaaatgttccagaaggacctggcagctcgggcaatgaacgtcgaccccagtttttggaaccagtatgctgcagccatcactaacgggctcgccatgaagaacaacgagatctccgtcatccagaacggcggcatcccccagctccccgtgagtcttgggggcagcgccctcccccctctgggcagcatggccagtgggatggacaaagcacgcactggcagtagcccacccatcgtcagcttggacaaagcgagctcagaaacagcagccagccgcccattcacgcggtttatcgaggataacaaggagattggtatcaactag

SEQ ID NO: 185140 - DNA, 6555 bp, Homo sapiens
  Payload ID: 16458
  Gene Symbol: SALL3
  Gene Name: spalt-like transcription factor 3
  Uniprot ID: Q9BXA9
  ENST ID: ENST00000537592
  CDS Start-End: 1-3903
atgtctcggcgcaagcaggccaagccccagcacctcaagtcggacgaggagctgctgccgcctgacggggctcccgagcacgccgccccgggggaaggtgcggaggacgcagacagcgggcccgagagccgcagcgggggcgaggagaccagcgtgtgcgagaaatgctgcgccgagttcttcaagtgggcggacttcctggagcaccagcggagctgcaccaagctcccgcccgtgctgatcgtgcacgaggacgcgcccgcgccgccccccgaggacttccccgagccttcgcccgccagctcccccagcgagcgcgccgaaagcgaggcggccgaggaggcgggtgcggagggcgcggagggcgaggccaggccggtggagaaggaggccgagcccatggacgcggaacccgcgggggacacgcgcgcgccccggcccccgcctgcggcccctgcacccccaacgcccgcctacggcgcgcccagcaccaacgtgaccctggaggcgctgctgagcaccaaggtggcggtggcgcagttctcgcagggcgcgcgcgcggcaggcggctcgggagcaggtggaggcgtggcagctgcagccgtgcccctgatcctggaacagctcatggccctgcagcagcagcagatccaccagctgcagctcatcgagcagatccgcagccaggtggccctcatgcagcgcccgccgccgcggccctcactcagccccgcggccgccccgagcgcaccgggcccggcccccagccagctgcccgggctggccgcgctcccgctgtcggccggggcccctgccgccgccatcgcgggctcgggccccgccgccccggccgccttcgagggcgcgcagccgctgtcccggcccgagtctggcgccagcacccccggcggccctgcggagcccagcgcgcccgccgcccccagcgccgcccctgcccccgctgcccccgccccggcgccagcgccgcagagcgcagcctcgtcgcagccgcagagcgcatccacgccgcctgccctggccccggggtccctgctgggtgcggcgcccggcctgccaagtccgcttctacctcagacttccgccagcggcgtcatcttccccaacccgctggtcagcatcgcggccacggccaacgctctggacccgctgtccgcgctcatgaagcaccgcaagggcaagccgcccaatgtgtcggtgttcgagcccaaagccagcgccgaggacccgttcttcaagcacaaatgccgcttctgcgccaaggtcttcggcagcgacagcgcgctccagatccacctgcgctcgcacacaggcgagcggcccttcaagtgcaacatctgcgggaaccgcttctccaccaaaggcaacctgaaggtgcacttccagaggcacaaggagaagtacccccacatccagatgaacccttacccggtccccgagtacctggacaacgtgcccacctgctcgggcatcccctacggcatgtcgctgccccccgagaagcccgtgaccacctggctggacagcaagcccgtgctgcccaccgtgcccacgtccgtggggctgcaactgccgcccactgtccctggcgcgcacggctacgccgactctcccagcgccaccccagccagccgctccccgcagaggccctcgcccgcctccagcgagtgcgcctccttgtccccaggcctcaaccacgtggagtccggcgtgtcggccaccgccgagtccccacagtcgctcctcggcgggccgcccctcactaaagccgagcccgtcagcctgccctgcaccaacgccagggccggggacgctcccgtgggcgcgcaggctagcgctgcacccacatcggtggacggcgcacccacgagcctcggcagccccgggctgcccgccgtctccgagcagttcaaggcccagtttccgttcggggggctgctagactcgatgcaaacgtcggaaacctcgaagctgcagcagctggtggagaacatcgacaagaagatgacggacccgaaccagtgcgtcatctgccaccgggtgctgagctgccagagcgcgctgaagatgcactaccggacgcacacgggggagcggccgttcaagtgcaagatctgcggccgcgccttcaccaccaagggcaacctcaagacgcacttcggcgtgcaccgtgcaaagccgcccctgcgcgtgcagcactcctgccccatctgccagaagaagttcaccaacgccgtggtcctgcagcagcacatccgcatgcacatgggcggccagatccccaacacgccgctgccggagggcttccaggatgccatggactccgagctggcctacgacgacaagaacgcggagaccctgagcagctacgatgacgacatggacgagaactccatggaggacgacgctgagctgaaggacgcggccaccgacccggccaagccactcctgtcctacgcggggtcctgcccgccctccccgccctcggtcatctccagcattgccgccctggagaaccagatgaagatgatcgactcggtcatgagctgccagcagctgaccggcctcaagtccgtggagaacgggtccggggagagtgaccgcctgagcaacgactcctcgtcggccgtgggcgacctggagagccgcagcgcgggcagccccgccctgtccgagtcctcgtcctcgcaggccctgtcgccggcccccagcaatggtgagagcttccgctccaagtccccgggcctgggcgccccggaggagccccaggaaatcccgctcaagaccgagaggccggacagcccagccgccgccccgggcagcggaggcgcccctggccgcgcgggcatcaaggaggaggcgcccttcagcctgctgttcctgagcagggagcggggtaagtgtcccagcactgtgtgtggtgtctgtggcaagccttttgcttgcaagagcgcgttggaaatccactaccgcagccatactaaggagcggccattcgtctgcgcgctctgcaggcgagggtgctccactatgggtaatttaaaacagcacttactgacacacagattgaaagagctgccttctcagttatttgaccccaactttgctctaggtcccagccaaagcactcctagcctgatctccagcgccgcacccaccatgatcaaaatggaagtgaacggtcacggcaaggccatggcgctgggcgagggtcccccgctgcccgcgggcgtccaggtccccgccgggcctcagacagtgatgggcccgggcctggcgcccatgctggcccccccaccgcgccggacgcccaagcagcacaactgccagtcgtgcgggaagaccttctcctcggccagcgccctgcagatccatgagcgcacgcacaccggcgagaagccgttcggctgcaccatctgcggccgggccttcaccactaagggcaacctcaaggtgcacatggggacacacatgtggaataacgcccccgcgagacgcggccgccgcctgtctgtggagaaccccatggctctcctagggggtgatgccctgaagttctctgaaatgttccagaaggacctggcagctcgggcaatgaacgtcgaccccagtttttggaaccagtatgctgcagccatcactaacgggctcgccatgaagaacaacgagatctccgtcatccagaacggcggcatcccccagctccccgtgagtcttgggggcagcgccctcccccctctgggcagcatggccagtgggatggacaaagcacgcactggcagtagcccacccatcgtcagcttggacaaagcgagctcagaaacagcagccagccgcccattcacgcggtttatcgaggataacaaggagattggtatcaactagccagtgactcgctcatctgccctgcccaggcccacgttttgaagttggagcatcaggcctccgacctttcttgcctcggttctcattacactttcacccatagcagaaaacactttgtgcggctgccgagaggtggtcttgtaagcgctgcatggcgctcccttcaacagcaagcctgactgttctcgagaactctgcaatcttttaaataagcttccttcaaaaaaaaaagtgcttggaaaaccgccttaggaacagaaagagctcagaccatgtccacttcctttctcctgaaacctaataatctctccgagggagaaaggggttctctgcggtattccagtgaaactcatttgatggtttcttttgaattagttagacacttgaacggtgttttttagaactcttcatgttaaagacgtggtttagtactcccaatgctgtgtatcatgacactatcttcgtctgtagtatttatgatgttaagataatgcgggtaacagacaatataatagccccgaccttaaacgaagcttttgtactgcagaatacatctggctgtgtgatttttttttttaagcaagatttgttttactataaataagtggattatttcaatgcaggcaaaattgtgaagttctgttgggaaagatagcatgcttttcgtgtgcaagtacctgtcagtaataagccttttttttttttttttttaatttaaatgtttgtagctgctatgtggacagttgttttctagtgtggtctgtagcccaataactggggaacgagttacagacaaacatcaccgtaaatgactcacaacattataaacagttgtgagaaaatatttcacattatcaaagctgtacaataaaaaggtaatgtttgtataatgtggttgcaaactcttaatttatactattgcacttttagtattttgtattagggaggtttgtctataatttgaaaatttaaaaaaatgtaaagtattttataaatagtacttcagtttaaggaaaatgggaaaactgttacagttccttgttttgtcttatggtcaaacaatattagaaatctctgccacttgaaaagccaccaagacttgtcagcttttcagtaaagtagggcctgccgtttcttaaattaaaatgatttatttaacttttccacaaagcccactttaaaactgtgaccgccccctaacgaaaccttggtgaattcatcctaggactatgacgtcagtacaagccaggaaggaactaggataaccttctgcaggtctgattttcatgtaagcgggtctgtctctctctctcacccacagacaagattgtggctgcctggtggcactggtcacatgtacagtaaacccaagagaaatggcaagtatcaggcagtacaatcagtcatgactttgaaattttccgagttcctgatttatttattatcttctcagatgaaagcaaagcacagtgtcctctgatttttcagaacacagcctgacgctgatggctgagctgcatccagccaggagggccccggaggctggggcggccgaggcagcacaaacacggcgtcgtgaactacctcattttcgtgcgttgcaagtgtgctggcgtctgacactatgaacttccaacaacaaaattgttcaagagatgctctggtagctgggtaactgcaaggagttgcatgcccctgaagaaagaatcagacagtgaagtcttctcggtcgagacagaaaaatagaacaatcttctcctaacaaccacagcagcatcaacaatcattgtaagaggatgggctgtttgtgccagcgtgtcactaaacaaaaagtatcaaagactcattagctgtttatttctattggaaatcaacactgaactctacagctctgttttccacggtgatgagatgtaacttcgccccaccatgccacctcttctcacgggatgagggctcggggtgtctcaagcattaggcagagaaaactgaggtggcttaaggtcactgtgtttcagcagttgaatgttttcattatttatctgtgtcctttttggtgtgtgtgtgtgtgtggtttttttgtttgtttgtttttggttagtatttggtaccatatagtgttctctcttctcccaaaaggatgtgtatataactaaagagaaatgtaaagtgttgtaaataagatggctcatgaaggtacagtgagactgaccctcctgtgtgcagggctaggccatccctctgcatggtgaagagagacactatttttatactgtaatgccatgcggggctgggacctctctgagcagctggggattgttacctagacccaatattttttattattaaatcttgtggcttgacacatctgctgactgaaatggatgtcttagtctaggttactatttttgtcatatggaattgaataaaatgcaggatgtaatgttatttctgagttgcattccttgatttttctaatggagaaagtggaatttgaggaggtcatttgtggtgggtgtgtatccgtggtatttccaccaggaacgtcaacacagcttggcagcttagatttaagcagtgtctcagtgcatcttgattggtcttgaaatttttgttttttgcttttttccaaaataaaaattcagcctccta

SEQ ID NO: 185141 - DNA, 3996 bp, Homo sapiens
  Payload ID: 16458
  Gene Symbol: SALL3
  Gene Name: spalt-like transcription factor 3
  Uniprot ID: Q9BXA9
  ENST ID: ENST00000575389
  CDS Start-End: 1-3687
atgtctcggcgcaagcaggccaagccccagcacctcaagtcggacgaggagctgctgccgcctgacggggctcccgagcacgccgccccgggggaaggtgcggaggacgcagacagcgggcccgagagccgcagcgggggcgaggagaccagcgtgtgcgagaaatgctgcgccgagttcttcaagtgggcggacttcctggagcaccagcggagctgcaccaagctcccgcccgtgctgatcgtgcacgaggacgcgcccgcgccgccccccgaggacttccccgagccttcgcccgccagctcccccagcgagcgcgccgaaagcgaggcggccgaggaggcgggtgcggagggcgcggagggcgaggccaggccggtggagaaggaggccgagcccatggacgcggaacccgcgggggacacgcgcgcgccccggcccccgcctgcggcccctgcacccccaacgcccgcctacggcgcgcccagcaccaacgtgaccctggaggcgctgctgagcaccaaggtggcggtggcgcagttctcgcagggcgcgcgcgcggcaggcggctcgggagcaggtggaggcgtggcagctgcagccgtgcccctgatcctggaacagctcatggccctgcagcagcagcagatccaccagctgcagctcatcgagcagatccgcagccaggtggccctcatgcagcgcccgccgccgcggccctcactcagccccgcggccgccccgagcgcaccgggcccggcccccagccagctgcccgggctggccgcgctcccgctgtcggccggggcccctgccgccgccatcgcgggctcgggccccgccgccccggccgccttcgagggcgcgcagccgctgtcccggcccgagtctggcgccagcacccccggcggccctgcggagcccagcgcgcccgccgcccccagcgccgcccctgcccccgctgcccccgccccggcgccagcgccgcagagcgcagcctcgtcgcagccgcagagcgcatccacgccgcctgccctggccccggggtccctgctgggtgcggcgcccggcctgccaagtccgcttctacctcagacttccgccagcggcgtcatcttccccaacccgctggtcagcatcgcggccacggccaacgctctggacccgctgtccgcgctcatgaagcaccgcaagggcaagccgcccaatgtgtcggtgttcgagcccaaagccagcgccgaggacccgttcttcaagcacaaatgccgcttctgcgccaaggtcttcggcagcgacagcgcgctccagatccacctgcgctcgcacacaggcgagcggcccttcaagtgcaacatctgcgggaaccgcttctccaccaaaggcaacctgaaggtgcacttccagaggcacaaggagaagtacccccacatccagatgaacccttacccggtccccgagtacctggacaacgtgcccacctgctcgggcatcccctacggcatgtcgctgccccccgagaagcccgtgaccacctggctggacagcaagcccgtgctgcccaccgtgcccacgtccgtggggctgcaactgccgcccactgtccctggcgcgcacggctacgccgactctcccagcgccaccccagccagccgctccccgcagaggccctcgcccgcctccagcgagtgcgcctccttgtccccaggcctcaaccacgtggagtccggcgtgtcggccaccgccgagtccccacagtcgctcctcggcgggccgcccctcactaaagccgagcccgtcagcctgccctgcaccaacgccagggccggggacgctcccgtgggcgcgcaggctagcgctgcacccacatcggtggacggcgcacccacgagcctcggcagccccgggctgcccgccgtctccgagcagttcaaggcccagtttccgttcggggggctgctagactcgatgcaaacgtcggaaacctcgaagctgcagcagctggtggagaacatcgacaagaagatgacggacccgaaccagtgcgtcatctgccaccgggtgctgagctgccagagcgcgctgaagatgcactaccggacgcacacgggggagcggccgttcaagtgcaagatctgcggccgcgccttcaccaccaagggcaacctcaagacgcacttcggcgtgcaccgtgcaaagccgcccctgcgcgtgcagcactcctgccccatctgccagaagaagttcaccaacgccgtggtcctgcagcagcacatccgcatgcacatgggcggccagatccccaacacgccgctgccggagggcttccaggatgccatggactccgagctggcctacgacgacaagaacgcggagaccctgagcagctacgatgacgacatggacgagaactccatggaggacgacgctgagctgaaggacgcggccaccgacccggccaagccactcctgtcctacgcggggtcctgcccgccctccccgccctcggtcatctccagcattgccgccctggagaaccagatgaagatgatcgactcggtcatgagctgccagcagctgaccggcctcaagtccgtggagaacgggtccggggagagtgaccgcctgagcaacgactcctcgtcggccgtgggcgacctggagagccgcagcgcgggcagccccgccctgtccgagtcctcgtcctcgcaggccctgtcgccggcccccagcaatggtgagagcttccgctccaagtccccgggcctgggcgccccggaggagccccaggaaatcccgctcaagaccgagaggccggacagcccagccgccgccccgggcagcggaggcgcccctggccgcgcgggcatcaaggaggaggcgcccttcagcctgctgttcctgagcagggagcggggtcccagccaaagcactcctagcctgatctccagcgccgcacccaccatgatcaaaatggaagtgaacggtcacggcaaggccatggcgctgggcgagggtcccccgctgcccgcgggcgtccaggtccccgccgggcctcagacagtgatgggcccgggcctggcgcccatgctggcccccccaccgcgccggacgcccaagcagcacaactgccagtcgtgcgggaagaccttctcctcggccagcgccctgcagatccatgagcgcacgcacaccggcgagaagccgttcggctgcaccatctgcggccgggccttcaccactaagggcaacctcaaggtgcacatggggacacacatgtggaataacgcccccgcgagacgcggccgccgcctgtctgtggagaaccccatggctctcctagggggtgatgccctgaagttctctgaaatgttccagaaggacctggcagctcgggcaatgaacgtcgaccccagtttttggaaccagtatgctgcagccatcactaacgggctcgccatgaagaacaacgagatctccgtcatccagaacggcggcatcccccagctccccgtgagtcttgggggcagcgccctcccccctctgggcagcatggccagtgggatggacaaagcacgcactggcagtagcccacccatcgtcagcttggacaaagcgagctcagaaacagcagccagccgcccattcacgcggtttatcgaggataacaaggagattggtatcaactagccagtgactcgctcatctgccctgcccaggcccacgttttgaagttggagcatcaggcctccgacctttcttgcctcggttctcattacactttcacccatagcagaaaacactttgtgcggctgccgagaggtggtcttgtaagcgctgcatggcgctcccttcaacagcaagcctgactgttctcgagaactctgcaatcttttaaataagcttccttcaaaaaaaaaagtgcttggaaaaccgccttaggaacagaaagagctcagaccatgtccacttcctttctcctgaaacctaataatctct

SEQ ID NO: 185142 - DNA, 3916 bp, Homo sapiens
  Payload ID: 16458
  Gene Symbol: SALL3
  Gene Name: spalt-like transcription factor 3
  ENST ID: ENST00000572106
  CDS Start-End: 1-3673
gcaggccaagccccagcacctcaagtcggacgaggagctgctgccgcctgacggggctcccgagcacgccgccccgggggaaggtgcggaggacgcagacagcgggcccgagagccgcagcgggggcgaggagaccagcgtgtgcgagaaatgctgcgccgagttcttcaagtgggcggacttcctggagcaccagcggagctgcaccaagctcccgcccgtgctgatcgtgcacgaggacgcgcccgcgccgccccccgaggacttccccgagccttcgcccgccagctcccccagcgagcgcgccgaaagcgaggcggccgaggaggcgggtgcggagggcgcggagggcgaggccaggccggtggagaaggaggccgagcccatggacgcggaacccgcgggggacacgcgcgcgccccggcccccgcctgcggcccctgcacccccaacgcccgcctacggcgcgcccagcaccaacgtgaccctggaggcgctgctgagcaccaaggtggcggtggcgcagttctcgcagggcgcgcgcgcggcaggcggctcgggagcaggtggaggcgtggcagctgcagccgtgcccctgatcctggaacagctcatggccctgcagcagcagcagatccaccagctgcagctcatcgagcagatccgcagccaggtggccctcatgcagcgcccgccgccgcggccctcactcagccccgcggccgccccgagcgcaccgggcccggcccccagccagctgcccgggctggccgcgctcccgctgtcggccggggcccctgccgccgccatcgcgggctcgggccccgccgccccggccgccttcgagggcgcgcagccgctgtcccggcccgagtctggcgccagcacccccggcggccctgcggagcccagcgcgcccgccgcccccagcgccgcccctgcccccgctgcccccgccccggcgccagcgccgcagagcgcagcctcgtcgcagccgcagagcgcatccacgccgcctgccctggccccggggtccctgctgggtgcggcgcccggcctgccaagtccgcttctacctcagacttccgccagcggcgtcatcttccccaacccgctggtcagcatcgcggccacggccaacgctctggacccgctgtccgcgctcatgaagcaccgcaagggcaagccgcccaatgtgtcggtgttcgagcccaaagccagcgccgaggacccgttcttcaagcacaaatgccgcttctgcgccaaggtcttcggcagcgacagcgcgctccagatccacctgcgctcgcacacaggcgagcggcccttcaagtgcaacatctgcgggaaccgcttctccaccaaaggcaacctgaaggtgcacttccagaggcacaaggagaagtacccccacatccagatgaacccttacccggtccccgagtacctggacaacgtgcccacctgctcgggcatcccctacggcatgtcgctgccccccgagaagcccgtgaccacctggctggacagcaagcccgtgctgcccaccgtgcccacgtccgtggggctgcaactgccgcccgctgtccctggcgcgcacggctacgccgactctcccagcgccaccccagccagccgctccccgcagaggccctcgcccgcctccagcgagtgcgcctccttgtccccaggcctcaaccacgtggagtccggcgtgtcggccaccgccgagtccccacagtcgctcctcggcgggccgcccgtcactaaagccgagcccgtcagcctgccctgcaccaacgccagggccggggacgctcccgtgggcgcgcaggctagcgctgcacccacatcggtggacggcgcacccacgagcctcggcagccccgggctgcccgccgtctccgagcagttcaaggcccagtttccgttcggggggctgctagactcgatgcaaacgtcggaaacctcgaagctgcagcagctggtggagaacatcgacaagaagatgacggacccgaaccagtgcgtcatctgccaccgggtgctgagctgccagagcgcgctgaagatgcactaccggacgcacacgggggagcggccgttcaagtgcaagatctgcggccgcgccttcaccaccaagggcaacctcaagacgcacttcggcgtgcaccgtgcaaagccgcccctgcgcgtgcagcactcctgccccatctgccagaagaagttcaccaacgccgtggtcctgcagcagcacatccgcatgcacatgggcggccagatccccaacacgccgctgccggagggcttccaggatgccatggactccgagctggcctacgacgacaagaacgcggagaccctgagcagctacgatgacgacatggacgagaactccatggaggacgacgctgagctgaaggacgcggccaccgacccggccaagccactcctgtcctatgcggggtcctgcccgccctccccgccctcggtcatctccagcattgccgccctggagaaccagatgaagatgatcgactcggtcatgagctgccagcagctgaccggcctcaagtccgtggagaacgggtccggggagagtgaccgcctgagcaacgactcctcgtcggccgtgggcgacctggagagccgcagcgcgggcagccccgccctgtccgagtcctcgtcctcgcaggccctgtcgccggcccccagcaatggtgagagcttccgctccaagtccccgggcctgggcgccccggaggagccccaggaaatcccgctcaagaccgagaggccggacagcccagccgccgccccgggcagcggaggcgcccctggccgcgcgggcatcaaggaggaggcgcccttcagcctgctgttcctgagcagggagcggggtcccagccaaagcactcctagcctgatctccagcgccgcacccaccatgatcaaaatggaagtgaacggtcacggcaaggccatggcgctgggcgagggtcccccgctgcccgcgggcgtccaggtccccgccgggcctcagacagtgatgggcccgggcctggcgcccatgctggcccccccaccgcgccggacgcccaagcagcacaactgccagtcgtgcgggaagaccttctcctcggccagcgccctgcagatccatgagcgcacgcacaccggcgagaagccgttcggctgcaccatctgcggccgggccttcaccactaagggcaacctcaaggtgcacatggggacacacatgtggaataacgcccccgcgagacgcggccgccgcctgtctgtggagaaccccatggctctcctagggggtgatgccctgaagttctctgaaatgttccagaaggacctggcagctcgggcaatgaacgtcgaccccagtttttggaaccagtatgctgcagccatcactaacgggctcgccatgaagaacaacgagatctccgtcatccagaacggcggcatcccccagctccccgtgagtcttgggggcagcgccctcccccctctgggcagcatggccagtgggatggacaaagcacgcactggcagtagcccacccatcgtcagcttggacaaagcgagctcagaaacagcagccagccgcccattcacgcggtttatcgaggataacaaggagattggtatcaactagccagtgactcgctcatctgccctgcccaggcccacgttttgaagttggagcatcaggcctccgacctttcttgcctcggttctcattacactttcacccatagcagaaaacactttgtgcggctgccgagaggtggtcttgtaagcgctgcatggcgctcccttcaacagcaagcctgactgttctcgagaactctgcaatcttttaaataagcttccttcaaaaaaaaaagtgcttggaaaa

SEQ ID NO: 185143 - DNA, 838 bp, Homo sapiens
  Payload ID: 16458
  Gene Symbol: SALL3
  Gene Name: spalt-like transcription factor 3
  ENST ID: ENST00000573592
  CDS Start-End: 1-452
agaggccggacagcccagccgccgccccgggcagcggaggcgcccctggccgcgcgggcatcaaggaggaggcgcccttcagcctgctgttcctgagcagggagcggggtcccagccaaagcactcctagcctgatctccagcgccgcacccaccatgatcaaaatggaagtgaacggtcacggcaaggccatggcgctgggcgagggtcccccgctgcccgcgggcgtccaggtccccgccgggcctcagacagtgatgggcccgggcctggcgcccatgctggcccccccaccgcgccggacgcccaagcagcacaactgccagtcgtgcgggaagaccttctcctcggccagcgccctgcagatccatgagcgcacgcacaccggcgagaagccgttcggctgcaccatctgcggccgggccttcaccactaagggcaacctcaagtagaatatcagagagcctaaactatgaacattggtgttactgtcctgatttctaccaccgtctgcatctttggcctgttttcattggaagtatcatagattgtcatttggacagaccattcctagcgaatactggcctttcgcggagcttggaaaaccctgtgggaaaatcagaaagctggtaagataagaggaagaagagatgtcacggtgtcagattatgtttgtattctgttctgtccaaagttctttacatcagtaaatgaaaaacaaaacaaatgatgcataggccacgccctgcagtgaaagatgcaagaacttgttcatattggtatgaatcgttcactgtatatgattcaaacatgtggaaataaatgtttgattacagtc

SEQ ID NO: 185144 - DNA, 3903 bp, Homo sapiens
  Payload ID: 16458
  Gene Symbol: SALL3
  Gene Name: spalt-like transcription factor 3
  ENST ID: ENST00000576809
  CDS Start-End: 1-3903
atgtctcggcgcaagcaggccaagccccagcacctcaagtcggacgaggagctgctgccgcctgacggggctcccgagcacgccgccccgggggaaggtgcggaggacgcagacagcgggcccgagagccgcagcgggggcgaggagaccagcgtgtgcgagaaatgctgcgccgagttcttcaagtgggcggacttcctggagcaccagcggagctgcaccaagctcccgcccgtgctgatcgtgcacgaggacgcgcccgcgccgccccccgaggacttccccgagccttcgcccgccagctcccccagcgagcgcgccgaaagcgaggcggccgaggaggcgggtgcggagggcgcggagggcgaggccaggccggtggagaaggaggccgagcccatggacgcggaacccgcgggggacacgcgcgcgccccggcccccgcctgcggcccctgcacccccaacgcccgcctacggcgcgcccagcaccaacgtgaccctggaggcgctgctgagcaccaaggtggcggtggcgcagttctcgcagggcgcgcgcgcggcaggcggctcgggagcaggtggaggcgtggcagctgcagccgtgcccctgatcctggaacagctcatggccctgcagcagcagcagatccaccagctgcagctcatcgagcagatccgcagccaggtggccctcatgcagcgcccgccgccgcggccctcactcagccccgcggccgccccgagcgcaccgggcccggcccccagccagctgcccgggctggccgcgctcccgctgtcggccggggcccctgccgccgccatcgcgggctcgggccccgccgccccggccgccttcgagggcgcgcagccgctgtcccggcccgagtctggcgccagcacccccggcggccctgcggagcccagcgcgcccgccgcccccagcgccgcccctgcccccgctgcccccgccccggcgccagcgccgcagagcgcagcctcgtcgcagccgcagagcgcatccacgccgcctgccctggccccggggtccctgctgggtgcggcgcccggcctgccaagtccgcttctacctcagacttccgccagcggcgtcatcttccccaacccgctggtcagcatcgcggccacggccaacgctctggacccgctgtccgcgctcatgaagcaccgcaagggcaagccgcccaatgtgtcggtgttcgagcccaaagccagcgccgaggacccgttcttcaagcacaaatgccgcttctgcgccaaggtcttcggcagcgacagcgcgctccagatccacctgcgctcgcacacaggcgagcggcccttcaagtgcaacatctgcgggaaccgcttctccaccaaaggcaacctgaaggtgcacttccagaggcacaaggagaagtacccccacatccagatgaacccttacccggtccccgagtacctggacaacgtgcccacctgctcgggcatcccctacggcatgtcgctgccccccgagaagcccgtgaccacctggctggacagcaagcccgtgctgcccaccgtgcccacgtccgtggggctgcaactgccgcccgctgtccctggcgcgcacggctacgccgactctcccagcgccaccccagccagccgctccccgcagaggccctcgcccgcctccagcgagtgcgcctccttgtccccaggcctcaaccacgtggagtccggcgtgtcggccaccgccgagtccccacagtcgctcctcggcgggccgcccgtcactaaagccgagcccgtcagcctgccctgcaccaacgccagggccggggacgctcccgtgggcgcgcaggctagcgctgcacccacatcggtggacggcgcacccacgagcctcggcagccccgggctgcccgccgtctccgagcagttcaaggcccagtttccgttcggggggctgctagactcgatgcaaacgtcggaaacctcgaagctgcagcagctggtggagaacatcgacaagaagatgacggacccgaaccagtgcgtcatctgccaccgggtgctgagctgccagagcgcgctgaagatgcactaccggacgcacacgggggagcggccgttcaagtgcaagatctgcggccgcgccttcaccaccaagggcaacctcaagacgcacttcggcgtgcaccgtgcaaagccgcccctgcgcgtgcagcactcctgccccatctgccagaagaagttcaccaacgccgtggtcctgcagcagcacatccgcatgcacatgggcggccagatccccaacacgccgctgccggagggcttccaggatgccatggactccgagctggcctacgacgacaagaacgcggagaccctgagcagctacgatgacgacatggacgagaactccatggaggacgacgctgagctgaaggacgcggccaccgacccggccaagccactcctgtcctatgcggggtcctgcccgccctccccgccctcggtcatctccagcattgccgccctggagaaccagatgaagatgatcgactcggtcatgagctgccagcagctgaccggcctcaagtccgtggagaacgggtccggggagagtgaccgcctgagcaacgactcctcgtcggccgtgggcgacctggagagccgcagcgcgggcagccccgccctgtccgagtcctcgtcctcgcaggccctgtcgccggcccccagcaatggtgagagcttccgctccaagtccccgggcctgggcgccccggaggagccccaggaaatcccgctcaagaccgagaggccggacagcccagccgccgccccgggcagcggaggcgcccctggccgcgcgggcatcaaggaggaggcgcccttcagcctgctgttcctgagcagggagcggggtaagtgtcccagcactgtgtgtggtgtctgtggcaagccttttgcttgcaagagcgcgttggaaatccactaccgcagccatactaaggagcggccattcgtctgcgcgctctgcaggcgagggtgctccactatgggtaatttaaaacagcacttactgacacacagattgaaagagctgccttctcagttatttgaccccaactttgctctaggtcccagccaaagcactcctagcctgatctccagcgccgcacccaccatgatcaaaatggaagtgaacggtcacggcaaggccatggcgctgggcgagggtcccccgctgcccgcgggcgtccaggtccccgccgggcctcagacagtgatgggcccgggcctggcgcccatgctggcccccccaccgcgccggacgcccaagcagcacaactgccagtcgtgcgggaagaccttctcctcggccagcgccctgcagatccatgagcgcacgcacaccggcgagaagccgttcggctgcaccatctgcggccgggccttcaccactaagggcaacctcaaggtgcacatggggacacacatgtggaataacgcccccgcgagacgcggccgccgcctgtctgtggagaaccccatggctctcctagggggtgatgccctgaagttctctgaaatgttccagaaggacctggcagctcgggcaatgaacgtcgaccccagtttttggaaccagtatgctgcagccatcactaacgggctcgccatgaagaacaacgagatctccgtcatccagaacggcggcatcccccagctccccgtgagtcttgggggcagcgccctcccccctctgggcagcatggccagtgggatggacaaagcacgcactggcagtagcccacccatcgtcagcttggacaaagcgagctcagaaacagcagccagccgcccattcacgcggtttatcgaggataacaaggagattggtatcaactag

SEQ ID NO: 185145 - DNA, 838 bp, Homo sapiens; identical to SEQ ID NO: 185143
  Payload ID: 16458
  Gene Symbol: SALL3
  Gene Name: spalt-like transcription factor 3
  ENST ID: ENST00000573324
  CDS Start-End: 1-452

SEQ ID NO: 185146 - DNA, 6555 bp, Homo sapiens; identical to SEQ ID NO: 185140
  Payload ID: 16458
  Gene Symbol: SALL3
  Gene Name: spalt-like transcription factor 3
  Uniprot ID: Q9BXA9
  ENST ID: ENST00000614883
  CDS Start-End: 1-3903

SEQ ID NO: 185147 - DNA, 2958 bp, Homo sapiens
  Payload ID: 16458
  Gene Symbol: SALL3
  Gene Name: spalt-like transcription factor 3
  ENST ID: ENST00000616649
  CDS Start-End: 1-2883
atgtctcggcgcaagcaggccaagccccagcacctcaagtcggacgaggagctgctgccgcctgacggggctcccgagcacgccgccccgggggaaggtgcggaggacgcagacagcgggcccgagagccgcagcgggggcgaggagaccagcgtgtgcgagaaatgctgcgccgagttcttcaagtgggcggacttcctggagcaccagcggagctgcaccaagctcccgcccgtgctgatcgtgcacgaggacgcgccccccggcctgccaagtccgcttctacctcagacttccgccagcggcgtcatcttccccaacccgctggtcagcatcgcggccacggccaacgctctggacccgctgtccgcgctcatgaagcaccgcaagggcaagccgcccaatgtgtcggtgttcgagcccaaagccagcgccgaggacccgttcttcaagcacaaatgccgcttctgcgccaaggtcttcggcagcgacagcgcgctccagatccacctgcgctcgcacacaggcgagcggcccttcaagtgcaacatctgcgggaaccgcttctccaccaaaggcaacctgaaggtgcacttccagaggcacaaggagaagtacccccacatccagatgaacccttacccggtccccgagtacctggacaacgtgcccacctgctcgggcatcccctacggcatgtcgctgccccccgagaagcccgtgaccacctggctggacagcaagcccgtgctgcccaccgtgcccacgtccgtggggctgcaactgccgcccactgtccctggcgcgcacggctacgccgactctcccagcgccaccccagccagccgctccccgcagaggccctcgcccgcctccagcgagtgcgcctccttgtccccaggcctcaaccacgtggagtccggcgtgtcggccaccgccgagtccccacagtcgctcctcggcgggccgcccctcactaaagccgagcccgtcagcctgccctgcaccaacgccagggccggggacgctcccgtgggcgcgcaggctagcgctgcacccacatcggtggacggcgcacccacgagcctcggcagccccgggctgcccgccgtctccgagcagttcaaggcccagtttccgttcggggggctgctagactcgatgcaaacgtcggaaacctcgaagctgcagcagctggtggagaacatcgacaagaagatgacggacccgaaccagtgcgtcatctgccaccgggtgctgagctgccagagcgcgctgaagatgcactaccggacgcacacgggggagcggccgttcaagtgcaagatctgcggccgcgccttcaccaccaagggcaacctcaagacgcacttcggcgtgcaccgtgcaaagccgcccctgcgcgtgcagcactcctgccccatctgccagaagaagttcaccaacgccgtggtcctgcagcagcacatccgcatgcacatgggcggccagatccccaacacgccgctgccggagggcttccaggatgccatggactccgagctggcctacgacgacaagaacgcggagaccctgagcagctacgatgacgacatggacgagaactccatggaggacgacgctgagctgaaggacgcggccaccgacccggccaagccactcctgtcctacgcggggtcctgcccgccctccccgccctcggtcatctccagcattgccgccctggagaaccagatgaagatgatcgactcggtcatgagctgccagcagctgaccggcctcaagtccgtggagaacgggtccggggagagtgaccgcctgagcaacgactcctcgtcggccgtgggcgacctggagagccgcagcgcgggcagccccgccctgtccgagtcctcgtcctcgcaggccctgtcgccggcccccagcaatggtgagagcttccgctccaagtccccgggcctgggcgccccggaggagccccaggaaatcccgctcaagaccgagaggccggacagcccagccgccgccccgggcagcggaggcgcccctggccgcgcgggcatcaaggaggaggcgcccttcagcctgctgttcctgagcagggagcggggtcccagccaaagcactcctagcctgatctccagcgccgcacccaccatgatcaaaatggaagtgaacggtcacggcaaggccatggcgctgggcgagggtcccccgctgcccgcgggcgtccaggtccccgccgggcctcagacagtgatgggcccgggcctggcgcccatgctggcccccccaccgcgccggacgcccaagcagcacaactgccagtcgtgcgggaagaccttctcctcggccagcgccctgcagatccatgagcgcacgcacaccggcgagaagccgttcggctgcaccatctgcggccgggccttcaccactaagggcaacctcaaggtgcacatggggacacacatgtggaataacgcccccgcgagacgcggccgccgcctgtctgtggagaaccccatggctctcctagggggtgatgccctgaagttctctgaaatgttccagaaggacctggcagctcgggcaatgaacgtcgaccccagtttttggaaccagtatgctgcagccatcactaacgggctcgccatgaagaacaacgagatctccgtcatccagaacggcggcatcccccagctccccgtgagtcttgggggcagcgccctcccccctctgggcagcatggccagtgggatggacaaagcacgcactggcagtagcccacccatcgtcagcttggacaaagcgagctcagaaacagcagccagccgcccattcacgcggtttatcgaggataacaaggagattggtatcaactagccagtgactcgctcatctgccctgcccaggcccacgttttgaagttggagcatcaggcctccgacctttcttgcc

SEQ ID NO: 185148 - DNA, 2958 bp, Homo sapiens; identical to SEQ ID NO: 185147
  Payload ID: 16458
  Gene Symbol: SALL3
  Gene Name: spalt-like transcription factor 3
  ENST ID: ENST00000612458
  CDS Start-End: 1-2883

SEQ ID NO: 185149 - DNA, 2955 bp, Homo sapiens
  Payload ID: 16458
  Gene Symbol: SALL3
  Gene Name: spalt-like transcription factor 3
  ENST ID: ENST00000614625
  CDS Start-End: 1-2880
atgtctcggcgcaagcaggccaagccccagcacctcaagtcggacgaggagctgctgccgcctgacggggctcccgagcacgccgccccgggggaaggtgcggaggacgcagacagcgggcccgagagccgcagcgggggcgaggagaccagcgtgtgcgagaaatgctgcgccgagttcttcaagtgggcggacttcctggagcaccagcggagctgcaccaagctcccgcccgtgctgatcgtgcacgaggacgcgcccggcctgccaagtccgcttctacctcagacttccgccagcggcgtcatcttccccaacccgctggtcagcatcgcggccacggccaacgctctggacccgctgtccgcgctcatgaagcaccgcaagggcaagccgcccaatgtgtcggtgttcgagcccaaagccagcgccgaggacccgttcttcaagcacaaatgccgcttctgcgccaaggtcttcggcagcgacagcgcgctccagatccacctgcgctcgcacacaggcgagcggcccttcaagtgcaacatctgcgggaaccgcttctccaccaaaggcaacctgaaggtgcacttccagaggcacaaggagaagtacccccacatccagatgaacccttacccggtccccgagtacctggacaacgtgcccacctgctcgggcatcccctacggcatgtcgctgccccccgagaagcccgtgaccacctggctggacagcaagcccgtgctgcccaccgtgcccacgtccgtggggctgcaactgccgcccgctgtccctggcgcgcacggctacgccgactctcccagcgccaccccagccagccgctccccgcagaggccctcgcccgcctccagcgagtgcgcctccttgtccccaggcctcaaccacgtggagtccggcgtgtcggccaccgccgagtccccacagtcgctcctcggcgggccgcccgtcactaaagccgagcccgtcagcctgccctgcaccaacgccagggccggggacgctcccgtgggcgcgcaggctagcgctgcacccacatcggtggacggcgcacccacgagcctcggcagccccgggctgcccgccgtctccgagcagttcaaggcccagtttccgttcggggggctgctagactcgatgcaaacgtcggaaacctcgaagctgcagcagctggtggagaacatcgacaagaagatgacggacccgaaccagtgcgtcatctgccaccgggtgctgagctgccagagcgcgctgaagatgcactaccggacgcacacgggggagcggccgttcaagtgcaagatctgcggccgcgccttcaccaccaagggcaacctcaagacgcacttcggcgtgcaccgtgcaaagccgcccctgcgcgtgcagcactcctgccccatctgccagaagaagttcaccaacgccgtggtcctgcagcagcacatccgcatgcacatgggcggccagatccccaacacgccgctgccggagggcttccaggatgccatggactccgagctggcctacgacgacaagaacgcggagaccctgagcagctacgatgacgacatggacgagaactccatggaggacgacgctgagctgaaggacgcggccaccgacccggccaagccactcctgtcctatgcggggtcctgcccgccctccccgccctcggtcatctccagcattgccgccctggagaaccagatgaagatgatcgactcggtcatgagctgccagcagctgaccggcctcaagtccgtggagaacgggtccggggagagtgaccgcctgagcaacgactcctcgtcggccgtgggcgacctggagagccgcagcgcgggcagccccgccctgtccgagtcctcgtcctcgcaggccctgtcgccggcccccagcaatggtgagagcttccgctccaagtccccgggcctgggcgccccggaggagccccaggaaatcccgctcaagaccgagaggccggacagcccagccgccgccccgggcagcggaggcgcccctggccgcgcgggcatcaaggaggaggcgcccttcagcctgctgttcctgagcagggagcggggtcccagccaaagcactcctagcctgatctccagcgccgcacccaccatgatcaaaatggaagtgaacggtcacggcaaggccatggcgctgggcgagggtcccccgctgcccgcgggcgtccaggtccccgccgggcctcagacagtgatgggcccgggcctggcgcccatgctggcccccccaccgcgccggacgcccaagcagcacaactgccagtcgtgcgggaagaccttctcctcggccagcgccctgcagatccatgagcgcacgcacaccggcgagaagccgttcggctgcaccatctgcggccgggccttcaccactaagggcaacctcaaggtgcacatggggacacacatgtggaataacgcccccgcgagacgcggccgccgcctgtctgtggagaaccccatggctctcctagggggtgatgccctgaagttctctgaaatgttccagaaggacctggcagctcgggcaatgaacgtcgaccccagtttttggaaccagtatgctgcagccatcactaacgggctcgccatgaagaacaacgagatctccgtcatccagaacggcggcatcccccagctccccgtgagtcttgggggcagcgccctcccccctctgggcagcatggccagtgggatggacaaagcacgcactggcagtagcccacccatcgtcagcttggacaaagcgagctcagaaacagcagccagccgcccattcacgcggtttatcgaggataacaaggagattggtatcaactagccagtgactcgctcatctgccctgcccaggcccacgttttgaagttggagcatcaggcctccgacctttcttgcc

SEQ ID NO: 185150 - DNA, 838 bp, Homo sapiens; identical to SEQ ID NO: 185143
  Payload ID: 16458
  Gene Symbol: SALL3
  Gene Name: spalt-like transcription factor 3
  ENST ID: ENST00000633138
  CDS Start-End: 1-452

SEQ ID NO: 185151 - DNA, 3996 bp, Homo sapiens; identical to SEQ ID NO: 185141
  Payload ID: 16458
  Gene Symbol: SALL3
  Gene Name: spalt-like transcription factor 3
  Uniprot ID: Q9BXA9
  ENST ID: ENST00000631929
  CDS Start-End: 1-3687

SEQ ID NO: 185152 - DNA, 3997 bp, Homo sapiens; identical to SEQ ID NO: 185139
  Payload ID: 16458
  Gene Symbol: SALL3
  Gene Name: spalt-like transcription factor 3
  Uniprot ID: Q9BXA9
  ENST ID: ENST00000633643
  CDS Start-End: 710-3997

SEQ ID NO: 185153 - DNA, 5208 bp, Homo sapiens
  Payload ID: 16459
  Gene Symbol: SALL4
  Gene Name: spalt-like transcription factor 4
  Uniprot ID: Q9UJQ4
  ENST ID: ENST00000217086
  CDS Start-End: 113-3274
attactgggacatgcgcgttccggccgaaggggggtaaatttcccaactccaggaatttgtggcggagagggcaaataactgcggctctcccggcgccccgatgctcgcaccatgtcgaggcgcaagcaggcgaaaccccagcacatcaactcggaggaggaccagggcgagcagcagccgcagcagcagaccccggagtttgcagatgcggccccagcggcgcccgcggcgggggagctgggtgctccagtgaaccacccagggaatgacgaggtggcgagtgaggatgaagccacagtaaagcggcttcgtcgggaggagacgcacgtctgtgagaaatgctgtgcggagttcttcagcatctctgagttcctggaacataagaaaaattgcactaaaaatccacctgtcctcatcatgaatgacagcgaggggcctgtgccttcagaagacttctccggagctgtactgagccaccagcccaccagtcccggcagtaaggactgtcacagggagaatggcggcagctcagaggacatgaaggagaagccggatgcggagtctgtggtgtacctaaagacagagacagccctgccacccaccccccaggacataagctatttagccaaaggcaaagtggccaacactaatgtgaccttgcaggcactacggggcaccaaggtggcggtgaatcagcggagcgcggatgcactccctgcccccgtgcctggtgccaacagcatcccgtgggtcctcgagcagatcttgtgtctgcagcagcagcagctacagcagatccagctcaccgagcagatccgcatccaggtgaacatgtgggcctcccacgccctccactcaagcggggcaggggccgacactctgaagaccttgggcagccacatgtctcagcaggtttctgcagctgtggctttgctcagccagaaagctggaagccaaggtctgtctctggatgccttgaaacaagccaagctacctcacgccaacatcccttctgccaccagctccctgtccccagggctggcacccttcactctgaagccggatgggacccgggtgctcccgaacgtcatgtcccgcctcccgagcgctttgcttcctcaggccccgggctcggtgctcttccagagccctttctccactgtggcgctagacacatccaagaaagggaaggggaagccaccgaacatctccgcggtggatgtcaaacccaaagacgaggcggccctctacaagcacaagtgtaagtactgtagcaaggtttttgggactgatagctccttgcagatccacctccgctcccacactggagagagacccttcgtgtgctctgtctgtggtcatcgcttcaccaccaagggcaacctcaaggtgcactttcaccgacatccccaggtgaaggcaaacccccagctgtttgccgagttccaggacaaagtggcggccggcaatggcatcccctatgcactctctgtacctgaccccatagatgaaccgagtctttctttagacagcaaacctgtccttgtaaccacctctgtagggctacctcagaatctttcttcggggactaatcccaaggacctcacgggtggctccttgcccggtgacctgcagcctgggccttctccagaaagtgagggtggacccacactccctggggtgggaccaaactataattccccaagggctggtggcttccaagggagtgggacccctgagccagggtcagagaccctgaaattgcagcagttggtggagaacattgacaaggccaccactgatcccaacgaatgtctcatttgccaccgagtcttaagctgtcagagctccctcaagatgcattatcgcacccacaccggggagagaccgttccagtgtaagatctgtggccgagccttttctaccaaaggtaacctgaagacacaccttggggttcaccgaaccaacacatccattaagacgcagcattcgtgccccatctgccagaagaagttcactaatgccgtgatgctgcagcaacatattcggatgcacatgggcggtcagattcccaacacgcccctgccagagaatccctgtgactttacgggttctgagccaatgaccgtgggtgagaacggcagcaccggcgctatctgccatgatgatgtcatcgaaagcatcgatgtagaggaagtcagctcccaggaggctcccagcagctcctccaaggtccccacgcctcttcccagcatccactcggcatcacccacgctagggtttgccatgatggcttccttagatgccccagggaaagtgggtcctgccccttttaacctgcagcgccagggcagcagagaaaacggttccgtggagagcgatggcttgaccaacgactcatcctcgctgatgggagaccaggagtatcagagccgaagcccagatatcctggaaaccacatccttccaggcactctccccggccaatagtcaagccgaaagcatcaagtcaaagtctcccgatgctgggagcaaagcagagagctccgagaacagccgcactgagatggaaggtcggagcagtctcccttccacgtttatccgagccccgccgacctatgtcaaggttgaagttcctggcacatttgtgggaccctcgacattgtccccagggatgacccctttgttagcagcccagccacgccgacaggccaagcaacatggctgcacacggtgtgggaagaacttctcgtctgctagcgctcttcagatccacgagcggactcacactggagagaagccttttgtgtgcaacatttgtgggcgagcttttaccaccaaaggcaacttaaaggttcactacatgacacacggggcgaacaataactcagcccgccgtggaaggaagttggccatcgagaacaccatggctctgttaggtacggacggaaaaagagtctcagaaatctttcccaaggaaatcctggccccttcagtgaatgtggaccctgttgtgtggaaccagtacaccagcatgctcaatggcggtctggccgtgaagaccaatgagatctctgtgatccagagtgggggggttcctaccctcccggtttccttgggggccacctccgttgtgaataacgccactgtctccaagatggatggctcccagtcgggtatcagtgcagatgtggaaaaaccaagtgctactgacggcgttcccaaacaccagtttcctcacttcctggaagaaaacaagattgcggtcagctaagggagaacttgcgtggaaggagcaatgcagacacagtgaaatctctagaatctgctttgttttgtaagaactcatctcctcctgttttctttttcttactgatatgcaaatgatgtttactacgttggttgtgaccacaacctcaggcaagtgctacaatcacgattgttgctatgctgctttgcaaaaagttgaaaaaataaaaaaaaaatgcataccaaaacaaatacagactctttttttttgagatggagtctcgctctatcacccaggctggagtgcagtggcatgatctcggctcactgcaacctccccattctgggttcaagtgattctcctgccttagcctccagagtagctgggattacaggcaggtgccaccacgcccggctaattttgtattttgagtagagactgggtttcaccatgttggtcaggctggtctcgaactgctgacctcgtgatccacccgccttggcctcccaaagtgctgggattacaggcatgagctaccacgcctggcactttttttttttttttctaattttggaaagaagcgggtcttgcaaagtagctttgttacttgtaacagacgtatacatagaacctttgtacaacctagagtgactttttccaaagactgttacctatttcaaggtagaatcgttggaacttactgaacaacagtggaaaagacaactacacagcctcattgaggggagatgggtactgtatacttactggtaactggacacgggtaaaaggacaaggtctgtcatctctttagggacctgttttatatgccccaaccctgtccccatcttattgtttttttttgaatgtacttaaaaaaggaacaacaaaaaactagggttgtagaattataaaactgcttcaaccttagaaccttaagtaggaggccctcaaatggacttacgttagtccttagggagtcaatgtgtgtgttgctgcttatttaaatacagttcagttggagccccgagagtgccaatgttttccccacacctcttggatgccttcctcttcccaaatcccagaagaggtgggcacctgagcggggaatctcaggtgacttagtttgccagtgcctactctattgaagaactgggttttcatgctcgagaagaaactcgtggaagggcgtgtttcccatcacaggttcacatactgattgcttttgttgaatttccttggtgcgacttatgccaagtaattatgacgattttttgttttgttttgtttccttgctgaatatttcatgaaggctacgaagttagaacaggcacgtcctgggtgtgaaagctttaatttatctacctcatttattttttattttttgtagccatagtgtctattttcctattttaagaccgctgaagtattcccaggccctgtctaaagcctaagagttgatgtattggtgggaagaggtgaacgttcaagatgattttgtgatgccttttttttttgtagtttcctttgtaaatgtgatattgagcaaacgaaacattgctcttggtttaacaagaaagaaagaaaaaaactctaatttctgggagaaaagtctttcccctctatgtggaaggtcctgacggaaatatgcatccaagacgattagccaaagtgttgtctcttcatcgttgcacctgactttaggattccgccccccttttttttttttttttttttttttgccaagttgtgcctttccttctggaattgtaagtgaacacgataatagtacctgtttacactgtgaagtggatattgttacagaaaacacaccagtggctttctcactgttgagctaataatgccttgtgaatgtatgatctacggagaaacccctgtagttgtacctgctgatgctgtctgtctgttggaaaataaaatttgaatgtttttttttctca

SEQ ID NO: 185154 - DNA, 1151 bp, Homo sapiens
  Payload ID: 16459
  Gene Symbol: SALL4
  Gene Name: spalt-like transcription factor 4
  ENST ID: ENST00000371539
  CDS Start-End: 102-932
atgcgcgttccggccgaaggggggtaaatttcccaactccaggaatttgtggcggagagggcaaataactgcggctctcccggcgccccgatgctcgcaccatgtcgaggcgcaagcaggcgaaaccccagcacatcaactcggaggaggaccagggcgagcagcagccgcagcagcagaccccggagtttgcagatgcggccccagcggcgcccgcggcgggggagctgggtcggagcagtctcccttccacgtttatccgagccccgccgacctatgtcaaggttgaagttcctggcacatttgtgggaccctcgacattgtccccagggatgacccctttgttagcagcccagccacgccgacaggccaagcaacatggctgcacacggtgtgggaagaacttctcgtctgctagcgctcttcagatccacgagcggactcacactggagagaagccttttgtgtgcaacatttgtgggcgagcttttaccaccaaaggcaacttaaaggttcactacatgacacacggggcgaacaataactcagcccgccgtggaaggaagttggccatcgagaacaccatggctctgttaggtacggacggaaaaagagtctcagaaatctttcccaaggaaatcctggccccttcagtgaatgtggaccctgttgtgtggaaccagtacaccagcatgctcaatggcggtctggccgtgaagaccaatgagatctctgtgatccagagtgggggggttcctaccctcccggtttccttgggggccacctccgttgtgaataacgccactgtctccaagatggatggctcccagtcgggtatcagtgcagatgtggaaaaaccaagtgctactgacggcgttcccaaacaccagtttcctcacttcctggaagaaaacaagattgcggtcagctaagggagaacttgcgtggaaggagcaatgcagacacagtgaaatctctagaatctgctttgttttgtaagaactcatctcctcctgttttctttttcttactgatatgcaaatgatgtttactacgttggttgtgaccacaacctcaggcaagtgctacaatcacgattgttgctatgctgctttgcaaaaagttgaaaaaataaaaaaaaaatgcatacc

SEQ ID NO: 185155 - DNA, 1918 bp, Homo sapiens
  Payload ID: 16459
  Gene Symbol: SALL4
  Gene Name: spalt-like transcription factor 4
  Uniprot ID: Q9UJQ4
  ENST ID: ENST00000395997
  CDS Start-End: 68-1918
aactccaggaatttgtggcggagagggcaaataactgcggctctcccggcgccccgatgctcgcaccatgtcgaggcgcaagcaggcgaaaccccagcacatcaactcggaggaggaccagggcgagcagcagccgcagcagcagaccccggagtttgcagatgcggccccagcggcgcccgcggcgggggagctgggtgctccagtgaaccacccagggaatgacgaggtggcgagtgaggatgaagccacagtaaagcggcttcgtcgggaggagacgcacgtctgtgagaaatgctgtgcggagttcttcagcatctctgagttcctggaacataagaaaaattgcactaaaaatccacctgtcctcatcatgaatgacagcgaggggcctgtgccttcagaagacttctccggagctgtactgagccaccagcccaccagtcccggcagtaaggactgtcacagggagaatggcggcagctcagaggacatgaaggagaagccggatgcggagtctgtggtgtacctaaagacagagacagccctgccacccaccccccaggacataagctatttagccaaaggcaaagtggccaacactaatgtgaccttgcaggcactacggggcaccaaggtggcggtgaatcagcggagcgcggatgcactccctgcccccgtgcctggtgccaacagcatcccgtgggtcctcgagcagatcttgtgtctgcagcagcagcagctacagcagatccagctcaccgagcagatccgcatccaggtgaacatgtgggcctcccacgccctccactcaagcggggcaggggccgacactctgaagaccttgggcagccacatgtctcagcaggtttctgcagctgtggctttgctcagccagaaagctggaagccaaggtctgtctctggatgccttgaaacaagccaagctacctcacgccaacatcccttctgccaccagctccctgtccccagggctggcacccttcactctgaagccggatgggacccgggtgctcccgaacgtcatgtcccgcctcccgagcgctttgcttcctcaggccccgggctcggtgctcttccagagccctttctccactgtggcgctagacacatccaagaaagggaaggggaagccaccgaacatctccgcggtggatgtcaaacccaaagacgaggcggccctctacaagcacaagtgtcggagcagtctcccttccacgtttatccgagccccgccgacctatgtcaaggttgaagttcctggcacatttgtgggaccctcgacattgtccccagggatgacccctttgttagcagcccagccacgccgacaggccaagcaacatggctgcacacggtgtgggaagaacttctcgtctgctagcgctcttcagatccacgagcggactcacactggagagaagccttttgtgtgcaacatttgtgggcgagcttttaccaccaaaggcaacttaaaggttcactacatgacacacggggcgaacaataactcagcccgccgtggaaggaagttggccatcgagaacaccatggctctgttaggtacggacggaaaaagagtctcagaaatctttcccaaggaaatcctggccccttcagtgaatgtggaccctgttgtgtggaaccagtacaccagcatgctcaatggcggtctggccgtgaagaccaatgagatctctgtgatccagagtgggggggttcctaccctcccggtttccttgggggccacctccgttgtgaataacgccactgtctccaagatggatggctcccagtcgggtatcagtgcagatgtggaaaaaccaagtgctactgacggcgttcccaaacaccagtttcctcacttcctggaagaaaacaagattgcggtcagctaa

SEQ ID NO: 185156 - DNA, 691 bp, Homo sapiens
  Payload ID: 16460
  Gene Symbol: SPANXA2
  Gene Name: SPANX family, member A2
  Uniprot ID: Q9NS26
  ENST ID: ENST00000370518
  CDS Start-End: 334-627
attaaacatggagaaatgaggagcggcggcagatcggtttgggatgcatcttcaggggatgctgaaacaacagcagcatttggtttgctctacacccctgtcacccctcgcccgcaagcccagggagtggtcagcagtggggctttgtgatgtgaagccaccctagggctgccattggctgggacactgcctgtatgatcaaacaaagctcaagggtgtggctttgccttgtcaccaggagggtatacatagggagggcaagagctccgggccactgagaagattcaaaacctacaaaagcctgccactgacattgaagaaccaatatatacaatggacaaacaatccagtgccggcggggtgaagaggagcgtcccctgtgattccaacgaggccaacgagatgatgccggagaccccaactggggactcagacccgcaacctgctcctaaaaaaatgaaaacatctgagtcctcgaccatactagtggttcgctacaggaggaactttaaaagaacatctccagaggaactgctgaatgaccacgcccgagagaacagaatcaaccccctccaaatggaggaggaggaattcatggaaataatggttgaaatacctgcaaagtagcaagaagctacatctctcaaccttgggcaatgaaaataaagtttgagaagctgatggctgtgta

SEQ ID NO: 185157 - DNA, 469 bp, Homo sapiens
  Payload ID: 16461
  Gene Symbol: SPANXB1
  Gene Name: SPANX family, member B1
  Uniprot ID: Q9NS25
  ENST ID: ENST00000449283
  CDS Start-End: 104-415
gtcaccaggagggtatgcatagggagggcaagagctctgggccactgcgaagattcaaaagctccaaaaacctactgtagacatcgaagaaccaatatatacaatgggccaacaatccagtgtccgcaggctgaagaggagcgtcccctgtgaatccaacgaggccaacgaggccaatgaggccaacaagacgatgccggagaccccaactggggactcagacccgcaacctgctcctaaaaaaatgaaaacatctgagtcctcgaccatactagtggttcgctacaggaggaacgtgaaaagaacatctccagaggaactgctgaatgaccacgcccgagagaacagaatcaaccccgaccaaatggaggaggaggaattcatagaaataacgactgaaagacctaaaaagtagcaagaagctacatccctcaaacttcggcaatgaaaataaagtttgagaagctga

SEQ ID NO: 185158 - DNA, 387 bp, Homo sapiens
  Payload ID: 16462
  Gene Symbol: SPANXC
  Gene Name: SPANX family, member C
  Uniprot ID: Q9NY87
  ENST ID: ENST00000358993
  CDS Start-End: 40-333
caaaagcctgccgctgacattgaagaaccaatatatacaatggacaaacaatccagtgccggcggggtgaagaggagcgtcccctgtgattccaacgaggccaacgagatgatgccggagacctcgagtgggtactcagacccgcaacctgctccgaaaaaactaaaaacatctgagtcctcgaccatactagtggttcgctacaggaggaacgtgaaaagaacatctccagaggaactggtgaatgaccacgcccgagagaacagaatcaaccccctccaaatggaggaggaggaattcatggaaataatggttgaaatacctgcaaagtagcaagaagctacatctctcaaccttgggcaatgaaaataaagtttgagaagctga

SEQ ID NO: 185159 - DNA, 682 bp, Homo sapiens
  Payload ID: 16463
  Gene Symbol: SPANXD
  Gene Name: SPANX family, member D
  Uniprot ID: Q9BXN6
  ENST ID: ENST00000370515
  CDS Start-End: 335-628
attaaacatggagaaatgaggagcggcggcagatcggtttgggatgcatcttcaggggatgctgaaacaacagcagcatttggtttgctctacacccctgtcacccctcgcccgcaagcccagggagtggtcagcagtggggctttgtgacgtcgaagccaccctagggctgccattggctgggacactgcctgtatgatcaaacaaagctcaagggtgtggctttgccttgtcaccaggagggtatacatagggagggcaagagctccgggccactgagaagattcaaaacctacaaaagcctgccgctgacattgaagaaccaatatatacaatggacaaacaatccagtgccggcggggtgaagaggagcgtcccctgtgattccaacgaggccaacgagatgatgccggagacctcgagtgggtactcagacccgcaacctgctccgaaaaaactaaaaacatctgagtcctcgaccatactagtggttcgctacaggaggaactttaaaagaacatctccagaggaactggtgaatgaccacgcccgaaagaacagaatcaaccccctccaaatggaggaggaggaattcatggaaataatggttgaaatacctgcaaagtagcaagaagctacatctctcaaccttgggcaatgacaataaagtttgagaagctga

SEQ ID NO: 185160 - DNA, 1276 bp, Homo sapiens
  Payload ID: 16464
  Gene Symbol: SPANXN1
  Gene Name: SPANX family, member N1
  Uniprot ID: Q5VSR9
  ENST ID: ENST00000370493
  CDS Start-End: 760-978
acacccctgatttgaaacaagactaggatacatggtaaagaatgtttattcactaaagttttgacagactgaaggccattatttcagattggagataggaaacttaaaagaactacatggacattgggtaaaagaacatgggttgaaatttgcctggcagtagcccaaaagtaaatggtcttcgaggtgcatgtgaaggaactgtaggagggaaatgggataattcacatctccaccaataattacatgtagccacactagcttgggggatttgaggtgagacatctaaaatactaagtcatggtgagggctggaagacaaaagaatgaatcacttcataggaatggctgtggggaagggcttgaaggaatcatcctctgacttccatgtgaaccatgaacattaaacatggagaaatgaggagcggcggcagatcggtttgggatgcatcttcaggggatgctgaaacaacaacagcatttggtttcctctacatccctgtcacccctcccccacaagcccagggattggtcagcagtggtgcttcgtgatgtcaaagccaccctaggactgccattggctgggacactgcctgtatgatcaaacaaagctcaagggtgtggctttgccttgtcaccaggagggtatatatagggagggcaagagctctgggacatcctcctgggaagcttcaatacagctgtgcaagtctggagtctacaagagcctactatagacattctacaaccaaccagaatcatggaacagcccacttcaagcatcaatggggagaagaggaagagcccctgtgaatccaacaatgaaaatgatgagatgcaggagacaccaaacagggacttagcccccgaaccgagtttgaaaaagatgaaaacgtcagaatattcaacagtattagcgttttgctacaggaaagctaagaaaatacattcaaatcaactggagaatgaccagtcctgagagaactccatcaatccagtccaagaggaggaggacgaaggcctagactcagctgaaggatcttcaaagcaggatgaagacctagacttacctgaaggcctagactcagctgaaggatcttcaaagcaggatgaagacctagacttacctgaaggatcttcaaagcagaatgaagacctaggcttacctgaaggatcttcaaagcaggatgaagacctagacttacctgaaggatcttcacaggaggataaagacgtagaattacctgaaggatcttcacaggaggatgaagacctag

SEQ ID NO: 185161 - DNA, 1378 bp, Homo sapiens
  Payload ID: 16465
  Gene Symbol: SPANXN2
  Gene Name: SPANX family, member N2
  Uniprot ID: Q5MJ10
  ENST ID: ENST00000598475
  CDS Start-End: 756-1298
acccctgatttgaaacaagactaggatacatggtaaagaaagtttattcaccaaagttttgacagactgaaggccattatttcagattggagataggaaacttaaaagaactacatggacattgggtaaaagaacatgggttgaaatttgcctggcagtagcctaaaagtaaatggtcttcaaggtgcatgtgaaggaactgtaggagggaaatgggataattcacatctccaccaataattaaatgtagccacactagcttggagggatttgaggtgagacatctaaaatactaagtcatggtgagggctggaagacaaaagaatgaatgacttcataggaatgactgtggggaagggcttgaaggaatcatcctctcacttccatgtgaaccatgaacattaaacatggagaaatgagcagcagcagattagtttgggatgcatcttcaggggatgctgaaacaacaacagcatttggtttcctctacacccctgtcatccgtcccccacaagcccagggagtggtcagcagtggtgctttgtgatgtctaagccaccctaggactgccattggctgggacactgcctgtatgatcaaacaaagctcaagagtgtggctttgccttgccaccaggaaggtatacatagggagggccagagctctgggacatcctcctggcaagcttcaatatagctgtggaagtctgcagtctacaagagcctactatagacattctacaaccaagcagaatcatggaacagccgacttcaagcaccaatggggagaagaggaagagcccctgtgaatccaataacaaaaaaaatgatgagatgcaggaggcaccgaacagggtcttagcccccaaacagagcttgcaaaagacaaaaacaatagaatatctaacaataatagtgtattactacaggaagcatacgaaaataaattcaaatcaactggagaaggaccagtcccgagagaactccatcaatccagtccaagaggaggaggacgaaggcctagactcagctgaaggatcttcacaggaggacgaagacctggactcatctgaaggatcttcacaggaggacgaagacctggactcatctgaaggatcttcacaggaggacgaagacctggactcatctgaaggatcttcacaggaggacgaagacctggactcatctgaaggatcttcacaggaggacgaagacctggacccacctgaaggatcttcacaggaggacgaagacctagactcatctgaaggatcttcacaggagggtggggaggactagtcaaacatggagaaaccaaattggacaaatcctcactaccaatggcgatgattacaataaaatcaagtttgaggagctga

SEQ ID NO: 185162 - DNA, 590 bp, Homo sapiens
  Payload ID: 16466
  Gene Symbol: SPANXN3
  Gene Name: SPANX family, member N3
  Uniprot ID: Q5MJ09
  ENST ID: ENST00000370503
  CDS Start-End: 85-510
atcccactgggaagcttcaacatagctgtggaagtctgcagtctacaggagcctactatagacattctacaaccaaccagaatcatggaacagccaacttccagcaccaatggggagaagacgaagagcccctgtgaatccaataacaaaaaaaatgatgagatgcaagaggtaccaaacagagtcttagcccccgaacagagtttgaagaacacaaaaacatcagaatatccaataatatttgtgtattacctcaggaagggtaagaaaataaattcaaatcaactggagaatgaacagtcccaagagaactccatcaatccaatccaaaaggaggaggacgaaggcgtagacttatctgaaggatcttcaaatgaggatgaagacctaggcccatgtgaaggaccttcaaaggaggacaaagatctagactcatctgaaggatcctcacaggaggatgaagacctaggcttatctgaaggatcttcacaggacagtggggaggattagtcacacatggagaaaccaaattggacaaatcatcaccactgatggcgatgattacaataaaatcaagtttaaggagctga

SEQ ID NO: 185163 - DNA, 560 bp, Homo sapiens
  Payload ID: 16467
  Gene Symbol: SPANXN4
  Gene Name: SPANX family, member N4
  ENST ID: ENST00000370504
  CDS Start-End: 84-554
gcccactggaaagcttcaatacagctgtggaaatctgcaccctagaagatcctagtacagaaattctacaaccaaccataatcatggaagagccaacttccagcaccaacgagaataaaatgaagagcccctgtgaatctaacaaaagaaaagttgacaagaagaagaatctgcacagagcctcagcccctgaacagagtttgaaagagacagaaaaagcaaaatatccaacattagtgttttactgcaggaagaataagaaaagaaattcaaatcaactggagaataaccagcctacagagagctccactgatccaatcaaagagaaaggagacctagacatatctgcaggatctccacaggatggagaggaagaaaaggatttggtgttccttggagcacgtgcatgtttagaagagcacataagaagatctgtattgtatgtaggtgacagtgacactctttccaaaatgaagacatcagaatcaccaccttcaggccacatacctcagagtggtgtgttttgtaactcacccaatgctgtgagcaactgaaggtcc

SEQ ID NO: 185164 - DNA, 431 bp, Homo sapiens
  Payload ID: 16467
  Gene Symbol: SPANXN4
  Gene Name: SPANX family, member N4
  Uniprot ID: Q5MJ08
  ENST ID: ENST00000446864
  CDS Start-End: 98-397
aaagctctgggacagcccactggaaagcttcaatacagctgtggaaatctgcaccctagaagatcctagtacagaaattctacaaccaaccataatcatggaagagccaacttccagcaccaacgagaataaaatgaagagcccctgtgaatctaacaaaagaaaagttgacaagaagaagaagaatctgcacagagcctcagcccctgaacagagtttgaaagagacagaaaaagcaaaatatccaacattagtgttttactgcaggaagaataagaaaagaaattcaaatcaactggagaataaccagcctacagagagctccactgatccaatcaaagagaaaggagacctagacatatctgcaggatctccacaggatggtgggcagaattagtccaaattggacaaatcatcaccactgatggcga

SEQ ID NO: 185165 - DNA, 1316 bp, Homo sapiens
  Payload ID: 16468
  Gene Symbol: SPANXN5
  Gene Name: SPANX family, member N5
  Uniprot ID: Q5MJ07
  ENST ID: ENST00000375511
  CDS Start-End: 754-972
acacccctgatttgaaacaagactaggatgcaaggtaaagaatgttaattcactaaagttttgacagactgaggccattgtttcagattggaaataggaaacttaaaagaactacatggacattgggtaaaagaacatgggttgaaatttgcctggcagtagcccaagagtaaatggtcttcaaggtgcatatgaaggaactgtaagagggaaatgggataattcacatctccaccaataattaaatgtagccacactagcttgggggatttgaggtgagacatctaaaatactaagtcatggtgagggctggaagacaaaagaatgaatcacttaataggaatggctgtggggaagggcttgacagaatcaacctctcacttccatgtgaaccatgaacattaaacatggagaaatgaggagcggcagcagatcagtttgggatgcgtcttcaggggatgctgaaacaacagcagcatttggtttcctctacacccctgtcacccctcccccacaagcccagggagtggtcagcagtggtgctttgtgatgtctaagccacccttggactgccattggctgggacactgcctgtatgatcaaacaaagctcaagggtgtggctttgccttgtcaccaggagggtatatatagggagggcaagagctctgggccactgggaagcttcaatatagctgtggaagtctggactctacaagatcctgctgtagacattcaacaaccaaccagaatcatggaaaagcccacttcaagcaccaatggggagaagaggaagagcccctgtgactccaacagcaaaaatgatgagatgcaggagacaccaaacagggacttagtcctcgaaccgagtttgaaaaagatgaaaacatcagaatattcaacagtattagtgttgtgctacaggaagactaagaaaatacattcaaatcaactcgagaatgaccagtcctgagagaactccatcaatccagtccaagaggaggaggacgaaggatcctcacaggaggacgaagacctagactcatctgcagaatcttcaaagcaggatgaagacctacaattacctgaaggatcttcacaggaggatgaagacctagggttatctgaaggatcttcacaagaggatgaagacctagactcatctgaaggatctttgatggaggaagaagacccagactcatctgaaggatcgtcagaggagggtgaggaagactaattaaacatggagaaaccaaattggacaaatcctcaccaccaacggtgatgattacaataaaatcaagtttgagaagctga

SEQ ID NO: 185166 - DNA, 2040 bp, Homo sapiens
  Payload ID: 16469
  Gene Symbol: SMOC1
  Gene Name: SPARC related modular calcium binding 1
  Uniprot ID: Q9H4F8
  ENST ID: ENST00000361956
  CDS Start-End: 264-1571
aggcgtccaacctgctgccgcctgggccccgccgagcggagctagcgccgcgcgcagagcacacgctcgcgctccagctcccctcctgcgcggttcatgactgtgtcccctgaccgcagcctctgcgagcccccgccgcaggaccacggcccgctccccgccgccgcgagggccccgagcgaaggaaggaagggaggcgcgctgtgcgccccgcggagcccgcgaaccccgctcgctgccggctgcccagcctggctggcaccatgctgcccgcgcgctgcgcccgcctgctcacgccccacttgctgctggtgttggtgcagctgtcccctgctcgcggccaccgcaccacaggccccaggtttctaataagtgaccgtgacccacagtgcaacctccactgctccaggactcaacccaaacccatctgtgcctctgatggcaggtcctacgagtccatgtgtgagtaccagcgagccaagtgccgagacccgaccctgggcgtggtgcatcgaggtagatgcaaagatgctggccagagcaagtgtcgcctggagcgggctcaagccctggagcaagccaagaagcctcaggaagctgtgtttgtcccagagtgtggcgaggatggctcctttacccaggtgcagtgccatacttacactgggtactgctggtgtgtcaccccggatgggaagcccatcagtggctcttctgtgcagaataaaactcctgtatgttcaggttcagtcaccgacaagcccttgagccagggtaactcaggaaggaaagatgacgggtctaagccgacacccacgatggagacccagccggtgttcgatggagatgaaatcacagccccaactctatggattaaacacttggtgatcaaggactccaaactgaacaacaccaacataagaaattcagagaaagtctattcgtgtgaccaggagaggcagagtgccctggaagaggcccagcagaatccccgtgagggtattgtcatccctgaatgtgcccctgggggactctataagccagtgcaatgccaccagtccactggctactgctggtgtgtgctggtggacacagggcgcccgctgcctgggacctccacacgctacgtgatgcccagttgtgagagcgacgccagggccaagactacagaggcggatgaccccttcaaggacagggagctaccaggctgtccagaagggaagaaaatggagtttatcaccagcctactggatgctctcaccactgacatggttcaggccattaactcagcagcgcccactggaggtgggaggttctcagagccagaccccagccacaccctggaggagcgggtagtgcactggtatttcagccagctggacagcaatagcagcaacgacattaacaagcgggagatgaagcccttcaagcgctacgtgaagaagaaagccaagcccaagaaatgtgcccggcgtttcaccgactactgtgacctgaacaaagacaaggtcatttcactgcctgagctgaagggctgcctgggtgttagcaaagaagtaggacgcctcgtctaaggagcagaaaacccaagggcaggtggagagtccagggaggcaggatggatcaccagacacctaaccttcagcgttgcccatggccctgccacatcccgtgtaacataagtggtgcccaccatgtttgcacttttaataactcttacttgcgtgttttgtttttggtttcattttaaaacaccaatatctaataccacagtgggaaaaggaaagggaagaaagactttattctctctcttattgtaagtttttggatctgctactgacaacttttagagggttttgggggggtgggggagggtgttgttggggctgagaagaaagagatttatatgctgtatataaatatatatgtaaattgtatagttcttttgtacaggcattggcattgctgtttgtttatttctctccctctgcctgctgtgggtggtgggcactctggacacatagtccagctttctaaaatcca

SEQ ID NO: 185167 - DNA, 3666 bp, Homo sapiens
  Payload ID: 16469
  Gene Symbol: SMOC1
  Gene Name: SPARC related modular calcium binding 1
  Uniprot ID: Q9H4F8
  ENST ID: ENST00000381280
  CDS Start-End: 254-1558
cctgctgccgcctgggccccgccgagcggagctagcgccgcgcgcagagcacacgctcgcgctccagctcccctcctgcgcggttcatgactgtgtcccctgaccgcagcctctgcgagcccccgccgcaggaccacggcccgctccccgccgccgcgagggccccgagcgaaggaaggaagggaggcgcgctgtgcgccccgcggagcccgcgaaccccgctcgctgccggctgcccagcctggctggcaccatgctgcccgcgcgctgcgcccgcctgctcacgccccacttgctgctggtgttggtgcagctgtcccctgctcgcggccaccgcaccacaggccccaggtttctaataagtgaccgtgacccacagtgcaacctccactgctccaggactcaacccaaacccatctgtgcctctgatggcaggtcctacgagtccatgtgtgagtaccagcgagccaagtgccgagacccgaccctgggcgtggtgcatcgaggtagatgcaaagatgctggccagagcaagtgtcgcctggagcgggctcaagccctggagcaagccaagaagcctcaggaagctgtgtttgtcccagagtgtggcgaggatggctcctttacccaggtgcagtgccatacttacactgggtactgctggtgtgtcaccccggatgggaagcccatcagtggctcttctgtgcagaataaaactcctgtatgttcaggttcagtcaccgacaagcccttgagccagggtaactcaggaaggaaagatgacgggtctaagccgacacccacgatggagacccagccggtgttcgatggagatgaaatcacagccccaactctatggattaaacacttggtgatcaaggactccaaactgaacaacaccaacataagaaattcagagaaagtctattcgtgtgaccaggagaggcagagtgccctggaagaggcccagcagaatccccgtgagggtattgtcatccctgaatgtgcccctgggggactctataagccagtgcaatgccaccagtccactggctactgctggtgtgtgctggtggacacagggcgcccgctgcctgggacctccacacgctacgtgatgcccagttgtgagagcgacgccagggccaagactacagaggcggatgaccccttcaaggacagggagctaccaggctgtccagaagggaagaaaatggagtttatcaccagcctactggatgctctcaccactgacatggttcaggccattaactcagcagcgcccactggaggtgggaggttctcagagccagaccccagccacaccctggaggagcgggtagtgcactggtatttcagccagctggacagcaatagcagcaacgacattaacaagcgggagatgaagcccttcaagcgctacgtgaagaagaaagccaagcccaagaaatgtgcccggcgtttcaccgactactgtgacctgaacaaagacaaggtcatttcactgcctgagctgaagggctgcctgggtgttagcaaagaaggacgcctcgtctaaggagcagaaaacccaagggcaggtggagagtccagggaggcaggatggatcaccagacacctaaccttcagcgttgcccatggccctgccacatcccgtgtaacataagtggtgcccaccatgtttgcacttttaataactcttacttgcgtgttttgtttttggtttcattttaaaacaccaatatctaataccacagtgggaaaaggaaagggaagaaagactttattctctctcttattgtaagtttttggatctgctactgacaacttttagagggttttgggggggtgggggagggtgttgttggggctgagaagaaagagatttatatgctgtatataaatatatatgtaaattgtatagttcttttgtacaggcattggcattgctgtttgtttatttctctccctctgcctgctgtgggtggtgggcactctggacacatagtccagctttctaaaatccaggactctatcctgggcctactaaacttctgtttggagactgacccttgtgtataaagacgggagtcctgcaattgtactgcggactccacgagttcttttctggtgggaggactatattgccccatgccattagttgtcaaaattgataagtcacttggctctcggccttgtccagggaggttgggctaaggagagatggaaactgccctgggagaggaagggagtccagatcccatgaatagcccacacaggtaccggctctcagagggtccgtgcattcctgctctccggacccccaaagggcccagcattggtgggtgcaccagtatcttagtgaccctcggagcaaattatccacaaaggatttgcattacgtcactcgaaacgttttcatccatgcttagcatctactctgtataacgcatgagaggggaggcaaagaagaaaaagacacacagaagggcctttaaaaaagtagatatttaatatctaagcaggggaggggacaggacagaaagcctgcactgaggggtgcggtgccaacagggaaactcttcacctccctgcaaacctaccagtgaggctcccagagacgcagctgtctcagtgccaggggcagattgggtgtgacctctccactcctccatctcctgctgttgtcctagtggctatcacaggcctgggtgggtgggttgggggaggtgtcagtcaccttgttggtaacactaaagttgttttgttggttttttaaaaacccaatactgaggttcttcctgttccctcaagttttcttatgggcttccaggctttaagctaattccagaagtaaaactgatcttgggtttcctattctgcctcccctagaagggcaggggtgataacccagctacagggaaatcccggcccagctttccacaggcatcacaggcatcttccgcggattctagggtgggctgcccagccttctggtctgaggcgcagctccctctgcccaggtgctgtgcctattcaagtggccttcaggcagagcagcaagtggcccttagcgccccttcccataagcagctgtggtggcagtgagggaggttgggtagccctggactggtcccctcctcagatcacccttgcaaatctggcctcatcttgtattccaacccgacatccctaaaagtacctccacccgttccgggtctggaaggcgttggcaccacaagcactgtccctgtgggaggagcacaaccttctcgggacaggatctgatggggtcttgggctaaaggaggtccctgctgtcctggagaaagtcctagaggttatctcaggaatgactggtggccctgccccaacgtggaaaggtgggaaggaagccttctcccattagccccaatgagagaactcaacgtgccggagctgagtgggccttgcacgagacactggccccactttcaggcctggaggaagcatgcacacatggagacggcgcctgcctgtagatgtttggatcttcgagatctccccaggcatcttgtctcccacaggatcgtgtgtgtaggtggtgttgtgtggttttcctttgtgaaggagagagggaaactatttgtagcttgttttataaaaaataaaaaatgggtaaatcttg

SEQ ID NO: 185168 - DNA, 3150 bp, Homo sapiens
  Payload ID: 16470
  Gene Symbol: SMOC2
  Gene Name: SPARC related modular calcium binding 2
  Uniprot ID: Q9H3U7
  ENST ID: ENST00000354536
  CDS Start-End: 221-1594
gggtatttgacaggagcgagggcggacgcaaagaacgcggaggacctctgggtgcctgcaggggagctgctccagccgggccgccgggagcggtggggagagcatcgcggagccgcccctccacgcgcccgcccagccgcgctcgcccactgggctctcccggctgcagtgccagggcgcaggacgcggccgatctcccgctcccgccacctccgccaccatgctgctcccccagctctgctggctgccgctgctcgctgggctgctcccgccggtgcccgctcagaagttctcggcgctcacgtttttgagagtggatcaagataaagacaaggattgtagcttggactgtgcgggttcgccccagaaacctctctgcgcatctgacggaaggaccttcctttcccgttgtgaatttcaacgtgccaagtgcaaagatccccagctagagattgcatatcgaggaaactgcaaagacgtgtccaggtgtgtggccgaaaggaagtatacccaggagcaagcccggaaggagtttcagcaagtgttcattcctgagtgcaatgacgacggcacctacagtcaggtccagtgtcacagctacacgggatactgctggtgcgtcacgcccaacgggaggcccatcagcggcactgccgtggcccacaagacgccccggtgcccgggttccgtaaatgaaaagttaccccaacgcgaaggcacaggaaaaacagtctccttgcaaatcttttccgttctgaattcagatgatgccgcagctccagcgttggagactcagcctcaaggagatgaagaagatattgcatcacgttaccctaccctttggactgaacaggttaaaagtcggcagaacaaaaccaataagaattcagtgtcatcctgtgaccaagagcaccagtctgccctggaggaagccaagcagcccaagaacgacaatgtggtgatccctgagtgtgcgcacggcggcctctacaagccagtgcagtgccacccctccacggggtactgctggtgcgtcctggtggacacggggcgccccattcccggcacatccacaaggtacgagcagccgaaatgtgacaacacggccagggcccacccagccaaagcccgggacctgtacaagggccgccagctacaaggttgtccgggtgccaaaaagcatgagtttctgaccagcgttctggacgcgctgtccacggacatggtccacgccgcctccgacccctcctcctcgtcaggcaggctctcagaacccgaccccagccataccctagaggagcgggtggtgcactggtacttcaaactactggataaaaactccagtggagacatcggcaaaaaggaaatcaaacccttcaagaggttccttcgcaaaaaatcaaagcccaaaaaatgtgtgaagaagtttgttgaatactgtgacgtgaataatgacaaatccatctccgtacaagaactgatgggctgcctgggcgtggcgaaagaggacggcaaagcggacaccaagaaacgccacacccccagaggtcatgctgaaagtacgtctaatagacagccaaggaaacaaggataaatggctcataccccgaaggcagttcctagacacatgggaaatttccctcaccaaagagcaattaagaaaacaaaaacagaaacacatagtatttgcactttgtactttaaatgtaaattcactttgtagaaatgagctatttaaacagactgttttaatctgtgaaaatggagagctggcttcagaaaattaatcacatacaatgtatgtgtcctcttttgaccttggaaatctgtatgtggtggagaagtatttgaatgcatttaggcttaatttcttcgccttccacatgttaacagtagagctctatgcactccggctgcaatcgtatggctttctctaacccctgcagtcacttccagatgcctgtgcttacagcattgtggaatcatgttggaagctccacatgtccatggaagtttgtgatgtacggccgaccctacaggcagttaacatgcatgggctggtttgtttcttgggattttctgttagtttgtcttgttttgctttccagagatcttgctcatacaatgaatcacgcaaccactaaagctatccagttaagtgcaggtagttcccctggaggaaataatattttcaaactgtcgttggtgtgatactttggctcaaaggatctttgcttttccattttaagcttctgttttgagttttgccctggggcttgaatgagtcccagagagtcgttcggatggtgggaggctgcctaggaggcagtaaatccagtcacagtgcctgggaggggcccatccttccaaaatgtaaatccagtcgcggtgtgaccgagctggctaacaggcttgtctgcctggttttcctcctacacgtggacattattctcctgatcctcctacctggtccaccccagggctaccggaaggtaaaatcttcacctgaaccaattatgagcagtctccttactgaaggtacagccggatacgtggtgcccccggggctggtgttggcagccggggggaggtgcctgagggtccccacggttcctttctgcttttctgaatgcatcaagggtacgagaacttgccaatgggaaattcatccgagtggcactggcagagaaggataggagtggaatgcccacacagtgaccaacagaactggtctgcgtgcataaccagctgccaccctcaggcctgggccccagagctcagggcacccagtgtcttaaggaaccatttggaggacagtctgagagcaggaacttcaagctgtgattctatctcggctcagacttttggttggaaaaagatcttcatggccccaaatcccctgagacatgccttgtagaatgattttgtgatgttgtgatgcttgtggagcatcgcgtaaggcttcttgcttatttaaactgtgcaaggtaaaaatcaagcctttggagccacagaaccagctcaagtacatgccaatgttgtttaagaaacagttatgatcctaaactttttggataatcttttatatttctgacctttgaatttaatcattgttcttagattaaaataaaatatgctattgaaactata

SEQ ID NO: 185169 - DNA, 3117 bp, Homo sapiens
  Payload ID: 16470
  Gene Symbol: SMOC2
  Gene Name: SPARC related modular calcium binding 2
  Uniprot ID: Q9H3U7
  ENST ID: ENST00000356284
  CDS Start-End: 221-1561
gggtatttgacaggagcgagggcggacgcaaagaacgcggaggacctctgggtgcctgcaggggagctgctccagccgggccgccgggagcggtggggagagcatcgcggagccgcccctccacgcgcccgcccagccgcgctcgcccactgggctctcccggctgcagtgccagggcgcaggacgcggccgatctcccgctcccgccacctccgccaccatgctgctcccccagctctgctggctgccgctgctcgctgggctgctcccgccggtgcccgctcagaagttctcggcgctcacgtttttgagagtggatcaagataaagacaaggattgtagcttggactgtgcgggttcgccccagaaacctctctgcgcatctgacggaaggaccttcctttcccgttgtgaatttcaacgtgccaagtgcaaagatccccagctagagattgcatatcgaggaaactgcaaagacgtgtccaggtgtgtggccgaaaggaagtatacccaggagcaagcccggaaggagtttcagcaagtgttcattcctgagtgcaatgacgacggcacctacagtcaggtccagtgtcacagctacacgggatactgctggtgcgtcacgcccaacgggaggcccatcagcggcactgccgtggcccacaagacgccccggtgcccgggttccgtaaatgaaaagttaccccaacgcgaaggcacaggaaaaacagatgatgccgcagctccagcgttggagactcagcctcaaggagatgaagaagatattgcatcacgttaccctaccctttggactgaacaggttaaaagtcggcagaacaaaaccaataagaattcagtgtcatcctgtgaccaagagcaccagtctgccctggaggaagccaagcagcccaagaacgacaatgtggtgatccctgagtgtgcgcacggcggcctctacaagccagtgcagtgccacccctccacggggtactgctggtgcgtcctggtggacacggggcgccccattcccggcacatccacaaggtacgagcagccgaaatgtgacaacacggccagggcccacccagccaaagcccgggacctgtacaagggccgccagctacaaggttgtccgggtgccaaaaagcatgagtttctgaccagcgttctggacgcgctgtccacggacatggtccacgccgcctccgacccctcctcctcgtcaggcaggctctcagaacccgaccccagccataccctagaggagcgggtggtgcactggtacttcaaactactggataaaaactccagtggagacatcggcaaaaaggaaatcaaacccttcaagaggttccttcgcaaaaaatcaaagcccaaaaaatgtgtgaagaagtttgttgaatactgtgacgtgaataatgacaaatccatctccgtacaagaactgatgggctgcctgggcgtggcgaaagaggacggcaaagcggacaccaagaaacgccacacccccagaggtcatgctgaaagtacgtctaatagacagccaaggaaacaaggataaatggctcataccccgaaggcagttcctagacacatgggaaatttccctcaccaaagagcaattaagaaaacaaaaacagaaacacatagtatttgcactttgtactttaaatgtaaattcactttgtagaaatgagctatttaaacagactgttttaatctgtgaaaatggagagctggcttcagaaaattaatcacatacaatgtatgtgtcctcttttgaccttggaaatctgtatgtggtggagaagtatttgaatgcatttaggcttaatttcttcgccttccacatgttaacagtagagctctatgcactccggctgcaatcgtatggctttctctaacccctgcagtcacttccagatgcctgtgcttacagcattgtggaatcatgttggaagctccacatgtccatggaagtttgtgatgtacggccgaccctacaggcagttaacatgcatgggctggtttgtttcttgggattttctgttagtttgtcttgttttgctttccagagatcttgctcatacaatgaatcacgcaaccactaaagctatccagttaagtgcaggtagttcccctggaggaaataatattttcaaactgtcgttggtgtgatactttggctcaaaggatctttgcttttccattttaagcttctgttttgagttttgccctggggcttgaatgagtcccagagagtcgttcggatggtgggaggctgcctaggaggcagtaaatccagtcacagtgcctgggaggggcccatccttccaaaatgtaaatccagtcgcggtgtgaccgagctggctaacaggcttgtctgcctggttttcctcctacacgtggacattattctcctgatcctcctacctggtccaccccagggctaccggaaggtaaaatcttcacctgaaccaattatgagcagtctccttactgaaggtacagccggatacgtggtgcccccggggctggtgttggcagccggggggaggtgcctgagggtccccacggttcctttctgcttttctgaatgcatcaagggtacgagaacttgccaatgggaaattcatccgagtggcactggcagagaaggataggagtggaatgcccacacagtgaccaacagaactggtctgcgtgcataaccagctgccaccctcaggcctgggccccagagctcagggcacccagtgtcttaaggaaccatttggaggacagtctgagagcaggaacttcaagctgtgattctatctcggctcagacttttggttggaaaaagatcttcatggccccaaatcccctgagacatgccttgtagaatgattttgtgatgttgtgatgcttgtggagcatcgcgtaaggcttcttgcttatttaaactgtgcaaggtaaaaatcaagcctttggagccacagaaccagctcaagtacatgccaatgttgtttaagaaacagttatgatcctaaactttttggataatcttttatatttctgacctttgaatttaatcattgttcttagattaaaataaaatatgctattgaaactata

SEQ ID NO: 185170 - DNA, 400 bp, Homo sapiens
  Payload ID: 16470
  Gene Symbol: SMOC2
  Gene Name: SPARC related modular calcium binding 2
  ENST ID: ENST00000392100
  CDS Start-End: 1-204
ggcaaaaaggaaatcaaacccttcaagaggttccttcgcaaaaaatcaaagcccaaaaaatgtgtgaagaagtttgttgaatactgtgacgtgaataatgacaaatccatctccgtacaagaactgatgggctgcctgggcgtggcgaaagaggacggcaaagcggacaccaagaaacgccacagaagtaagagaaacctgtgatggccagagcccagatgttcttaggaggcaagccaggagaagccgggtctgacttttcagctcagagacagcactcccccagaggtcatgctgaaagtacgtctaatagacagccaaggaaacaaggataaatggctcataccccgaaggcagttcctagacacatgggaaatttccctcaccaaagagcaattaa

SEQ ID NO: 185171 - DNA, 672 bp, Homo sapiens
  Payload ID: 16470
  Gene Symbol: SMOC2
  Gene Name: SPARC related modular calcium binding 2
  ENST ID: ENST00000417208
  CDS Start-End: 1-255
aaaaaatcaaagcccaaaaaatgtgtgaagaagtttgttgaatactgtgacgtgaataatgacaaatccatctccgtacaagaactgatgggctgcctgggcgtggcgaaagaggacggcaaagcggacaccaagaaacgccacacccccagaggtcatgctgaaagtacgtctaatagacaggatgcaatggtggtgtcctccagacccaaagccacaacccatcgcaagtcaagaacactttccagaagataaacatgagtgggttcatgtctctctccttcaaagccaggacaaaatccccacttctttgctgccgcgagtcaatttgtgatttattttgtctgcacctgtttgatgccaggtcgacatttcctaaggcaagcccctgtatttgttgtggatttaagtggaggcggccagcacacaccttggatgtaatttaaaaccatttcctgaggaaagatgtgtgatatgctttcctttgtttagcaaatgtttatggttttaactttaaatctcaccgcaaatcacttacacttgaaaacagggctggtctgaaagtaattaccctccctgagtgccaagacctccagaagttgttttcattcccgaatggcaatcactgtactcatgcgctccacgcatcttaaataaactcagttcaaagca

SEQ ID NO: 185172 - DNA, 1875 bp, Homo sapiens
  Payload ID: 16470
  Gene Symbol: SMOC2
  Gene Name: SPARC related modular calcium binding 2
  ENST ID: ENST00000535039
  CDS Start-End: 1036-1446
cagaacccgaccccagccataccctagaggagcgggtggtgcactggtacttcaaactactggataaaaactccagtggagacatcggcaaaaaggaaatcaaacccttcaagaggttccttcgcaaaaaatcaaagcccaaaaaatgtgtgaagaagtttgttgaatactgtgacgtgaataatgacaaatccatctccgtacaagaactgatgggctgcctgggcgtggcgaaagaggacggcaaagcggacaccaagaaacgccacacccccagaggtcatgctgaaagtacgtctaatagacagccaaggaaacaaggataaatggctcataccccgaaggcagttcctagacacatgggaaatttccctcaccaaagagcaattaagaaaacaaaaacagaaacacatagtatttgcactttgtactttaaatgtaaattcactttgtagaaatgagctatttaaacagactgttttaatctgtgaaaatggagagctggcttcagaaaattaatcacatacaatgtatgtgtcctcttttgaccttggaaatctgtatgtggtggagaagtatttgaatgcatttaggcttaatttcttcgccttccacatgttaacagtagagctctatgcactccggctgcaatcgtatggctttctctaacccctgcagtcacttccagatgcctgtgcttacagcattgtggaatcatgttggaagctccacatgtccatggaagtttgtgatgtacggccgaccctacaggcagttaacatgcatgggctggtttgtttcttgggattttctgttagtttgtcttgttttgctttccagagatcttgctcatacaatgaatcacgcaaccactaaagctatccagttaagtgcaggtagttcccctggaggaaataatattttcaaactgtcgttggtgtgatactttggctcaaaggatctttgcttttccattttaagcttctgttttgagttttgccctggggcttgaatgagtcccagagagtcgttcggatggtgggaggctgcctaggaggcagtaaatccagtcacagtgcctgggaggggcccatccttccaaaatgtaaatccagtcgcggtgtgaccgagctggctaacaggcttgtctgcctggttttcctcctacacgtggacattattctcctgatcctcctacctggtccaccccagggctaccggaaggtaaaatcttcacctgaaccaattatgagcagtctccttactgaaggtacagccggatacgtggtgcccccggggctggtgttggcagccggggggggtgccgggtccccacggttcctttctgcttttctgaatgcatcaagggtacgagaacttgccaatgggaaattcatccgagtggcactggcagagaaggataggagtggaatgcccacacagtgaccaacagaactggtctgcgtgcataaccagctgccaccctcaggcctgggccccagagctcagggcacccagtgtcttaaggaaccatttggaggacagtctgagagcaggaacttcaagctgtgattctatctcggctcagacttttggttggaaaaagatcttcatggccccaaatcccctgagacatgccttgtagaatgattttgtgatgttgtgatgcttgtggagcatcgcgtaaggcttcttgcttatttaaactgtgcaaggtaaaaatcaagcctttggagccacagaaccagctcaagtacatgccaatgttgtttaagaaacagttatgatcctaaactttttggataatcttttatatttctgacctttgaatttaatcattgttcttagattaaaataaaatatgctattgaaact

SEQ ID NO: 185173 - DNA, 4488 bp, Homo sapiens
  Payload ID: 16471
  Gene Symbol: SPOCK1
  Gene Name: sparc/osteonectin, cwcv and kazal-like domains proteoglycan (testican) 1
  ENST ID: ENST00000282223
  CDS Start-End: 1-1134
gatgattatttcagaaactggaatcccaacaagccctttgaccaagccctggacccatccaaggacccctgcctgaaggtaaaatgcagccctcacaaagtgtgtgtgacccaggactaccagaccgccctgtgtgtcagccgcaagcacctgctccccaggcaaaagaaggggaacgtggcccagaaacactgggttggaccttcgaatttggtcaagtgcaagccctgtcccgtggcacagtcagccatggtctgcggctcagatggccactcctacacatccaagtgcaaattggagttccatgcttgttctactggcaaaagcctcgccaccctctgtgatgggccctgtccctgtctcccagagcctgagccaccaaagcacaaggcagaaaggagtgcctgcacagacaaggagttgcggaaccttgcctcccggctgaaggattggtttggagctctccacgaggatgcgaacagagtcatcaagcccaccagctccaacacagcccaaggcaggtttgacactagcatcctgcccatctgcaaggactccctgggctggatgttcaacaagttggacatgaactatgacctcctgcttgacccttcagagatcaatgccatctacctggataagtacgagccctgtatcaagcctcttttcaactcgtgtgactccttcaaggatggcaagctttctaacaatgagtggtgctactgcttccagaagcctggaggtctcccttgccagaatgaaatgaacagaattcagaagctgagtaaggggaaaagcctgttgggggccttcatacctcggtgtaatgaggagggctattacaaagccacacagtgccacggcagcacggggcagtgctggtgtgtggacaaatatgggaatgagttggctggctccaggaaacagggtgctgtgagctgtgaagaggagcaggaaacctcaggggattttggcagtggtgggtccgtggtcctgctggatgacctagaatatgaacgggagctgggaccaaaggacaaagaggggaagctgagggtgcacacccgagccgtgacagaggatgatgaggatgaggatgatgacaaagaggatgaggtcgggtacatatggtagtgcccacaagaaagaggacacaagttttgcacaaaattgcaagtcacttcctattcctgcatttgtatctaagactccaaggcaccaaggtctcttctccattgttgctctctatacccgacctaaggtttggaagacaactgcttgttcccagaggattctgattttgcatatgtttgtatgggagaaagggtgttgtgttttttttttgttgttgtttattttttggatagggaagtcattggcttaattagagcctccttcctttctgtgagatttttccaacaagcatgtgatttacgtggaattctgacagtgcagggagccccaaccctcttaaatgtcaaagaccctttttgattacccacactggtggttattacagcatggttcccagccttacagtgtctaagtgcttctcttgtgtcctgtagatgttgtgaaaaagaaaaaaacaaaaaatacaccacactgtactttttccccctgcccccgttactgccggtgattattattaaaaattagtttttttcacatcattatatctggcttcctataaacaacagccttaattcagtcaagactccctttggggaattcattttattaaaaattggtgtctggatacttccctgtacatgcataaatatgcatgcatgtacagaaagactgtatgtgtgtgccttgcacacacacccatacctctcagaaaaagtgtttgggtatcttaaaaactcgaaaaacaatgataaatttctcagcttgtccagacctggaacaaaatttctggaataagaaatttgtattaaagtccttttttgcactaacagttggctcttgtagcctgcaggctgaggaagtctcttctctgtgcatcagcagagttactgaaagcctctgattgagaaaaaacctccgtctgcctaaatcacttttctcgcagaagccatgcgactcccacacgacacgggcagcttcacaagccatctctttcatttctgcttgaagccccttggctgcagcaatcctgtctgccataggtttcttccttccttacctactcaagggctttttctaaggcatgcacacatatctcctgttctctgagagtaccatggtgttccttaaaagaagaaaatttctaattctgaactcaatgttttgcttttactccctttctactgacaaatcatgataagggcacaaaagctgtacagatttttttttttaaccactcaatcccaaatggaggcctacaaagaacatcgtaataacacatggaagcaaaccctgggtttttaagagcaaattctgtccccccctcactcccccaagtgacaagatactaatgaagaaagttcttcaccatagtgtttgttttaactaaactcattggagtctagttccaaatttggtagggtcatcatctctacattccttaggatttctctccctatcaagctggcccagatacaagtaccaaacagtagtctctgaagttcccccatttccttcagtaccagtctataagctactgtccgccactgattttcatttatcagggtgtcctaatcagaatcagccacccaagcaagcctctctggcccacatatctatctcttgccttcccccatgaacttcagcctgtccacacaaaagccacataaactcaagcaagaaatatgttcagccaaaacatgattatagtggcagctgaccaatcccccatcccaaattgaccatttagatgtaccaactcaccttaaattagcatgttccaatccagtcggcattgcctgaatacagtagcatcatacctatagttggtcttagataagaaatgaactacttgatatagcaaagtcctttggcttcgtaaataaccctgaggttttgtacttactttccccataggaagacagaccataggcaaactctgttttgggatctcaactccatcacctttgtttcaatattttttttctctcttgaacaaaactgagataatttagaaaacaggtgcttaattgcaataaaattactatgaagtatattaaaaatcacgacattgtaaaatctcactttagatcatcaaagaaaaccattgttactatctcctttgagcttaggaaaatgtacaagagaacaaattaaaattgaaaaattgatttcacttagaaaaacttctaggaacagggtgaaccactgattttaatttgcctaattatcttatgacaagtatcaaattaagatgacacttaaagatccttagcattaacttaatgatggagaagagtgctcaatagacagttcccagtaaggtaatgagatgccattttcagagacattctaagaagatattttgattcattaaaacattaaataaaaagccctcctcagattggaacccccaaatcgatggagccacattaataatacttttcatgcctcactttgacatgacagcattcgatttttttaaagatctttaatactttccatgagtactaaagattgtaatgagttaccttatccttagaagtagaatgtttgctttcttcttcttggaaatagtcctccaaaaagtccacttgtaccagtgacaagaagtcacttgtatagtgaccaagtacacataaaatactgattataaaaatattgtaataaaccacttcctcatttgatacaggtattaagctgaatcctcactaattcacttttgaaaagttcttaatgaacagttttattcttattccatgaacagctcttttaatacaatttccttggtatccaacttaaatcccagaattttgttccaccatggttagttatttgccatatgaatgtattcttgtttctaccaatattctaggcatgagaataccttaatactgagttggagattttgtatctgtttctcctcctttacgcccattttcctacccacagcagcaaatgacaacgtgtctgtccaggtctgtccccctgctcatcccaggatgccactcacatttttttcttcttgttaccttgaccacgctgtacagtaacatccaagagcccattctacagtgggtggttttggtctttttataactttttctcaaagtcactgatgtttgttcctgttaaatgtatagcattgtaatgagagcccatcaaatcctgagtgtcagtttgttgtccctattgtagatgaaatagtgatgtagcaaaaacctagtaaattctgaatgcttttccacgtagacttatctggaatgtgaacacaactctttggttaatagtaaatgcttaactgtagtcctgagtaggtgcatttctgtctgtctcaataaattttactttgtctgc

SEQ ID NO: 185174 - DNA, 4846 bp, Homo sapiens
  Payload ID: 16471
  Gene Symbol: SPOCK1
  Gene Name: sparc/osteonectin, cwcv and kazal-like domains proteoglycan (testican) 1
  Uniprot ID: Q08629
  ENST ID: ENST00000394945
  CDS Start-End: 171-1490
cgagccagcgagcgagcagagcacatcgctgcgggctcacaaagcggccagacgctcggcggcggcgtgtggcaggagcgcaggggcgcgagccggcgatcagccttcccggcgaccgtgccgcgggagctcgagcaactcggactaggggacccgggccggcccccaagatgccggcgatcgcggtgttggcggcggccgccgcggcgtggtgcttcctccaagtcgagagccggcacctggacgcgctcgccggaggcgcgggccccaaccacggcaatttcctagacaatgaccagtggctgagcaccgtctcccagtacgaccgggacaagtactggaaccgctttcgagacgatgattatttcagaaactggaatcccaacaagccctttgaccaagccctggacccatccaaggacccctgcctgaaggtaaaatgcagccctcacaaagtgtgtgtgacccaggactaccagaccgccctgtgtgtcagccgcaagcacctgctccccaggcaaaagaaggggaacgtggcccagaaacactgggttggaccttcgaatttggtcaagtgcaagccctgtcccgtggcacagtcagccatggtctgcggctcagatggccactcctacacatccaagtgcaaattggagttccatgcttgttctactggcaaaagcctcgccaccctctgtgatgggccctgtccctgtctcccagagcctgagccaccaaagcacaaggcagaaaggagtgcctgcacagacaaggagttgcggaaccttgcctcccggctgaaggattggtttggagctctccacgaggatgcgaacagagtcatcaagcccaccagctccaacacagcccaaggcaggtttgacactagcatcctgcccatctgcaaggactccctgggctggatgttcaacaagttggacatgaactatgacctcctgcttgacccttcagagatcaatgccatctacctggataagtacgagccctgtatcaagcctcttttcaactcgtgtgactccttcaaggatggcaagctttctaacaatgagtggtgctactgcttccagaagcctggaggtctcccttgccagaatgaaatgaacagaattcagaagctgagtaaggggaaaagcctgttgggggccttcatacctcggtgtaatgaggagggctattacaaagccacacagtgccacggcagcacggggcagtgctggtgtgtggacaaatatgggaatgagttggctggctccaggaaacagggtgctgtgagctgtgaagaggagcaggaaacctcaggggattttggcagtggtgggtccgtggtcctgctggatgacctagaatatgaacgggagctgggaccaaaggacaaagaggggaagctgagggtgcacacccgagccgtgacagaggatgatgaggatgaggatgatgacaaagaggatgaggtcgggtacatatggtagtgcccacaagaaagaggacacaagttttgcacaaaattgcaagtcacttcctattcctgcatttgtatctaagactccaaggcaccaaggtctcttctccattgttgctctctatacccgacctaaggtttggaagacaactgcttgttcccagaggattctgattttgcatatgtttgtatgggagaaagggtgttgtgttttttttttgttgttgtttattttttggatagggaagtcattggcttaattagagcctccttcctttctgtgagatttttccaacaagcatgtgatttacgtggaattctgacagtgcagggagccccaaccctcttaaatgtcaaagaccctttttgattacccacactggtggttattacagcatggttcccagccttacagtgtctaagtgcttctcttgtgtcctgtagatgttgtgaaaaagaaaaaaacaaaaaatacaccacactgtactttttccccctgcccccgttactgccggtgattattattaaaaattagtttttttcacatcattatatctggcttcctataaacaacagccttaattcagtcaagactccctttggggaattcattttattaaaaattggtgtctggatacttccctgtacatgcataaatatgcatgcatgtacagaaagactgtatgtgtgtgccttgcacacacacccatacctctcagaaaaagtgtttgggtatcttaaaaactcgaaaaacaatgataaatttctcagcttgtccagacctggaacaaaatttctggaataagaaatttgtattaaagtccttttttgcactaacagttggctcttgtagcctgcaggctgaggaagtctcttctctgtgcatcagcagagttactgaaagcctctgattgagaaaaaacctccgtctgcctaaatcacttttctcgcagaagccatgcgactcccacacgacacgggcagcttcacaagccatctctttcatttctgcttgaagccccttggctgcagcaatcctgtctgccataggtttcttccttccttacctactcaagggctttttctaaggcatgcacacatatctcctgttctctgagagtaccatggtgttccttaaaagaagaaaatttctaattctgaactcaatgttttgcttttactccctttctactgacaaatcatgataagggcacaaaagctgtacagatttttttttttaaccactcaatcccaaatggaggcctacaaagaacatcgtaataacacatggaagcaaaccctgggtttttaagagcaaattctgtccccccctcactcccccaagtgacaagatactaatgaagaaagttcttcaccatagtgtttgttttaactaaactcattggagtctagttccaaatttggtagggtcatcatctctacattccttaggatttctctccctatcaagctggcccagatacaagtaccaaacagtagtctctgaagttcccccatttccttcagtaccagtctataagctactgtccgccactgattttcatttatcagggtgtcctaatcagaatcagccacccaagcaagcctctctggcccacatatctatctcttgccttcccccatgaacttcagcctgtccacacaaaagccacataaactcaagcaagaaatatgttcagccaaaacatgattatagtggcagctgaccaatcccccatcccaaattgaccatttagatgtaccaactcaccttaaattagcatgttccaatccagtcggcattgcctgaatacagtagcatcatacctatagttggtcttagataagaaatgaactacttgatatagcaaagtcctttggcttcgtaaataaccctgaggttttgtacttactttccccataggaagacagaccataggcaaactctgttttgggatctcaactccatcacctttgtttcaatattttttttctctcttgaacaaaactgagataatttagaaaacaggtgcttaattgcaataaaattactatgaagtatattaaaaatcacgacattgtaaaatctcactttagatcatcaaagaaaaccattgttactatctcctttgagcttaggaaaatgtacaagagaacaaattaaaattgaaaaattgatttcacttagaaaaacttctaggaacagggtgaaccactgattttaatttgcctaattatcttatgacaagtatcaaattaagatgacacttaaagatccttagcattaacttaatgatggagaagagtgctcaatagacagttcccagtaaggtaatgagatgccattttcagagacattctaagaagatattttgattcattaaaacattaaataaaaagccctcctcagattggaacccccaaatcgatggagccacattaataatacttttcatgcctcactttgacatgacagcattcgatttttttaaagatctttaatactttccatgagtactaaagattgtaatgagttaccttatccttagaagtagaatgtttgctttcttcttcttggaaatagtcctccaaaaagtccacttgtaccagtgacaagaagtcacttgtatagtgaccaagtacacataaaatactgattataaaaatattgtaataaaccacttcctcatttgatacaggtattaagctgaatcctcactaattcacttttgaaaagttcttaatgaacagttttattcttattccatgaacagctcttttaatacaatttccttggtatccaacttaaatcccagaattttgttccaccatggttagttatttgccatatgaatgtattcttgtttctaccaatattctaggcatgagaataccttaatactgagttggagattttgtatctgtttctcctcctttacgcccattttcctacccacagcagcaaatgacaacgtgtctgtccaggtctgtccccctgctcatcccaggatgccactcacatttttttcttcttgttaccttgaccacgctgtacagtaacatccaagagcccattctacagtgggtggttttggtctttttataactttttctcaaagtcactgatgtttgttcctgttaaatgtatagcattgtaatgagagcccatcaaatcctgagtgtcagtttgttgtccctattgtagatgaaatagtgatgtagcaaaaacctagtaaattctgaatgcttttccacgtagacttatctggaatgtgaacacaactctttggttaatagtaaatgcttaactgtagtcctgagtaggtgcatttctgtctgtctcaataaattttactttgtctgcaa

SEQ ID NO: 185175 - DNA, 571 bp, Homo sapiens
  Payload ID: 16471
  Gene Symbol: SPOCK1
  Gene Name: sparc/osteonectin, cwcv and kazal-like domains proteoglycan (testican) 1
  ENST ID: ENST00000510689
  CDS Start-End: 371-571
agacgctcggcggcggcgtgtggcaggagcgcaggggcgcgagccggcgatcagccttcccggcgaccgtgccgcgggagctcgagcaactcggactaggggacccgggccggcccccaaggatgattatttcagaaactggaatcccaacaagccctttgaccaagccctggacccatccaaggacccctgcctgaaggtaaaatgcagccctcacaaagtgtgtgtgacccaggactaccagaccgccctgtgtgtcagccgcaagcacctgctccccaggcaaaagaaggggaacgtggcccagaaacactgggttggaccttcgaatttggtcaagtgcaagccctgtcccgtggcacagtcagccatggtctgcggctcagatggccactcctacacatccaagtgcaaattggagttccatgcttgttctactggcaaaagcctcgccaccctctgtgatgggccctgtccctgtctcccagagcctgagccaccaaagcacaaggcagaaaggagtgcctgcacagacaaggagttgcggaaccttgcctcccggctgaaggat

SEQ ID NO: 185176 - DNA, 453 bp, Homo sapiens
  Payload ID: 16471
  Gene Symbol: SPOCK1
  Gene Name: sparc/osteonectin, cwcv and kazal-like domains proteoglycan (testican) 1
  ENST ID: ENST00000505690
  CDS Start-End: 37-453
ctcttcgctcatcgccctgcgcgccctgccccgcagatgccggcgatcgcggtgttggcggcggccgccgcggcgtggtgcttcctccaagtcgagagccggcacctggacgcgctcgccggaggcgcgggccccaaccacggcaatttcctagacaatgaccagtggctgagcaccgtctcccagtacgaccgggacaagtactggaaccgctttcgagacgatgattatttcagaaactggaatcccaacaagccctttgaccaagccctggacccatccaaggacccctgcctgaaggtaaaatgcagccctcacaaagtgtgtgtgacccaggactaccagaccgccctgtgtgtcagccgcaagcacctgctccccaggcaaaagaaggggaacgtggcccagaaacactgggttggaccttcgaatttggtcaagtgcaagccctgt

SEQ ID NO: 185177 - DNA, 5328 bp, Homo sapiens
  Payload ID: 16472
  Gene Symbol: SPOCK2
  Gene Name: sparc/osteonectin, cwcv and kazal-like domains proteoglycan (testican) 2
  Uniprot ID: Q92563
  ENST ID: ENST00000317376
  CDS Start-End: 329-1603
agttgttatacggcttttgtcttaacgaagccacccattacggtatgatgatgtcaaacgtgatgctgatgctacagttacagcccctgctggcgcagcctctctgattctctctccctctccgcgtccagtgctgggctttttcagacaagtgcatctcctaaccaggtcacatttcagccgcgacccactctccgccagtcaccggaggcagaccgcgggaggagagctgaggacagccgcgtgcgcttcgccagcagcggggtgggaggaaggacattaaaatactgcagaagtcaagacccccccaggtcgaacccagaccacgatgcgcgccccgggctgcgggcggctggtgctgccgctgctgctcctggccgcggcagccctggccgaaggcgacgccaaggggctcaaggagggcgagacccccggcaatttcatggaggacgagcaatggctgtcgtccatctcgcagtacagcggcaagatcaagcactggaaccgcttccgagacgaagtggaggatgactatatcaagagctgggaggacaatcagcaaggagatgaagccctggataccaccaaggacccctgccagaaggtgaagtgcagccgccacaaggtgtgcattgcccagggctaccagcgggccatgtgcatcagtcgcaagaagctggagcacaggatcaagcagccgaccgtgaaactccatggaaacaaagactccatctgcaagccctgccacatggcccagcttgcctctgtctgcggctcagatggccacacttacagctctgtgtgtaagctggagcaacaggcgtgcctgagcagcaagcagctggcggtgcgatgcgagggcccctgcccctgccccacggagcaggctgccacctccaccgccgatggcaaaccagagacttgcaccggtcaggacctggctgacctgggagatcggctgcgggactggttccagctccttcatgagaactccaagcagaatggctcagccagcagtgtagccggcccggccagcgggctggacaagagcctgggggccagctgcaaggactccattggctggatgttctccaagctggacaccagtgctgacctcttcctggaccagacggagctggccgccatcaacctggacaagtacgaggtctgcatccgtcccttcttcaactcctgtgacacctacaaggatggccgggtctctactgctgagtggtgcttctgcttctggagggagaagcccccctgcctggcagagctggagcgcatccagatccaggaggccgccaagaagaagccaggcatcttcatcccgagctgcgacgaggatggctactaccggaagatgcagtgtgaccagagcagcggtgactgctggtgtgtggaccagctgggcctggagctgactggcacgcgcacgcatgggagccccgactgcgatgacatcgtgggcttctcgggggactttggaagcggtgtcggctgggaggatgaggaggagaaggagacggaggaagcaggcgaggaggccgaggaggaggagggcgaggcaggcgaggctgacgacgggggctacatctggtagacgccctcaggagccggctgccgggggggactcaacagcagagctctgagcagcagcaggcaacttcgagaacggatccagaaatgcagtcagaaggaccctgctccacctggggggactgggagtgtgagtgtgcatggcatgtgtgtggcacagatggctgggacgggtgacagtgtgagtgcatgtgtgcatgcatgtgtgtatgtgtgtgtgtgtgtggcatgcgctgacaaatgtgtccttgatccacactgctcctggcagagtgagtcacccaaaggccccttcggcctccttgtagctgttttctttccttttgttgttggttttaaaatacattcacacacaaatacaaattgacaggtcaaaatccatgaaatgagatcccccagccgtgtcctccagcccagccctgaccccttggtttctaccctggctccccttggtttctaccctggctcaaccgacccctgtctgcccttctccctcttgcttctgaggtcaagctctggcctgcgagcctgtccccattgcaaaggggagggaggggcagggagctgtctaccagctgaggtcctcccaaaactgggccgatgtggtgtgacatccccaccagcctcagatgagacgggccaggacgcccagccacagcaagccctgtccctttgccggatccccaaacactagagaagctctcctaacccaaggcggagaatgaaggtggtggcggcagaggaggagggcagcagctgagaggccagggacagggtgcctcgccaagctgtctgaggtctgtcccaggtggcccaggtggtgcaggtagaacagggtgaggagagggggtcggctcagcaggaggaggctgtggctgcagagcctgggggagcttttaggtgttgagatggggcagctctgaatcctagaccctggaatagcctgtcccttttctctgggtctcgtggtggagccatgatctgggctgctctcttggggacactgggtggtggttacacagttgacctctgcctggctcccccttggtgcaactcctgcctccatcccccttgctggggtcccctcatccacttgagggcgcctgagggccaggagcagcaggcaaggagcctgggtctaggctaagggggtgtgtgcccacctcctccctgacccttaacactcctgtcctgcccagaccaacagagagagctgtccctgagaccccggagagaagcagctgccgaaagctgcagcctttccgcactctgagaccatgatcttcctcctgccaggggagagccacccacaggccatgtccagccccacttccctcagcccccagggcttccttctggcccctctgaggattccctagggctgccccgcagaggggcttccccaagctctgttttgaagcctgcaatgtggaaaagtgagaagtcagagggaacaggacaggtgcagccgggctctgaggccacacctcacacctcgctgttccccaacatcccctgagcagtgtgagctcatctcaccagatgagaagaggccctgtgcatttcttttgtttgtttgttgctgttttcccccacccatccagttctcctcagcaaagcaaattccttaacacctttggtggagaatttcttacccagacttggggctgtgatgcccttcagtgcgtggtgagtgcagcgtgtgtgcgtgtgcctgtgtgtgaacctgggggccatcctggtggcctgggagcgtgaggagaggccccctgtgtgctgggtgagtggtgggtgtggggtcaatgcagtgaggctctctgggtgaggctcccaacctggcagtccccagcctcccagcatctgtgagcgtctgttggactttacagaagagcctcatcctgtctgcccctcactctgccctggaatcaacatcttccgagtccttcttgggggaaatagcagagccccacttaactccataaactgcttcccattccgcagcccagttctgattgttgaggtgtcgcgtcgttccaggtcccccagtcccctctttctcctgtcctctctctgtccttcacctccccactccagccccggctcagttcagggaaatgctgttccacatcagccctctgctctctgaggcagccgcgcctctgactcggagctacttgaaacttctgctcttgctaggattggagtctacctatctcttccatttgtcccagctggagttctggaactttcctcctcggggtgggggtgggggttgttaaggatgctggggggcctggggaaggaaggagttcagaggaagggtgtcccctgtcctcttgatgtcaccctccgctcctgggacacgtgctctctctgtctctgggtcttctggctgtgcacgtttgtgtgtccttgtaaatatgttttaggaagaaagcaaaagggactgaactagcctctggtaggattgcaggggtccagccttgcctgtttccgaagcccccacactgcctttcgccctactgagactggtcccctcaaaaggtagacaaaacagcagctccctgtggagctgaagggcggcctcaaagtggctttttgttagacaaggttaaggtttcctcatgagcaaggttgcagatcggtccttcctcagctccttgatttgtgaccttgaccaaggggcctgccacccagcccctccagtgccctctcctcgatgcctcgctccttcctgcccccactcccctggcttaggcaggtaggggaattagggccatgctggaagaagcttaaccatgtgttcaaagaacggtttcttgcttgcttggtcctggaactccccttggctgccccaggcctccttggcccatgggtgctgggggaggtggatgtcagatctggtaggttgcagcagagaaaataaatgtgccttgagagaccactcagagagggtccaagggtgatggagaaggaagcatggcctgggagcttggaagggaggggtggtgggtggcggcatcttgactgccccctgttgtcccacacgtggggggtggtcaccccccttcactccagcccgcctgccttcagccttccatgagcttcacctgcttccaacttcactttggagggggtggggtccgttggcatcaacacggggaccctctgcttcaccaaagcccgagccctcagcccctggggagaacaaatggctgagctttgatacctggggtcgtcgagaggctgcgggctggcggcagtcccaggggagagacaccacagaaggagacccagacatcccgaggaagttcccagcagagcaaactgctttccagcctgaagcctgcttaaactgtgtgatgtgcaataactgagcttagagttaggaattgtgttcaagtgcttggatttccgtctgtagatttaactgctgaaattgtatctctcagtaattttagatgtcttttaaaaaattgaaaaacaaagtgttagactgtgtgcgtgtgcgttgatgggcactcaagagtcccgtgagtcatccagccctgcctttcccctgcgcccccatcctctcacgtcccgccccgcctccacttggggaccctgcctcgtgtcgtctttatctgcctattactcagcctaaggaaacaagtacactccacacatgcataaaggaaatcaaatgttatttttaagaaaatggaaaataaaaactttataaacacc

SEQ ID NO: 185178 - DNA, 5445 bp, Homo sapiens
  Payload ID: 16472
  Gene Symbol: SPOCK2
  Gene Name: sparc/osteonectin, cwcv and kazal-like domains proteoglycan (testican) 2
  Uniprot ID: Q92563
  ENST ID: ENST00000373109
  CDS Start-End: 446-1720
cagggacatttcgggattctggatttcttggtctgcaactccctgtgtgccaggcggggctgggccccgctgcggctggctggcgtttggcgctctcatcgagggagcgcttcgctttgaaatctacccactccttttttttttttttttttaaaccaggtatgatgatgtcaaacgtgatgctgatgctacagttacagcccctgctggcgcagcctctctgattctctctccctctccgcgtccagtgctgggctttttcagacaagtgcatctcctaaccaggtcacatttcagccgcgacccactctccgccagtcaccggaggcagaccgcgggaggagagctgaggacagccgcgtgcgcttcgccagcagcggggtgggaggaaggacattaaaatactgcagaagtcaagacccccccaggtcgaacccagaccacgatgcgcgccccgggctgcgggcggctggtgctgccgctgctgctcctggccgcggcagccctggccgaaggcgacgccaaggggctcaaggagggcgagacccccggcaatttcatggaggacgagcaatggctgtcgtccatctcgcagtacagcggcaagatcaagcactggaaccgcttccgagacgaagtggaggatgactatatcaagagctgggaggacaatcagcaaggagatgaagccctggataccaccaaggacccctgccagaaggtgaagtgcagccgccacaaggtgtgcattgcccagggctaccagcgggccatgtgcatcagtcgcaagaagctggagcacaggatcaagcagccgaccgtgaaactccatggaaacaaagactccatctgcaagccctgccacatggcccagcttgcctctgtctgcggctcagatggccacacttacagctctgtgtgtaagctggagcaacaggcgtgcctgagcagcaagcagctggcggtgcgatgcgagggcccctgcccctgccccacggagcaggctgccacctccaccgccgatggcaaaccagagacttgcaccggtcaggacctggctgacctgggagatcggctgcgggactggttccagctccttcatgagaactccaagcagaatggctcagccagcagtgtagccggcccggccagcgggctggacaagagcctgggggccagctgcaaggactccattggctggatgttctccaagctggacaccagtgctgacctcttcctggaccagacggagctggccgccatcaacctggacaagtacgaggtctgcatccgtcccttcttcaactcctgtgacacctacaaggatggccgggtctctactgctgagtggtgcttctgcttctggagggagaagcccccctgcctggcagagctggagcgcatccagatccaggaggccgccaagaagaagccaggcatcttcatcccgagctgcgacgaggatggctactaccggaagatgcagtgtgaccagagcagcggtgactgctggtgtgtggaccagctgggcctggagctgactggcacgcgcacgcatgggagccccgactgcgatgacatcgtgggcttctcgggggactttggaagcggtgtcggctgggaggatgaggaggagaaggagacggaggaagcaggcgaggaggccgaggaggaggagggcgaggcaggcgaggctgacgacgggggctacatctggtagacgccctcaggagccggctgccgggggggactcaacagcagagctctgagcagcagcaggcaacttcgagaacggatccagaaatgcagtcagaaggaccctgctccacctggggggactgggagtgtgagtgtgcatggcatgtgtgtggcacagatggctgggacgggtgacagtgtgagtgcatgtgtgcatgcatgtgtgtatgtgtgtgtgtgtgtggcatgcgctgacaaatgtgtccttgatccacactgctcctggcagagtgagtcacccaaaggccccttcggcctccttgtagctgttttctttccttttgttgttggttttaaaatacattcacacacaaatacaaattgacaggtcaaaatccatgaaatgagatcccccagccgtgtcctccagcccagccctgaccccttggtttctaccctggctccccttggtttctaccctggctcaaccgacccctgtctgcccttctccctcttgcttctgaggtcaagctctggcctgcgagcctgtccccattgcaaaggggagggaggggcagggagctgtctaccagctgaggtcctcccaaaactgggccgatgtggtgtgacatccccaccagcctcagatgagacgggccaggacgcccagccacagcaagccctgtccctttgccggatccccaaacactagagaagctctcctaacccaaggcggagaatgaaggtggtggcggcagaggaggagggcagcagctgagaggccagggacagggtgcctcgccaagctgtctgaggtctgtcccaggtggcccaggtggtgcaggtagaacagggtgaggagagggggtcggctcagcaggaggaggctgtggctgcagagcctgggggagcttttaggtgttgagatggggcagctctgaatcctagaccctggaatagcctgtcccttttctctgggtctcgtggtggagccatgatctgggctgctctcttggggacactgggtggtggttacacagttgacctctgcctggctcccccttggtgcaactcctgcctccatcccccttgctggggtcccctcatccacttgagggcgcctgagggccaggagcagcaggcaaggagcctgggtctaggctaagggggtgtgtgcccacctcctccctgacccttaacactcctgtcctgcccagaccaacagagagagctgtccctgagaccccggagagaagcagctgccgaaagctgcagcctttccgcactctgagaccatgatcttcctcctgccaggggagagccacccacaggccatgtccagccccacttccctcagcccccagggcttccttctggcccctctgaggattccctagggctgccccgcagaggggcttccccaagctctgttttgaagcctgcaatgtggaaaagtgagaagtcagagggaacaggacaggtgcagccgggctctgaggccacacctcacacctcgctgttccccaacatcccctgagcagtgtgagctcatctcaccagatgagaagaggccctgtgcatttcttttgtttgtttgttgctgttttcccccacccatccagttctcctcagcaaagcaaattccttaacacctttggtggagaatttcttacccagacttggggctgtgatgcccttcagtgcgtggtgagtgcagcgtgtgtgcgtgtgcctgtgtgtgaacctgggggccatcctggtggcctgggagcgtgaggagaggccccctgtgtgctgggtgagtggtgggtgtggggtcaatgcagtgaggctctctgggtgaggctcccaacctggcagtccccagcctcccagcatctgtgagcgtctgttggactttacagaagagcctcatcctgtctgcccctcactctgccctggaatcaacatcttccgagtccttcttgggggaaatagcagagccccacttaactccataaactgcttcccattccgcagcccagttctgattgttgaggtgtcgcgtcgttccaggtcccccagtcccctctttctcctgtcctctctctgtccttcacctccccactccagccccggctcagttcagggaaatgctgttccacatcagccctctgctctctgaggcagccgcgcctctgactcggagctacttgaaacttctgctcttgctaggattggagtctacctatctcttccatttgtcccagctggagttctggaactttcctcctcggggtgggggtgggggttgttaaggatgctggggggcctggggaaggaaggagttcagaggaagggtgtcccctgtcctcttgatgtcaccctccgctcctgggacacgtgctctctctgtctctgggtcttctggctgtgcacgtttgtgtgtccttgtaaatatgttttaggaagaaagcaaaagggactgaactagcctctggtaggattgcaggggtccagccttgcctgtttccgaagcccccacactgcctttcgccctactgagactggtcccctcaaaaggtagacaaaacagcagctccctgtggagctgaagggcggcctcaaagtggctttttgttagacaaggttaaggtttcctcatgagcaaggttgcagatcggtccttcctcagctccttgatttgtgaccttgaccaaggggcctgccacccagcccctccagtgccctctcctcgatgcctcgctccttcctgcccccactcccctggcttaggcaggtaggggaattagggccatgctggaagaagcttaaccatgtgttcaaagaacggtttcttgcttgcttggtcctggaactccccttggctgccccaggcctccttggcccatgggtgctgggggaggtggatgtcagatctggtaggttgcagcagagaaaataaatgtgccttgagagaccactcagagagggtccaagggtgatggagaaggaagcatggcctgggagcttggaagggaggggtggtgggtggcggcatcttgactgccccctgttgtcccacacgtggggggtggtcaccccccttcactccagcccgcctgccttcagccttccatgagcttcacctgcttccaacttcactttggagggggtggggtccgttggcatcaacacggggaccctctgcttcaccaaagcccgagccctcagcccctggggagaacaaatggctgagctttgatacctggggtcgtcgagaggctgcgggctggcggcagtcccaggggagagacaccacagaaggagacccagacatcccgaggaagttcccagcagagcaaactgctttccagcctgaagcctgcttaaactgtgtgatgtgcaataactgagcttagagttaggaattgtgttcaagtgcttggatttccgtctgtagatttaactgctgaaattgtatctctcagtaattttagatgtcttttaaaaaattgaaaaacaaagtgttagactgtgtgcgtgtgcgttgatgggcactcaagagtcccgtgagtcatccagccctgcctttcccctgcgcccccatcctctcacgtcccgccccgcctccacttggggaccctgcctcgtgtcgtctttatctgcctattactcagcctaaggaaacaagtacactccacacatgcataaaggaaatcaaatgttatttttaagaaaatggaaaataaaaactttataaacacc

SEQ ID NO: 185179 - DNA, 1284 bp, Homo sapiens
  Payload ID: 16472
  Gene Symbol: SPOCK2
  Gene Name: sparc/osteonectin, cwcv and kazal-like domains proteoglycan (testican) 2
  Uniprot ID: Q92563
  ENST ID: ENST00000412663
  CDS Start-End: 329-562
agttgttatacggcttttgtcttaacgaagccacccattacggtatgatgatgtcaaacgtgatgctgatgctacagttacagcccctgctggcgcagcctctctgattctctctccctctccgcgtccagtgctgggctttttcagacaagtgcatctcctaaccaggtcacatttcagccgcgacccactctccgccagtcaccggaggcagaccgcgggaggagagctgaggacagccgcgtgcgcttcgccagcagcggggtgggaggaaggacattaaaatactgcagaagtcaagacccccccaggtcgaacccagaccacgatgcgcgccccgggctgcgggcggctggtgctgccgctgctgctcctggccgcggcagccctggccgaaggcgacgccaaggggctcaaggagggcgagacccccggcaatttcatggaggacgagcaatggctgtcgtccatctcgcagtacagcggcaagatcaagcactggaaccgcttccgagacgttccctcgtccgacccacccagtacaacgcaggccacaccatgacctctcccgttttctccttaaactgcgtgcatccacaagttccttggaaatttgtttaaaacacacatgcttcataggctatccagccaagtgatgggaagaggcagagatttggatctttttgttaccgtcagacaagtgactgtttctccccaaagtcaaactggcaggttgtaattcacagaggacagcaggaaccacgggcagccaggtctccaggctgagtggccgggccccgcgatgggctgctgatctccgccttcgccccacatgcgacctgtccagccgcaggagcctggagccccgcgaggccttcccgaagcacctgcaggcccagcgcagatgagccgcagtctcctgccgcttcctgggcagcagcccggccacagcagcgagggggcggcagcaggccggcccatccggaatccatgtgtcactggcctaggcctccctccgactcgctggctgtttgatctgccaaaatgggaccagtgaaggtcagagggaaaagaaatgcttaatcagaacaggaaaggtttaaaataaaagattcctccccacctcccttcttccacctgcttccaatagccagctccgtgggtgagaataaatgacttactgcttgaccccatggcactgggctacccacctgtctctctgtattggtgccaaccacttcccccttcctctcatgctcatcagaagaaaggcactagatttga

SEQ ID NO: 185180 - DNA, 1824 bp, Homo sapiens
  Payload ID: 16472
  Gene Symbol: SPOCK2
  Gene Name: sparc/osteonectin, cwcv and kazal-like domains proteoglycan (testican) 2
  ENST ID: ENST00000536168
  CDS Start-End: 199-1470
gtgctgggctttttcagacaagtgcatctcctaaccaggtcacatttcagccgcgacccactctccgccagtcaccggaggcagaccgcgggaggagagctgaggacagccgcgtgcgcttcgccagcagcggggtgggaggaaggacattaaaatactgcagaagtcaagacccccccaggtcgaacccagaccacgatgcgcgccccgggctgcgggcggctggtgctgccgctgctgctcctggccgcggcagccctggccgaaggcgacgccaaggggctcaaggagggcgagacccccggcaatttcatggaggacgagcaatggctgtcgtccatctcgcagtacagcggcaagatcaagcactggaaccgcttccgagacgtgaaggatgactatatcaagagctgggaggacaatcagcaaggagatgaagccctggataccaccaaggacccctgccagaaggtgaagtgcagccgccacaaggtgtgcattgcccagggctaccagcgggccatgtgcatcagtcgcaagaagctggagcacaggatcaagcagccgaccgtgaaactccatggaaacaaagactccatctgcaagccctgccacatggcccagcttgcctctgtctgcggctcagatggccacacttacagctctgtgtgtaagctggagcaacaggcgtgcctgagcagcaagcagctggcggtgcgatgcgagggcccctgcccctgccccacggagcaggctgccacctccaccgccgatggcaaaccagagacttgcaccggtcaggacctggctgacctgggagatcggctgcgggactggttccagctccttcatgagaactccaagcagaatggctcagccagcagtgtagccggcccggccagcgggctggacaagagcctgggggccagctgcaaggactccattggctggatgttctccaagctggacaccagtgctgacctcttcctggaccagacggagctggccgccatcaacctggacaagtacgaggtctgcatccgtcccttcttcaactcctgtgacacctacaaggatggccgggtctctactgctgagtggtgcttctgcttctggagggagaagcccccctgcctggcagagctggagcgcatccagatccaggaggccgccaagaagaagccaggcatcttcatcccgagctgcgacgaggatggctactaccggaagatgcagtgtgaccagagcagcggtgactgctggtgtgtggaccagctgggcctggagctgactggcacgcgcacgcatgggagccccgactgcgatgacatcgtgggcttctcgggggactttggaagcggtgtcggctgggaggatgaggaggagaaggagacggaggaagcaggcgaggaggccgaggaggaggagggcgaggcaggcgaggctgacgacgggggctacatctggtagacgccctcaggagccggctgccgggggggactcaacagcagagctctgagcagcagcaggcaacttcgagaacggatccagaaatgcagtcagaaggaccctgctccacctggggggactgggagtgtgagtgtgcatggcatgtgtgtggcacagatggctgggacgggtgacagtgtgagtgcatgtgtgcatgcatgtgtgtatgtgtgtgtgtgtgtggcatgcgctgacaaatgtgtccttgatccacactgctcctggcagagtgagtcacccaaaggccccttcggcctccttgtagctgttttctttccttttgttgttggttttaaaatacattcacacacaaat

SEQ ID NO: 185181 - DNA, 2986 bp, Homo sapiens
  Payload ID: 16473
  Gene Symbol: SPOCK3
  Gene Name: sparc/osteonectin, cwcv and kazal-like domains proteoglycan (testican) 3
  Uniprot ID: Q9BQ16
  ENST ID: ENST00000357154
  CDS Start-End: 139-1449
gggagcgcgccgggcgcagggagctgagtggacggctcgagacggcggcgcgtgcagcagctccagaaagcagcgagttggcagagcagggctgcatttccagcaggagctgcgagcacagtgctggctcacaacaagatgctcaaggtgtcagccgtactgtgtgtgtgtgcagccgcttggtgcagtcagtctctcgcagctgccgcggcggtggctgcagccggggggcggtcggacggcggtaattttctggatgataaacaatggctcaccacaatctctcagtatgacaaggaagtcggacagtggaacaaattccgagacgaagtagaggatgattatttccgcacttggagtccaggaaaacccttcgatcaggctttagatccagctaaggatccatgcttaaagatgaaatgtagtcgccataaagtatgcattgctcaagattctcagactgcagtctgcattagtcaccggaggcttacacacaggatgaaagaagcaggagtagaccataggcagtggaggggtcccatattatccacctgcaagcagtgcccagtggtctatcccagccctgtttgtggttcagatggtcatacctactcttttcagtgcaaactagaatatcaggcatgtgtcttaggaaaacagatctcagtcaaatgtgaaggacattgcccatgtccttcagataagcccaccagtacaagcagaaatgttaagagagcatgcagtgacctggagttcagggaagtggcaaacagattgcgggactggttcaaggcccttcatgaaagtggaagtcaaaacaagaagacaaaaacattgctgaggcctgagagaagcagattcgataccagcatcttgccaatttgcaaggactcacttggctggatgtttaacagacttgatacaaactatgacctgctattggaccagtcagagctcagaagcatttaccttgataagaatgaacagtgtaccaaggcattcttcaattcttgtgacacatacaaggacagtttaatatctaataatgagtggtgctactgcttccagagacagcaagacccaccttgccagactgagctcagcaatattcagaagcggcaaggggtaaagaagctcctaggacagtatatccccctgtgtgatgaagatggttactacaagccaacacaatgtcatggcagtgttggacagtgctggtgtgttgacagatatggaaatgaagtcatgggatccagaataaatggtgttgcagattgtgctatagattttgagatctccggagattttgctagtggcgattttcatgaatggactgatgatgaggatgatgaagacgatattatgaatgatgaagatgaaattgaagatgatgatgaagatgaaggggatgatgatgatggtggtgatgaccatgatgtatacatttgattgatgacagttgaaatcaataaattctacatttctaatatttacaaaaatgatagcctatttaaaattatcttcttccccaataacaaaatgattctaaacctcacatatattttgtataattatttgaaaaattgcagctaaagttatagaactttatgtttaaataagaatcatttgctttgagtttttatattccttacacaaaaagaaaatacatatgcagtctagtcagacaaaataaagttttgaagtgctactataataagtttttcacgagaacaaactttgtaaatcttccataagcaaaatgacagctagtgcttgggatcgtacatgttaattttctgaaagataattctaagtgaaatttaaaataaataaatttttaatgacctgggtcttaaggatttaggaaaaatatgcatgctttaattgcatttccaaagtagcatcttgctagacctagttgagtcaggataacagagagataccacatggcaagaaaaacaaagtgacaattgtagagtcctcaattgtgtttacattaatagtggtgtttttacctatgaaattattctggatctaataggacattttacaaaatggcaagtatggaaaaccatggattctgaaagttaaaaatttagttgttctccccaatgtgtattttaatttggatggcagtctcatgcagattttttaaaagattctttaataacatgatttgtttgcctttctagatttctttatctttctgaccagcaacttagggagcagaatttaaattaggaagacaaagggaaagattcatttaaaccatatttttacaaagtttgtcatttgccccaaggtcaaattttaaattcttaattttcattttatttcccattttaggtaaaagtttgcatttaatcttagaattatgttatttttgttagtagtgtggaaacttagagaacttattgtatggtgccttgcaaaaatagagatagaaagattttagcatgcataccaatatagtatattacgcaatatataagcacacctaattaacagattaatatcagtaaaggtattgctgctggaatgaagaaaatgggatacgtttgtttctttttttctattgttacataattgccatgtggacttgtttatgattattgtgtagagtagcatttaagatttaactgtagcaaaaattactttaaccgctgtatttaagttagcatgttaattaattgtgtagacattttggcacaccatcacttttaactatatcataccaatggttttgtgcccataataaaaatggaaaaacctgttgaatgttacgtattggtatctttaatttcaacagtgggtaaactggtttcccagtatacaattcattgaaagcaaaattgattaattatttccatttaatttatacacactcaatacaaaatttaatgttgactttacgtaataaagtataatgcattttcttttttactgtttatgtatagtttacaaaataaagaatcttgtaaccaaa

SEQ ID NO: 185182 - DNA, 2936 bp, Homo sapiens
  Payload ID: 16473
  Gene Symbol: SPOCK3
  Gene Name: sparc/osteonectin, cwcv and kazal-like domains proteoglycan (testican) 3
  Uniprot ID: Q9BQ16
  ENST ID: ENST00000357545
  CDS Start-End: 101-1402
gagacggcggcgcgtgcagcagctccagaaagcagcgagttggcagagcagggctgcatttccagcaggagctgcgagcacagtgctggctcacaacaagatgctcaaggtgtcagccgtactgtgtgtgtgtgcagccgcttggtgcagtcagtctctcgcagctgccgcggcggtggctgcagccggggggcggtcggacggcggtaattttctggatgataaacaatggctcaccacaatctctcagtatgacaaggaagtcggacagtggaacaaattccgagacgatgattatttccgcacttggagtccaggaaaacccttcgatcaggctttagatccagctaaggatccatgcttaaagatgaaatgtagtcgccataaagtatgcattgctcaagattctcagactgcagtctgcattagtcaccggaggcttacacacaggatgaaagaagcaggagtagaccataggcagtggaggggtcccatattatccacctgcaagcagtgcccagtggtctatcccagccctgtttgtggttcagatggtcatacctactcttttcagtgcaaactagaatatcaggcatgtgtcttaggaaaacagatctcagtcaaatgtgaaggacattgcccatgtccttcagataagcccaccagtacaagcagaaatgttaagagagcatgcagtgacctggagttcagggaagtggcaaacagattgcgggactggttcaaggcccttcatgaaagtggaagtcaaaacaagaagacaaaaacattgctgaggcctgagagaagcagattcgataccagcatcttgccaatttgcaaggactcacttggctggatgtttaacagacttgatacaaactatgacctgctattggaccagtcagagctcagaagcatttaccttgataagaatgaacagtgtaccaaggcattcttcaattcttgtgacacatacaaggacagtttaatatctaataatgagtggtgctactgcttccagagacagcaagacccaccttgccagactgagctcagcaatattcagaagcggcaaggggtaaagaagctcctaggacagtatatccccctgtgtgatgaagatggttactacaagccaacacaatgtcatggcagtgttggacagtgctggtgtgttgacagatatggaaatgaagtcatgggatccagaataaatggtgttgcagattgtgctatagattttgagatctccggagattttgctagtggcgattttcatgaatggactgatgatgaggatgatgaagacgatattatgaatgatgaagatgaaattgaagatgatgatgaagatgaaggggatgatgatgatggtggtgatgaccatgatgtatacatttgattgatgacagttgaaatcaataaattctacatttctaatatttacaaaaatgatagcctatttaaaattatcttcttccccaataacaaaatgattctaaacctcacatatattttgtataattatttgaaaaattgcagctaaagttatagaactttatgtttaaataagaatcatttgctttgagtttttatattccttacacaaaaagaaaatacatatgcagtctagtcagacaaaataaagttttgaagtgctactataataagtttttcacgagaacaaactttgtaaatcttccataagcaaaatgacagctagtgcttgggatcgtacatgttaattttctgaaagataattctaagtgaaatttaaaataaataaatttttaatgacctgggtcttaaggatttaggaaaaatatgcatgctttaattgcatttccaaagtagcatcttgctagacctagttgagtcaggataacagagagataccacatggcaagaaaaacaaagtgacaattgtagagtcctcaattgtgtttacattaatagtggtgtttttacctatgaaattattctggatctaataggacattttacaaaatggcaagtatggaaaaccatggattctgaaagttaaaaatttagttgttctccccaatgtgtattttaatttggatggcagtctcatgcagattttttaaaagattctttaataacatgatttgtttgcctttctagatttctttatctttctgaccagcaacttagggagcagaatttaaattaggaagacaaagggaaagattcatttaaaccatatttttacaaagtttgtcatttgccccaaggtcaaattttaaattcttaattttcattttatttcccattttaggtaaaagtttgcatttaatcttagaattatgttatttttgttagtagtgtggaaacttagagaacttattgtatggtgccttgcaaaaatagagatagaaagattttagcatgcataccaatatagtatattacgcaatatataagcacacctaattaacagattaatatcagtaaaggtattgctgctggaatgaagaaaatgggatacgtttgtttctttttttctattgttacataattgccatgtggacttgtttatgattattgtgtagagtagcatttaagatttaactgtagcaaaaattactttaaccgctgtatttaagttagcatgttaattaattgtgtagacattttggcacaccatcacttttaactatatcataccaatggttttgtgcccataataaaaatggaaaaacctgttgaatgttacgtattggtatctttaatttcaacagtgggtaaactggtttcccagtatacaattcattgaaagcaaaattgattaattatttccatttaatttatacacactcaatacaaaatttaatgttgactttacgtaataaagtataatgcattttcttttttactgtttatgtatagtttacaaaataaagaatcttgtaacc

SEQ ID NO: 185183 - DNA, 3061 bp, Homo sapiens
  Payload ID: 16473
  Gene Symbol: SPOCK3
  Gene Name: sparc/osteonectin, cwcv and kazal-like domains proteoglycan (testican) 3
  Uniprot ID: Q9BQ16
  ENST ID: ENST00000421836
  CDS Start-End: 367-1524
ggggggagcgcgccgggcgcagggagctgagtggacggctcgagacggcggcgcgtgcagcagctccagaaagcagcgagttggcagagcagggctgcatttccagcaggagctgcgagcacagtgctggctcacaacaagatgctcaaggtgtcagccgtactgtgtgtgtgtgcagccgcttggtgcagtcagtctctcgcagctgccgcggcggtggctgcagccggggggcggtcggacggcggtaattttctggatgataaacaatggctcaccacaatctctcagtatgacaaggaagtcggacagtggaacaaattccgagactaagaagaaaaacgattatttgacaggacagtagtgatgatcacacaagatcacatccacatgtcttctgggctcagtcaggatgattatttccgcacttggagtccaggaaaacccttcgatcaggctttagatccagctaaggatccatgcttaaagatgaaatgtagtcgccataaagtatgcattgctcaagattctcagactgcagtctgcattagtcaccggaggcttacacacaggatgaaagaagcaggagtagaccataggcagtggaggggtcccatattatccacctgcaagcagtgcccagtggtctatcccagccctgtttgtggttcagatggtcatacctactcttttcagtgcaaactagaatatcaggcatgtgtcttaggaaaacagatctcagtcaaatgtgaaggacattgcccatgtccttcagataagcccaccagtacaagcagaaatgttaagagagcatgcagtgacctggagttcagggaagtggcaaacagattgcgggactggttcaaggcccttcatgaaagtggaagtcaaaacaagaagacaaaaacattgctgaggcctgagagaagcagattcgataccagcatcttgccaatttgcaaggactcacttggctggatgtttaacagacttgatacaaactatgacctgctattggaccagtcagagctcagaagcatttaccttgataagaatgaacagtgtaccaaggcattcttcaattcttgtgacacatacaaggacagtttaatatctaataatgagtggtgctactgcttccagagacagcaagacccaccttgccagactgagctcagcaatattcagaagcggcaaggggtaaagaagctcctaggacagtatatccccctgtgtgatgaagatggttactacaagccaacacaatgtcatggcagtgttggacagtgctggtgtgttgacagatatggaaatgaagtcatgggatccagaataaatggtgttgcagattgtgctatagattttgagatctccggagattttgctagtggcgattttcatgaatggactgatgatgaggatgatgaagacgatattatgaatgatgaagatgaaattgaagatgatgatgaagatgaaggggatgatgatgatggtggtgatgaccatgatgtatacatttgattgatgacagttgaaatcaataaattctacatttctaatatttacaaaaatgatagcctatttaaaattatcttcttccccaataacaaaatgattctaaacctcacatatattttgtataattatttgaaaaattgcagctaaagttatagaactttatgtttaaataagaatcatttgctttgagtttttatattccttacacaaaaagaaaatacatatgcagtctagtcagacaaaataaagttttgaagtgctactataataagtttttcacgagaacaaactttgtaaatcttccataagcaaaatgacagctagtgcttgggatcgtacatgttaattttctgaaagataattctaagtgaaatttaaaataaataaatttttaatgacctgggtcttaaggatttaggaaaaatatgcatgctttaattgcatttccaaagtagcatcttgctagacctagttgagtcaggataacagagagataccacatggcaagaaaaacaaagtgacaattgtagagtcctcaattgtgtttacattaatagtggtgtttttacctatgaaattattctggatctaataggacattttacaaaatggcaagtatggaaaaccatggattctgaaagttaaaaatttagttgttctccccaatgtgtattttaatttggatggcagtctcatgcagattttttaaaagattctttaataacatgatttgtttgcctttctagatttctttatctttctgaccagcaacttagggagcagaatttaaattaggaagacaaagggaaagattcatttaaaccatatttttacaaagtttgtcatttgccccaaggtcaaattttaaattcttaattttcattttatttcccattttaggtaaaagtttgcatttaatcttagaattatgttatttttgttagtagtgtggaaacttagagaacttattgtatggtgccttgcaaaaatagagatagaaagattttagcatgcataccaatatagtatattacgcaatatataagcacacctaattaacagattaatatcagtaaaggtattgctgctggaatgaagaaaatgggatacgtttgtttctttttttctattgttacataattgccatgtggacttgtttatgattattgtgtagagtagcatttaagatttaactgtagcaaaaattactttaaccgctgtatttaagttagcatgttaattaattgtgtagacattttggcacaccatcacttttaactatatcataccaatggttttgtgcccataataaaaatggaaaaacctgttgaatgttacgtattggtatctttaatttcaacagtgggtaaactggtttcccagtatacaattcattgaaagcaaaattgattaattatttccatttaatttatacacactcaatacaaaatttaatgttgactttacgtaataaagtataatgcattttcttttttactgtttatgtatagtttacaaaataaagaatcttgtaaccaaa

SEQ ID NO: 185184 - DNA, 2947 bp, Homo sapiens
  Payload ID: 16473
  Gene Symbol: SPOCK3
  Gene Name: sparc/osteonectin, cwcv and kazal-like domains proteoglycan (testican) 3
  Uniprot ID: Q9BQ16
  ENST ID: ENST00000506886
  CDS Start-End: 104-1414
acaaagcagataaggattcctaggctaggagctacctcgtcctctggctccagccaagcgtcctatccggagccaactgtagctgggatccagcgagaggaagatgctcaaggtgtcagccgtactgtgtgtgtgtgcagccgcttggtgcagtcagtctctcgcagctgccgcggcggtggctgcagccggggggcggtcggacggcggtaattttctggatgataaacaatggctcaccacaatctctcagtatgacaaggaagtcggacagtggaacaaattccgagacgaagtagaggatgattatttccgcacttggagtccaggaaaacccttcgatcaggctttagatccagctaaggatccatgcttaaagatgaaatgtagtcgccataaagtatgcattgctcaagattctcagactgcagtctgcattagtcaccggaggcttacacacaggatgaaagaagcaggagtagaccataggcagtggaggggtcccatattatccacctgcaagcagtgcccagtggtctatcccagccctgtttgtggttcagatggtcatacctactcttttcagtgcaaactagaatatcaggcatgtgtcttaggaaaacagatctcagtcaaatgtgaaggacattgcccatgtccttcagataagcccaccagtacaagcagaaatgttaagagagcatgcagtgacctggagttcagggaagtggcaaacagattgcgggactggttcaaggcccttcatgaaagtggaagtcaaaacaagaagacaaaaacattgctgaggcctgagagaagcagattcgataccagcatcttgccaatttgcaaggactcacttggctggatgtttaacagacttgatacaaactatgacctgctattggaccagtcagagctcagaagcatttaccttgataagaatgaacagtgtaccaaggcattcttcaattcttgtgacacatacaaggacagtttaatatctaataatgagtggtgctactgcttccagagacagcaagacccaccttgccagactgagctcagcaatattcagaagcggcaaggggtaaagaagctcctaggacagtatatccccctgtgtgatgaagatggttactacaagccaacacaatgtcatggcagtgttggacagtgctggtgtgttgacagatatggaaatgaagtcatgggatccagaataaatggtgttgcagattgtgctatagattttgagatctccggagattttgctagtggcgattttcatgaatggactgatgatgaggatgatgaagacgatattatgaatgatgaagatgaaattgaagatgatgatgaagatgaaggggatgatgatgatggtggtgatgaccatgatgtatacatttgattgatgacagttgaaatcaataaattctacatttctaatatttacaaaaatgatagcctatttaaaattatcttcttccccaataacaaaatgattctaaacctcacatatattttgtataattatttgaaaaattgcagctaaagttatagaactttatgtttaaataagaatcatttgctttgagtttttatattccttacacaaaaagaaaatacatatgcagtctagtcagacaaaataaagttttgaagtgctactataataagtttttcacgagaacaaactttgtaaatcttccataagcaaaatgacagctagtgcttgggatcgtacatgttaattttctgaaagataattctaagtgaaatttaaaataaataaatttttaatgacctgggtcttaaggatttaggaaaaatatgcatgctttaattgcatttccaaagtagcatcttgctagacctagttgagtcaggataacagagagataccacatggcaagaaaaacaaagtgacaattgtagagtcctcaattgtgtttacattaatagtggtgtttttacctatgaaattattctggatctaataggacattttacaaaatggcaagtatggaaaaccatggattctgaaagttaaaaatttagttgttctccccaatgtgtattttaatttggatggcagtctcatgcagattttttaaaagattctttaataacatgatttgtttgcctttctagatttctttatctttctgaccagcaacttagggagcagaatttaaattaggaagacaaagggaaagattcatttaaaccatatttttacaaagtttgtcatttgccccaaggtcaaattttaaattcttaattttcattttatttcccattttaggtaaaagtttgcatttaatcttagaattatgttatttttgttagtagtgtggaaacttagagaacttattgtatggtgccttgcaaaaatagagatagaaagattttagcatgcataccaatatagtatattacgcaatatataagcacacctaattaacagattaatatcagtaaaggtattgctgctggaatgaagaaaatgggatacgtttgtttctttttttctattgttacataattgccatgtggacttgtttatgattattgtgtagagtagcatttaagatttaactgtagcaaaaattactttaaccgctgtatttaagttagcatgttaattaattgtgtagacattttggcacaccatcacttttaactatatcataccaatggttttgtgcccataataaaaatggaaaaacctgttgaatgttacgtattggtatctttaatttcaacagtgggtaaactggtttcccagtatacaattcattgaaagcaaaattgattaattatttccatttaatttatacacactcaatacaaaatttaatgttgactttacgtaataaagtataatgcattttcttttttactgtttatgtatagtttacaaaataaagaatcttgtaac

SEQ ID NO: 185185 - DNA, 1032 bp, Homo sapiens
  Payload ID: 16473
  Gene Symbol: SPOCK3
  Gene Name: sparc/osteonectin, cwcv and kazal-like domains proteoglycan (testican) 3
  ENST ID: ENST00000507086
  CDS Start-End: 114-482
gagtggacggctcgagacggcggcgcgtgcagcagctccagaaagcagcgagttggcagagcagggctgcatttccagcaggagctgcgagcacagtgctggctcacaacaagatgctcaaggtgtcagccgtactgtgtgtgtgtgcagccgcttggtgcagtcagtctctcgcagctgccgcggcggtggctgcagccggggggcggtcggacggcggtaattttctggatgataaacaatggctcaccacaatctctcagtatgacaaggaagtcggacagtggaacaaattccgagacgaagtagaggatgattatttccgcacttggagtccaggaaaacccttcgatcaggctttagatccagctaaggatccatgcttaaagatgaaatgtagtcgccataaagtatgcattgctcaagattctcagactgcagtctgcattagtcaccggaggcttacacacagtgcaaactagaatatcaggcatgtgtcttaggaaaacagatctcagtcaaatgtgaaggacattgcccatgtccttcagataagcccaccagtacaagcagaaatgttaagagagtactctgagtgctatggaaccctatcaagaaacaaagtttatttcattattgtgctatgattataagttaactgatttaaggaaaaagtattattgattaagaattaatgtatgccattttccaagtgacaaataatttagttttaacgtttaattttgtatgatggaatttttttatatcctctgaattatggaatggattttcaatgagaaacagattaacatcagtgtattaatatactcttgcaacatgcatgcttctccgtaactaatatagtgtattcataaatggtaagttcttctgtaattttgtttaattggagccatggaaaaataaaattaagtcagtttattggcaagtgttgcataattatttataataaaaattaagttttactcatttggattatttgaaatacattcttggattaaattaatgtgtctg

SEQ ID NO: 185186 - DNA, 1588 bp, Homo sapiens
  Payload ID: 16473
  Gene Symbol: SPOCK3
  Gene Name: sparc/osteonectin, cwcv and kazal-like domains proteoglycan (testican) 3
  ENST ID: ENST00000505187
  CDS Start-End: 46-240
gcatttccagcaggagctgcgagcacagtgctggctcacaacaagatgctcaaggtgtcagccgtactgtgtgtgtgtgcagccgcttggtgcagtcagtctctcgcagctgccgcggcggtggctgcagccggggggcggtcggacggcggtaattttctggatgataaacaatggctcaccacaatctctcagtatgacaaggaagtcggacagtggaacaaattccgagacctttagatccagctaaggatccatgcttaaagatgaaatgtagtcgccataaagtatgcattgctcaagattctcagactgcagtctgcattagtcaccggaggcttacacacaggatgaaagaagcaggagtagaccataggcagtggaggggtcccatattatccacctgcaagcagtgcccagtggtctatcccagccctgtttgtggttcagatggtcatacctactcttttcagtgcaaactagaatatcaggcatgtgtcttaggaaaacagatctcagtcaaatgtgaaggacattgcccatgtccttcagataagcccaccagtacaagcagaaatgttaagagagcatgcagtgacctggagttcagggaagtggcaaacagattgcgggactggttcaaggcccttcatgaaagtggaagtcaaaacaagaagacaaaaacattgctgaggcctgagagaagcagattcgataccagcatcttgccaatttgcaaggactcacttggctggatgtttaacagacttgatacaaactatgacctgctattggaccagtcagagctcagaagcatttaccttgataagaatgaacagtgtaccaaggcattcttcaattcttgtgacacatacaaggacagtttaatatctaataatgagtggtgctactgcttccagagacagcaagacccaccttgccagactgagctcagcaatattcagaagcggcaaggggtaaagaagctcctaggacagtatatccccctgtgtgatgaagatggttactacaagccaacacaatgtcatggcagtgttggacagtgctggtgtgttgacagatatggaaatgaagtcatgggatccagaataaatggtgttgcagattgtgctatagattttgagatctccggagattttgctagtggcgattttcatgaatggactgatgatgaggatgatgaagacgatattatgaatgatgaagatgaaattgaagatgatgatgaagatgaaggggatgatgatgatggtggtgatgaccatgatgtatacatttgattgatgacagttgaaatcaataaattctacatttctaatatttacaaaaatgatagcctatttaaaattatcttcttccccaataacaaaatgattctaaacctcacatatattttgtataattatttgaaaaattgcagctaaagttatagaactttatgtttaaataagaatcatttgctttgagtttttatattccttacacaaaaagaaaatacatatgcagtctagtcagacaaaataaagttttgaagtgctactataataagtttttcacgagaacaaac

SEQ ID NO: 185187 - DNA, 1032 bp, Homo sapiens; identical to SEQ ID NO: 185185
  Payload ID: 16473
  Gene Symbol: SPOCK3
  Gene Name: sparc/osteonectin, cwcv and kazal-like domains proteoglycan (testican) 3
  ENST ID: ENST00000502741
  CDS Start-End: 114-482

SEQ ID NO: 185188 - DNA, 563 bp, Homo sapiens
  Payload ID: 16473
  Gene Symbol: SPOCK3
  Gene Name: sparc/osteonectin, cwcv and kazal-like domains proteoglycan (testican) 3
  ENST ID: ENST00000510403
  CDS Start-End: 46-563
gcatttccagcaggagctgcgagcacagtgctggctcacaacaagatgctcaaggtgtcagccgtactgtgtgtgtgtgcagccgcttggtgcagtcagtctctcgcagctgccgcggcggtggctgcagccggggggcggtcggacggcggtaattttctggatgataaacaatggctcaccacaatctctcagtatgacaaggaagtcggacagtggaacaaattccgagacgatgattatttccgcacttggagtccaggaaaacccttcgatcaggcatgcagtgacctggagttcagggaagtggcaaacagattgcgggactggttcaaggcccttcatgaaagtggaagtcaaaacaagaagacaaaaacattgctgaggcctgagagaagcagattcgataccagcatcttgccaatttgcaaggactcacttggctggatgtttaacagacttgatacaaactatgacctgctattggaccagtcagagctcagaagcatttaccttgataagaatgaacagtgtaccaaggcattcttcaattcttgtgacac

SEQ ID NO: 185189 - DNA, 556 bp, Homo sapiens
  Payload ID: 16473
  Gene Symbol: SPOCK3
  Gene Name: sparc/osteonectin, cwcv and kazal-like domains proteoglycan (testican) 3
  ENST ID: ENST00000509854
  CDS Start-End: 74-556
gtgcccgctcgggctgctgcggctggggcttgcttccttatacccacctctcctcctctgggtctgcgtgtgtatgctcaaggtgtcagccgtactgtgtgtgtgtgcagccgcttggtgcagtcagtctctcgcagctgccgcggcggtggctgcagccggggggcggtcggacggcggtaattttctggatgataaacaatggctcaccacaatctctcagtatgacaaggaagtcggacagtggaacaaattccgagacgatgattatttccgcacttggagtccaggaaaacccttcgatcaggctttagatccagctaaggatccatgcttaaagatgaaatgtagtcgccataaagtatgcattgctcaagattctcagactgcagtctgcattagtcaccggaggcttacacacaggatgaaagaagcaggagtagaccataggcagtggaggggtcccatattatccacctgcaagcagtgcccagtggtctatcccagccctgtttgtggttcagatggtcatacctactcttttcagtgcaaacta

SEQ ID NO: 185190 - DNA, 2908 bp, Homo sapiens
  Payload ID: 16473
  Gene Symbol: SPOCK3
  Gene Name: sparc/osteonectin, cwcv and kazal-like domains proteoglycan (testican) 3
  Uniprot ID: Q9BQ16
  ENST ID: ENST00000511531
  CDS Start-End: 65-1375
tcctctggctccagccaagcgtcctatccggagccaactgtagctgggatccagcgagaggaagatgctcaaggtgtcagccgtactgtgtgtgtgtgcagccgcttggtgcagtcagtctctcgcagctgccgcggcggtggctgcagccggggggcggtcggacggcggtaattttctggatgataaacaatggctcaccacaatctctcagtatgacaaggaagtcggacagtggaacaaattccgagacgaagtagaggatgattatttccgcacttggagtccaggaaaacccttcgatcaggctttagatccagctaaggatccatgcttaaagatgaaatgtagtcgccataaagtatgcattgctcaagattctcagactgcagtctgcattagtcaccggaggcttacacacaggatgaaagaagcaggagtagaccataggcagtggaggggtcccatattatccacctgcaagcagtgcccagtggtctatcccagccctgtttgtggttcagatggtcatacctactcttttcagtgcaaactagaatatcaggcatgtgtcttaggaaaacagatctcagtcaaatgtgaaggacattgcccatgtccttcagataagcccaccagtacaagcagaaatgttaagagagcatgcagtgacctggagttcagggaagtggcaaacagattgcgggactggttcaaggcccttcatgaaagtggaagtcaaaacaagaagacaaaaacattgctgaggcctgagagaagcagattcgataccagcatcttgccaatttgcaaggactcacttggctggatgtttaacagacttgatacaaactatgacctgctattggaccagtcagagctcagaagcatttaccttgataagaatgaacagtgtaccaaggcattcttcaattcttgtgacacatacaaggacagtttaatatctaataatgagtggtgctactgcttccagagacagcaagacccaccttgccagactgagctcagcaatattcagaagcggcaaggggtaaagaagctcctaggacagtatatccccctgtgtgatgaagatggttactacaagccaacacaatgtcatggcagtgttggacagtgctggtgtgttgacagatatggaaatgaagtcatgggatccagaataaatggtgttgcagattgtgctatagattttgagatctccggagattttgctagtggcgattttcatgaatggactgatgatgaggatgatgaagacgatattatgaatgatgaagatgaaattgaagatgatgatgaagatgaaggggatgatgatgatggtggtgatgaccatgatgtatacatttgattgatgacagttgaaatcaataaattctacatttctaatatttacaaaaatgatagcctatttaaaattatcttcttccccaataacaaaatgattctaaacctcacatatattttgtataattatttgaaaaattgcagctaaagttatagaactttatgtttaaataagaatcatttgctttgagtttttatattccttacacaaaaagaaaatacatatgcagtctagtcagacaaaataaagttttgaagtgctactataataagtttttcacgagaacaaactttgtaaatcttccataagcaaaatgacagctagtgcttgggatcgtacatgttaattttctgaaagataattctaagtgaaatttaaaataaataaatttttaatgacctgggtcttaaggatttaggaaaaatatgcatgctttaattgcatttccaaagtagcatcttgctagacctagttgagtcaggataacagagagataccacatggcaagaaaaacaaagtgacaattgtagagtcctcaattgtgtttacattaatagtggtgtttttacctatgaaattattctggatctaataggacattttacaaaatggcaagtatggaaaaccatggattctgaaagttaaaaatttagttgttctccccaatgtgtattttaatttggatggcagtctcatgcagattttttaaaagattctttaataacatgatttgtttgcctttctagatttctttatctttctgaccagcaacttagggagcagaatttaaattaggaagacaaagggaaagattcatttaaaccatatttttacaaagtttgtcatttgccccaaggtcaaattttaaattcttaattttcattttatttcccattttaggtaaaagtttgcatttaatcttagaattatgttatttttgttagtagtgtggaaacttagagaacttattgtatggtgccttgcaaaaatagagatagaaagattttagcatgcataccaatatagtatattacgcaatatataagcacacctaattaacagattaatatcagtaaaggtattgctgctggaatgaagaaaatgggatacgtttgtttctttttttctattgttacataattgccatgtggacttgtttatgattattgtgtagagtagcatttaagatttaactgtagcaaaaattactttaaccgctgtatttaagttagcatgttaattaattgtgtagacattttggcacaccatcacttttaactatatcataccaatggttttgtgcccataataaaaatggaaaaacctgttgaatgttacgtattggtatctttaatttcaacagtgggtaaactggtttcccagtatacaattcattgaaagcaaaattgattaattatttccatttaatttatacacactcaatacaaaatttaatgttgactttacgtaataaagtataatgcattttcttttttactgtttatgtatagtttacaaaataaagaatcttgtaac

SEQ ID NO: 185191 - DNA, 2180 bp, Homo sapiens
  Payload ID: 16473
  Gene Symbol: SPOCK3
  Gene Name: sparc/osteonectin, cwcv and kazal-like domains proteoglycan (testican) 3
  Uniprot ID: Q9BQ16
  ENST ID: ENST00000502330
  CDS Start-End: 134-1444
cgcgccgggcgcagggagctgagtggacggctcgagacggcggcgcgtgcagcagctccagaaagcagcgagttggcagagcagggctgcatttccagcaggagctgcgagcacagtgctggctcacaacaagatgctcaaggtgtcagccgtactgtgtgtgtgtgcagccgcttggtgcagtcagtctctcgcagctgccgcggcggtggctgcagccggggggcggtcggacggcggtaattttctggatgataaacaatggctcaccacaatctctcagtatgacaaggaagtcggacagtggaacaaattccgagacgaagtagaggatgattatttccgcacttggagtccaggaaaacccttcgatcaggctttagatccagctaaggatccatgcttaaagatgaaatgtagtcgccataaagtatgcattgctcaagattctcagactgcagtctgcattagtcaccggaggcttacacacaggatgaaagaagcaggagtagaccataggcagtggaggggtcccatattatccacctgcaagcagtgcccagtggtctatcccagccctgtttgtggttcagatggtcatacctactcttttcagtgcaaactagaatatcaggcatgtgtcttaggaaaacagatctcagtcaaatgtgaaggacattgcccatgtccttcagataagcccaccagtacaagcagaaatgttaagagagcatgcagtgacctggagttcagggaagtggcaaacagattgcgggactggttcaaggcccttcatgaaagtggaagtcaaaacaagaagacaaaaacattgctgaggcctgagagaagcagattcgataccagcatcttgccaatttgcaaggactcacttggctggatgtttaacagacttgatacaaactatgacctgctattggaccagtcagagctcagaagcatttaccttgataagaatgaacagtgtaccaaggcattcttcaattcttgtgacacatacaaggacagtttaatatctaataatgagtggtgctactgcttccagagacagcaagacccaccttgccagactgagctcagcaatattcagaagcggcaaggggtaaagaagctcctaggacagtatatccccctgtgtgatgaagatggttactacaagccaacacaatgtcatggcagtgttggacagtgctggtgtgttgacagatatggaaatgaagtcatgggatccagaataaatggtgttgcagattgtgctatagattttgagatctccggagattttgctagtggcgattttcatgaatggactgatgatgaggatgatgaagacgatattatgaatgatgaagatgaaattgaagatgatgatgaagatgaaggggatgatgatgatggtggtgatgaccatgatgtatacatttgattgatgacagttgaaatcaataaattctacatttctaatatttacaaaaatgatagcctatttaaaattatcttcttccccaataacaaaatgattctaaacctcacatatattttgtataattatttgaaaaattgcagctaaagttatagaactttatgtttaaataagaatcatttgctttgagtttttatattccttacacaaaaagaaaatacatatgcagtctagtcagacaaaataaagttttgaagtgctactataataagtttttcacgagaacaaactttgtaaatcttccataagcaaaatgacagctagtgcttgggatcgtacatgttaattttctgaaagataattctaagtgaaatttaaaataaataaatttttaatgacctgggtcttaaggatttaggaaaaatatgcatgctttaattgcatttccaaagtagcatcttgctagacctagttgagtcaggataacagagagataccacatggcaagaaaaacaaagtgacaattgtagagtcctcaattgtgtttacattaatagtggtgtttttacctatgaaattattctggatctaataggacattttacaaaatggcaagtatggaaaaccatggattctgaaagttaaaaatttagttgttctccccaatgtgtattttaatttggatggcagtctcatgcagattttttaaaagattctttaataacatgatttgtttgcc

SEQ ID NO: 185192 - DNA, 505 bp, Homo sapiens
  Payload ID: 16473
  Gene Symbol: SPOCK3
  Gene Name: sparc/osteonectin, cwcv and kazal-like domains proteoglycan (testican) 3
  ENST ID: ENST00000506697
  CDS Start-End: 160-505
gtaaagcctgcggggaggggacacgcttgcctctgcttgtctcctcctccctctaccctcgtcgttgctaatgcatgttttccagggtcgctcctggcttcgtaccccttatttgacactgacatgcccccccaccccccgttgtgtctcctctcccagatgctcaaggtgtcagccgtactgtgtgtgtgtgcagccgcttggtgcagtcagtctctcgcagctgccgcggcggtggctgcagccggggggcggtcggacggcggtaattttctggatgataaacaatggctcaccacaatctctcagtatgacaaggaagtcggacagtggaacaaattccgagacgaagtagaggatgattatttccgcacttggagtccaggaaaacccttcgatcaggctttagatccagctaaggatccatgcttaaagatgaaatgtagtcgccataaagtatgcattgctcaagattctcagactgcagtctgcattagtcaccgga

SEQ ID NO: 185193 - DNA, 565 bp, Homo sapiens
  Payload ID: 16473
  Gene Symbol: SPOCK3
  Gene Name: sparc/osteonectin, cwcv and kazal-like domains proteoglycan (testican) 3
  ENST ID: ENST00000511226
  CDS Start-End: 74-313
gtgcccgctcgggctgctgcggctggggcttgcttccttatacccacctctcctcctctgggtctgcgtgtgtatgctcaaggtgtcagccgtactgtgtgtgtgtgcagccgcttggtgcagtcagtctctcgcagctgccgcggcggtggctgcagccggggggcggtcggacggcggtaattttctggatgataaacaatggctcaccacaatctctcagtatgacaaggaagtcggacagtggaacaaattccgagacgatgattatttccgcacttggagtccaggaaaacccttcgatcagggatgaaagaagcaggagtagaccataggcagtggaggggtcccatattatccacctgcaagcagtgcccagtggtctatcccagccctgtttgtggttcagatggtcatacctactcttttcagtgcaaactagaatatcaggcatgtgtcttaggaaaacagatctcagtcaaatgtgaaggacattgcccatgtccttcagataagcccaccagtacaagcagaaatgttaagagagcatgcagtgacctggagt

SEQ ID NO: 185194 - DNA, 1510 bp, Homo sapiens
  Payload ID: 16473
  Gene Symbol: SPOCK3
  Gene Name: sparc/osteonectin, cwcv and kazal-like domains proteoglycan (testican) 3
  ENST ID: ENST00000507370
  CDS Start-End: 44-259
atttccagcaggagctgcgagcacagtgctggctcacaacaagatgctcaaggtgtcagccgtactgtgtgtgtgtgcagccgcttggtgcagtcagtctctcgcagctgccgcggcggtggctgcagccggggggcggtcggacggcggtaattttctggatgataaacaatggctcaccacaatctctcagtatgacaaggaagtcggacagtggaacaaattccgagacgatgaaagaagcaggagtagaccataggcagtggaggggtcccatattatccacctgcaagcagtgcccagtggtctatcccagccctgtttgtggttcagatggtcatacctactcttttcagtgcaaactagaatatcaggcatgtgtcttaggaaaacagatctcagtcaaatgtgaaggacattgcccatgtccttcagataagcccaccagtacaagcagaaatgttaagagagcatgcagtgacctggagttcagggaagtggcaaacagattgcgggactggttcaaggcccttcatgaaagtggaagtcaaaacaagaagacaaaaacattgctgaggcctgagagaagcagattcgataccagcatcttgccaatttgcaaggactcacttggctggatgtttaacagacttgatacaaactatgacctgctattggaccagtcagagctcagaagcatttaccttgataagaatgaacagtgtaccaaggcattcttcaattcttgtgacacatacaaggacagtttaatatctaataatgagtggtgctactgcttccagagacagcaagacccaccttgccagactgagctcagcaatattcagaagcggcaaggggtaaagaagctcctaggacagtatatccccctgtgtgatgaagatggttactacaagccaacacaatgtcatggcagtgttggacagtgctggtgtgttgacagatatggaaatgaagtcatgggatccagaataaatggtgttgcagattgtgctatagattttgagatctccggagattttgctagtggcgattttcatgaatggactgatgatgaggatgatgaagacgatattatgaatgatgaagatgaaattgaagatgatgatgaagatgaaggggatgatgatgatggtggtgatgaccatgatgtatacatttgattgatgacagttgaaatcaataaattctacatttctaatatttacaaaaatgatagcctatttaaaattatcttcttccccaataacaaaatgattctaaacctcacatatattttgtataattatttgaaaaattgcagctaaagttatagaactttatgtttaaataagaatcatttgctttgagtttttatattccttacacaaaaagaaaatacatatgcagtctagtcagacaaaataaagttttgaagtgctactataataagtttttcacgagaacaaactttgtaaatcttccataagcaaaatgacagctagtgctt

SEQ ID NO: 185195 - DNA, 1749 bp, Homo sapiens
  Payload ID: 16473
  Gene Symbol: SPOCK3
  Gene Name: sparc/osteonectin, cwcv and kazal-like domains proteoglycan (testican) 3
  ENST ID: ENST00000502821
  CDS Start-End: 44-235
atttccagcaggagctgcgagcacagtgctggctcacaacaagatgctcaaggtgtcagccgtactgtgtgtgtgtgcagccgcttggtgcagtcagtctctcgcagctgccgcggcggtggctgcagccggggggcggtcggacggcggtaattttctggatgataaacaatggctcaccacaatctctcagtatgacaaggaagtcggacagtggaacaaattccgagactaagaagaaaaacgattatttgacaggacagtagtgatgatcacacaagatcacatccacatgtcttctgggctcagtcaggatgattatttccgcacttggagtccaggaaaacccttcgatcaggctttagatccagctaaggatccatgcttaaagatgaaatgtagtcgccataaagtatgcattgctcaagattctcagactgcagtctgcattagtcaccggaggcttacacacaggatgaaagaagcaggagtagaccataggcagtggaggggtcccatattatccacctgcaagcagtgcccagtggtctatcccagccctgtttgtggttcagatggtcatacctactcttttcagtgcaaactagaatatcaggcatgtgtcttaggaaaacagatctcagtcaaatgtgaaggacattgcccatgtccttcagataagcccaccagtacaagcagaaatgttaagagagcatgcagtgacctggagttcagggaagtggcaaacagattgcgggactggttcaaggcccttcatgaaagtggaagtcaaaacaagaagacaaaaacattgctgaggcctgagagaagcagattcgataccagcatcttgccaatttgcaaggactcacttggctggatgtttaacagacttgatacaaactatgacctgctattggaccagtcagagctcagaagcatttaccttgataagaatgaacagtgtaccaaggcattcttcaattcttgtgacacatacaaggacagtttaatatctaataatgagtggtgctactgcttccagagacagcaagacccaccttgccagactgagctcagcaatattcagaagcggcaaggggtaaagaagctcctaggacagtatatccccctgtgtgatgaagatggttactacaagccaacacaatgtcatggcagtgttggacagtgctggtgtgttgacagatatggaaatgaagtcatgggatccagaataaatggtgttgcagattgtgctatagattttgagatctccggagattttgctagtggcgattttcatgaatggactgatgatgaggatgatgaagacgatattatgaatgatgaagatgaaattgaagatgatgatgaagatgaaggggatgatgatgatggtggtgatgaccatgatgtatacatttgattgatgacagttgaaatcaataaattctacatttctaatatttacaaaaatgatagcctatttaaaattatcttcttccccaataacaaaatgattctaaacctcacatatattttgtataattatttgaaaaattgcagctaaagttatagaactttatgtttaaataagaatcatttgctttgagtttttatattccttacacaaaaagaaaatacatatgcagtctagtcagacaaaataaagttttgaagtgctactataataagtttttcacgagaacaaactttgtaaatcttccataagcaaaatgacagctagtg

SEQ ID NO: 185196 - DNA, 505 bp, Homo sapiens; identical to SEQ ID NO: 185192
  Payload ID: 16473
  Gene Symbol: SPOCK3
  Gene Name: sparc/osteonectin, cwcv and kazal-like domains proteoglycan (testican) 3
  ENST ID: ENST00000512042
  CDS Start-End: 160-505

SEQ ID NO: 185197 - DNA, 1768 bp, Homo sapiens
  Payload ID: 16473
  Gene Symbol: SPOCK3
  Gene Name: sparc/osteonectin, cwcv and kazal-like domains proteoglycan (testican) 3
  Uniprot ID: Q9BQ16
  ENST ID: ENST00000511269
  CDS Start-End: 94-1395
gctaatgcatgttttccagggtcgctcctggcttcgtaccccttatttgacactgacatgcccccccaccccccgttgtgtctcctctcccagatgctcaaggtgtcagccgtactgtgtgtgtgtgcagccgcttggtgcagtcagtctctcgcagctgccgcggcggtggctgcagccggggggcggtcggacggcggtaattttctggatgataaacaatggctcaccacaatctctcagtatgacaaggaagtcggacagtggaacaaattccgagacgatgattatttccgcacttggagtccaggaaaacccttcgatcaggctttagatccagctaaggatccatgcttaaagatgaaatgtagtcgccataaagtatgcattgctcaagattctcagactgcagtctgcattagtcaccggaggcttacacacaggatgaaagaagcaggagtagaccataggcagtggaggggtcccatattatccacctgcaagcagtgcccagtggtctatcccagccctgtttgtggttcagatggtcatacctactcttttcagtgcaaactagaatatcaggcatgtgtcttaggaaaacagatctcagtcaaatgtgaaggacattgcccatgtccttcagataagcccaccagtacaagcagaaatgttaagagagcatgcagtgacctggagttcagggaagtggcaaacagattgcgggactggttcaaggcccttcatgaaagtggaagtcaaaacaagaagacaaaaacattgctgaggcctgagagaagcagattcgataccagcatcttgccaatttgcaaggactcacttggctggatgtttaacagacttgatacaaactatgacctgctattggaccagtcagagctcagaagcatttaccttgataagaatgaacagtgtaccaaggcattcttcaattcttgtgacacatacaaggacagtttaatatctaataatgagtggtgctactgcttccagagacagcaagacccaccttgccagactgagctcagcaatattcagaagcggcaaggggtaaagaagctcctaggacagtatatccccctgtgtgatgaagatggttactacaagccaacacaatgtcatggcagtgttggacagtgctggtgtgttgacagatatggaaatgaagtcatgggatccagaataaatggtgttgcagattgtgctatagattttgagatctccggagattttgctagtggcgattttcatgaatggactgatgatgaggatgatgaagacgatattatgaatgatgaagatgaaattgaagatgatgatgaagatgaaggggatgatgatgatggtggtgatgaccatgatgtatacatttgattgatgacagttgaaatcaataaattctacatttctaatatttacaaaaatgatagcctatttaaaattatcttcttccccaataacaaaatgattctaaacctcacatatattttgtataattatttgaaaaattgcagctaaagttatagaactttatgtttaaataagaatcatttgctttgagtttttatattccttacacaaaaagaaaatacatatgcagtctagtcagacaaaataaagttttgaagtgctactataataagtttttcacgagaacaaactttgtaaatcttccataagcaaaatgacagctagtgcttgggatcgtacatgttaattttctgaaagataattctaagtgaaattt

SEQ ID NO: 185198 - DNA, 2900 bp, Homo sapiens
  Payload ID: 16473
  Gene Symbol: SPOCK3
  Gene Name: sparc/osteonectin, cwcv and kazal-like domains proteoglycan (testican) 3
  Uniprot ID: Q9BQ16
  ENST ID: ENST00000504953
  CDS Start-End: 65-1366
tcctctggctccagccaagcgtcctatccggagccaactgtagctgggatccagcgagaggaagatgctcaaggtgtcagccgtactgtgtgtgtgtgcagccgcttggtgcagtcagtctctcgcagctgccgcggcggtggctgcagccggggggcggtcggacggcggtaattttctggatgataaacaatggctcaccacaatctctcagtatgacaaggaagtcggacagtggaacaaattccgagacgatgattatttccgcacttggagtccaggaaaacccttcgatcaggctttagatccagctaaggatccatgcttaaagatgaaatgtagtcgccataaagtatgcattgctcaagattctcagactgcagtctgcattagtcaccggaggcttacacacaggatgaaagaagcaggagtagaccataggcagtggaggggtcccatattatccacctgcaagcagtgcccagtggtctatcccagccctgtttgtggttcagatggtcatacctactcttttcagtgcaaactagaatatcaggcatgtgtcttaggaaaacagatctcagtcaaatgtgaaggacattgcccatgtccttcagataagcccaccagtacaagcagaaatgttaagagagcatgcagtgacctggagttcagggaagtggcaaacagattgcgggactggttcaaggcccttcatgaaagtggaagtcaaaacaagaagacaaaaacattgctgaggcctgagagaagcagattcgataccagcatcttgccaatttgcaaggactcacttggctggatgtttaacagacttgatacaaactatgacctgctattggaccagtcagagctcagaagcatttaccttgataagaatgaacagtgtaccaaggcattcttcaattcttgtgacacatacaaggacagtttaatatctaataatgagtggtgctactgcttccagagacagcaagacccaccttgccagactgagctcagcaatattcagaagcggcaaggggtaaagaagctcctaggacagtatatccccctgtgtgatgaagatggttactacaagccaacacaatgtcatggcagtgttggacagtgctggtgtgttgacagatatggaaatgaagtcatgggatccagaataaatggtgttgcagattgtgctatagattttgagatctccggagattttgctagtggcgattttcatgaatggactgatgatgaggatgatgaagacgatattatgaatgatgaagatgaaattgaagatgatgatgaagatgaaggggatgatgatgatggtggtgatgaccatgatgtatacatttgattgatgacagttgaaatcaataaattctacatttctaatatttacaaaaatgatagcctatttaaaattatcttcttccccaataacaaaatgattctaaacctcacatatattttgtataattatttgaaaaattgcagctaaagttatagaactttatgtttaaataagaatcatttgctttgagtttttatattccttacacaaaaagaaaatacatatgcagtctagtcagacaaaataaagttttgaagtgctactataataagtttttcacgagaacaaactttgtaaatcttccataagcaaaatgacagctagtgcttgggatcgtacatgttaattttctgaaagataattctaagtgaaatttaaaataaataaatttttaatgacctgggtcttaaggatttaggaaaaatatgcatgctttaattgcatttccaaagtagcatcttgctagacctagttgagtcaggataacagagagataccacatggcaagaaaaacaaagtgacaattgtagagtcctcaattgtgtttacattaatagtggtgtttttacctatgaaattattctggatctaataggacattttacaaaatggcaagtatggaaaaccatggattctgaaagttaaaaatttagttgttctccccaatgtgtattttaatttggatggcagtctcatgcagattttttaaaagattctttaataacatgatttgtttgcctttctagatttctttatctttctgaccagcaacttagggagcagaatttaaattaggaagacaaagggaaagattcatttaaaccatatttttacaaagtttgtcatttgccccaaggtcaaattttaaattcttaattttcattttatttcccattttaggtaaaagtttgcatttaatcttagaattatgttatttttgttagtagtgtggaaacttagagaacttattgtatggtgccttgcaaaaatagagatagaaagattttagcatgcataccaatatagtatattacgcaatatataagcacacctaattaacagattaatatcagtaaaggtattgctgctggaatgaagaaaatgggatacgtttgtttctttttttctattgttacataattgccatgtggacttgtttatgattattgtgtagagtagcatttaagatttaactgtagcaaaaattactttaaccgctgtatttaagttagcatgttaattaattgtgtagacattttggcacaccatcacttttaactatatcataccaatggttttgtgcccataataaaaatggaaaaacctgttgaatgttacgtattggtatctttaatttcaacagtgggtaaactggtttcccagtatacaattcattgaaagcaaaattgattaattatttccatttaatttatacacactcaatacaaaatttaatgttgactttacgtaataaagtataatgcattttcttttttactgtttatgtatagtttacaaaataaagaatcttgtaacc

SEQ ID NO: 185199 - DNA, 1700 bp, Homo sapiens
  Payload ID: 16473
  Gene Symbol: SPOCK3
  Gene Name: sparc/osteonectin, cwcv and kazal-like domains proteoglycan (testican) 3
  ENST ID: ENST00000511905
  CDS Start-End: 74-313
gtgcccgctcgggctgctgcggctggggcttgcttccttatacccacctctcctcctctgggtctgcgtgtgtatgctcaaggtgtcagccgtactgtgtgtgtgtgcagccgcttggtgcagtcagtctctcgcagctgccgcggcggtggctgcagccggggggcggtcggacggcggtaattttctggatgataaacaatggctcaccacaatctctcagtatgacaaggaagtcggacagtggaacaaattccgagacgatgattatttccgcacttggagtccaggaaaacccttcgatcagggatgaaagaagcaggagtagaccataggcagtggaggggtcccatattatccacctgcaagcagtgcccagtggtctatcccagccctgtttgtggttcagatggtcatacctactcttttcagtgcaaactagaatatcaggcatgtgtcttaggaaaacagatctcagtcaaatgtgaaggacattgcccatgtccttcagataagcccaccagtacaagcagaaatgttaagagagcatgcagtgacctggagttcagggaagtggcaaacagattgcgggactggttcaaggcccttcatgaaagtggaagtcaaaacaagaagacaaaaacattgctgaggcctgagagaagcagattcgataccagcatcttgccaatttgcaaggactcacttggctggatgtttaacagacttgatacaaactatgacctgctattggaccagtcagagctcagaagcatttaccttgataagaatgaacagtgtaccaaggcattcttcaattcttgtgacacatacaaggacagtttaatatctaataatgagtggtgctactgcttccagagacagcaagacccaccttgccagactgagctcagcaatattcagaagcggcaaggggtaaagaagctcctaggacagtatatccccctgtgtgatgaagatggttactacaagccaacacaatgtcatggcagtgttggacagtgctggtgtgttgacagatatggaaatgaagtcatgggatccagaataaatggtgttgcagattgtgctatagattttgagatctccggagattttgctagtggcgattttcatgaatggactgatgatgaggatgatgaagacgatattatgaatgatgaagatgaaattgaagatgatgatgaagatgaaggggatgatgatgatggtggtgatgaccatgatgtatacatttgattgatgacagttgaaatcaataaattctacatttctaatatttacaaaaatgatagcctatttaaaattatcttcttccccaataacaaaatgattctaaacctcacatatattttgtataattatttgaaaaattgcagctaaagttatagaactttatgtttaaataagaatcatttgctttgagtttttatattccttacacaaaaagaaaatacatatgcagtctagtcagacaaaataaagttttgaagtgctactataataagtttttcacgagaacaaactttgtaaatcttccataagcaaaatgacagctagtgcttgggatcgtacatgttaattttctgaaagataattctaagtgaaatttaaaataaataaatttttaatgacctgggtcttaaggatttaggaaaaatatgcatgctttaattgca

SEQ ID NO: 185200 - DNA, 565 bp, Homo sapiens
  Payload ID: 16473
  Gene Symbol: SPOCK3
  Gene Name: sparc/osteonectin, cwcv and kazal-like domains proteoglycan (testican) 3
  ENST ID: ENST00000515143
  CDS Start-End: 1-252
aattttctggatgataaacaatggctcaccacaatctctcagtatgacaaggaagtcggacagtggaacaaattccgagacgatgattatttccgcacttggagtccaggaaaacccttcgatcaggctttagatccagctaaggatccatgcttaaagatgaaatgtagtcgccataaagtatgcattgctcaagattctcagactgcagtctgcattagtcaccggaggcttacacacagtgcaaactagaatatcaggcatgtgtcttaggaaaacagatctcagtcaaatgtgaaggacattgcccatgtccttcagataagcccaccagtacaagcagaaatgttaagagagcatgcagtgacctggagttcagggaagtggcaaacagattgcgggactggttcaaggcccttcatgaaagtggaagtcaaaacaagaagacaaaaacattgctgaggcctgagagaagcagattcgataccagcatcttgccaatttgcaaggactcacttggctggatgtttaacagacttgatacaaactatgacctgctattgga

SEQ ID NO: 185201 - DNA, 1456 bp, Homo sapiens
  Payload ID: 16473
  Gene Symbol: SPOCK3
  Gene Name: sparc/osteonectin, cwcv and kazal-like domains proteoglycan (testican) 3
  Uniprot ID: Q9BQ16
  ENST ID: ENST00000512648
  CDS Start-End: 104-1045
ctcgagacggcggcgcgtgcagcagctccagaaagcagcgagttggcagagcagggctgcatttccagcaggagctgcgagcacagtgctggctcacaacaagatgctcaaggtgtcagccgtactgtgtgtgtgtgcagccgcttggtgcagtcagtctctcgcagctgccgcggcggtggctgcagccggggggcggtcggacggcggtaattttctggatgataaacaatggctcaccacaatctctcagtatgacaaggaagtcggacagtggaacaaattccgagacgatgattatttccgcacttggagtccaggaaaacccttcgatcaggctttagatccagctaaggatccatgcttaaagatgaaatgtagtcgccataaagtatgcattgctcaagattctcagactgcagtctgcattagtcaccggaggcttacacacaggatgaaagaagcaggagtagaccataggcagtggaggggtcccatattatccacctgcaagcagtgcccagtggtctatcccagccctgtttgtggttcagatggtcatacctactcttttcagtgcaaactagaatatcaggcatgtgtcttaggaaaacagatctcagtcaaatgtgaaggacattgcccatgtccttcagataagcccaccagtacaagcagaaatgttaagagagcatgcagtgacctggagttcagggaagtggcaaacagattgcgggactggttcaaggcccttcatgaaagtggaagtcaaaacaagaagacaaaaacattgctgaggcctgagagaagcagattcgataccagcatcttgccaatttgcaaggactcacttggctggatgtttaacagacttgatacaaactatgacctgctattggaccagtcagagctcagaagcatttaccttgataagaatgaacagtgtaccaaggcattcttcaattcttgtgacacatacaaggacagtttaatatctaataatgagtggtgctactgcttccagagacagcaaggtaaaagatgagacccttacagacgcaaatagttgacctgcatgtcaaattttacttattttttaagaaaataaaacagtacactatgctcattcattttgtgtatgtttttgtaattcaagtgttgaataaaagagcaaataagaagcatgttgaacaaataactctgccagagatacaacacatgctaaataagatgaaaaatagtaattaatattttgtattaatgccactacattatagtttccattatgagccaccaagaagcacacagaaatattaagaacttagatactgaaagtaatcattaaaattaatttgctatctgctttgcccacaatgtaaaataaatggattttttatcactatacggtggagttttaatgttctattttgtgatcttattaaatgagttgaatgaa

SEQ ID NO: 185202 - DNA, 1457 bp, Homo sapiens
  Payload ID: 16473
  Gene Symbol: SPOCK3
  Gene Name: sparc/osteonectin, cwcv and kazal-like domains proteoglycan (testican) 3
  Uniprot ID: Q9BQ16
  ENST ID: ENST00000512681
  CDS Start-End: 43-1059
tttccagcaggagctgcgagcacagtgctggctcacaacaagatgctcaaggtgtcagccgtactgtgtgtgtgtgcagccgcttggtgcagtcagtctctcgcagctgccgcggcggtggctgcagccggggggcggtcggacggcggtaattttctggatgataaacaatggctcaccacaatctctcagtatgacaaggaagtcggacagtggaacaaattccgagactgcaaactagaatatcaggcatgtgtcttaggaaaacagatctcagtcaaatgtgaaggacattgcccatgtccttcagataagcccaccagtacaagcagaaatgttaagagagcatgcagtgacctggagttcagggaagtggcaaacagattgcgggactggttcaaggcccttcatgaaagtggaagtcaaaacaagaagacaaaaacattgctgaggcctgagagaagcagattcgataccagcatcttgccaatttgcaaggactcacttggctggatgtttaacagacttgatacaaactatgacctgctattggaccagtcagagctcagaagcatttaccttgataagaatgaacagtgtaccaaggcattcttcaattcttgtgacacatacaaggacagtttaatatctaataatgagtggtgctactgcttccagagacagcaagacccaccttgccagactgagctcagcaatattcagaagcggcaaggggtaaagaagctcctaggacagtatatccccctgtgtgatgaagatggttactacaagccaacacaatgtcatggcagtgttggacagtgctggtgtgttgacagatatggaaatgaagtcatgggatccagaataaatggtgttgcagattgtgctatagattttgagatctccggagattttgctagtggcgattttcatgaatggactgatgatgaggatgatgaagacgatattatgaatgatgaagatgaaattgaagatgatgatgaagatgaaggggatgatgatgatggtggtgatgaccatgatgtatacatttgattgatgacagttgaaatcaataaattctacatttctaatatttacaaaaatgatagcctatttaaaattatcttcttccccaataacaaaatgattctaaacctcacatatattttgtataattatttgaaaaattgcagctaaagttatagaactttatgtttaaataagaatcatttgctttgagtttttatattccttacacaaaaagaaaatacatatgcagtctagtcagacaaaataaagttttgaagtgctactataataagtttttcacgagaacaaactttgtaaatcttccataagcaaaatgacagctagtgcttgggatcgtacatgttaattttctgaaagataattctaagtgaaatttaaaataaataaatttttaatgacct

SEQ ID NO: 185203 - DNA, 1963 bp, Homo sapiens
  Payload ID: 16473
  Gene Symbol: SPOCK3
  Gene Name: sparc/osteonectin, cwcv and kazal-like domains proteoglycan (testican) 3
  Uniprot ID: Q9BQ16
  ENST ID: ENST00000510741
  CDS Start-End: 46-1227
gcatttccagcaggagctgcgagcacagtgctggctcacaacaagatgctcaaggtgtcagccgtactgtgtgtgtgtgcagccgcttggtgcagtcagtctctcgcagctgccgcggcggtggctgcagccggggggcggtcggacggcggtaattttctggatgataaacaatggctcaccacaatctctcagtatgacaaggaagtcggacagtggaacaaattccgagacgatgattatttccgcacttggagtccaggaaaacccttcgatcaggctttagatccagctaaggatccatgcttaaagatgaaatgtagtcgccataaagtatgcattgctcaagattctcagactgcagtctgcattagtcaccggaggcttacacacaggatgaaagaagcaggagtagaccataggcagtggaggggtcccatattatccacctgcaagcagtgcccagtggtctatcccagccctgtttgtggttcagatggtcatacctactcttttcagtgcaaactagaatatcaggcatgtgtcttaggaaaacagatctcagtcaaatgtgaaggacattgcccatgtccttcagataagcccaccagtacaagcagaaatgttaagagaggattcgataccagcatcttgccaatttgcaaggactcacttggctggatgtttaacagacttgatacaaactatgacctgctattggaccagtcagagctcagaagcatttaccttgataagaatgaacagtgtaccaaggcattcttcaattcttgtgacacatacaaggacagtttaatatctaataatgagtggtgctactgcttccagagacagcaagacccaccttgccagactgagctcagcaatattcagaagcggcaaggggtaaagaagctcctaggacagtatatccccctgtgtgatgaagatggttactacaagccaacacaatgtcatggcagtgttggacagtgctggtgtgttgacagatatggaaatgaagtcatgggatccagaataaatggtgttgcagattgtgctatagattttgagatctccggagattttgctagtggcgattttcatgaatggactgatgatgaggatgatgaagacgatattatgaatgatgaagatgaaattgaagatgatgatgaagatgaaggggatgatgatgatggtggtgatgaccatgatgtatacatttgattgatgacagttgaaatcaataaattctacatttctaatatttacaaaaatgatagcctatttaaaattatcttcttccccaataacaaaatgattctaaacctcacatatattttgtataattatttgaaaaattgcagctaaagttatagaactttatgtttaaataagaatcatttgctttgagtttttatattccttacacaaaaagaaaatacatatgcagtctagtcagacaaaataaagttttgaagtgctactataataagtttttcacgagaacaaactttgtaaatcttccataagcaaaatgacagctagtgcttgggatcgtacatgttaattttctgaaagataattctaagtgaaatttaaaataaataaatttttaatgacctgggtcttaaggatttaggaaaaatatgcatgctttaattgcatttccaaagtagcatcttgctagacctagttgagtcaggataacagagagataccacatggcaagaaaaacaaagtgacaattgtagagtcctcaattgtgtttacattaatagtggtgtttttacctatgaaattattctggatctaataggacattttacaaaatggcaagtatggaaaaccatggattctgaaagttaaaaatttagttgttctccccaatgtgtattttaatttggatggcagtctcatgcagattttttaaaagattctttaataacatgatttgtttgcc

SEQ ID NO: 185204 - DNA, 524 bp, Homo sapiens
  Payload ID: 16473
  Gene Symbol: SPOCK3
  Gene Name: sparc/osteonectin, cwcv and kazal-like domains proteoglycan (testican) 3
  ENST ID: ENST00000515316
  CDS Start-End: 44-313
atttccagcaggagctgcgagcacagtgctggctcacaacaagatgctcaaggtgtcagccgtactgtgtgtgtgtgcagccgcttggtgcagtcagtctctcgcagctgccgcggcggtggctgcagccggggggcggtcggacggcggtaattttctggatgataaacaatggctcaccacaatctctcagtatgacaaggaagtcggacagtggaacaaattccgagacgatgattatttccgcacttggagtccaggaaaacccttcgatcaggctctctccttccacgatttggggatttttgtgtgatgtgaatattgccataactgccttcctttggattagtacttgccagctttagatccagctaaggatccatgcttaaagatgaaatgtagtcgccataaagtatgcattgctcaagattctcagactgcagtctgcattagtcaccggaggcttacacacaggatgaaagaagcaggagtagaccataggcagtggaggggtcccatattat

SEQ ID NO: 185205 - DNA, 2007 bp, Homo sapiens
  Payload ID: 16473
  Gene Symbol: SPOCK3
  Gene Name: sparc/osteonectin, cwcv and kazal-like domains proteoglycan (testican) 3
  ENST ID: ENST00000535728
  CDS Start-End: 199-1233
acacatattctccacgccatggaggccactgcttgaggatgggggaggagtagtataagcagttcaatactgtcttttttaccatcttcagtgcttcttggtgatatgaagtaaaaccaggatgattatttccgcacttggagtccaggaaaacccttcgatcaggctttagatccagctaaggatccatgcttaaagatgaaatgtagtcgccataaagtatgcattgctcaagattctcagactgcagtctgcattagtcaccggaggcttacacacaggatgaaagaagcaggagtagaccataggcagtggaggggtcccatattatccacctgcaagcagtgcccagtggtctatcccagccctgtttgtggttcagatggtcatacctactcttttcagtgcaaactagaatatcaggcatgtgtcttaggaaaacagatctcagtcaaatgtgaaggacattgcccatgtccttcagataagcccaccagtacaagcagaaatgttaagagagcatgcagtgacctggagttcagggaagtggcaaacagattgcgggactggttcaaggcccttcatgaaagtggaagtcaaaacaagaagacaaaaacattgctgaggcctgagagaagcagattcgataccagcatcttgccaatttgcaaggactcacttggctggatgtttaacagacttgatacaaactatgacctgctattggaccagtcagagctcagaagcatttaccttgataagaatgaacagtgtaccaaggcattcttcaattcttgtgacacatacaaggacagtttaatatctaataatgagtggtgctactgcttccagagacagcaagacccaccttgccagactgagctcagcaatattcagaagcggcaaggggtaaagaagctcctaggacagtatatccccctgtgtgatgaagatggttactacaagccaacacaatgtcatggcagtgttggacagtgctggtgtgttgacagatatggaaatgaagtcatgggatccagaataaatggtgttgcagattgtgctatagattttgagatctccggagattttgctagtggcgattttcatgaatggactgatgatgaggatgatgaagacgatattatgaatgatgaagatgaaattgaagatgatgatgaagatgaaggggatgatgatgatggtggtgatgaccatgatgtatacatttgattgatgacagttgaaatcaataaattctacatttctaatatttacaaaaatgatagcctatttaaaattatcttcttccccaataacaaaatgattctaaacctcacatatattttgtataattatttgaaaaattgcagctaaagttatagaactttatgtttaaataagaatcatttgctttgagtttttatattccttacacaaaaagaaaatacatatgcagtctagtcagacaaaataaagttttgaagtgctactataataagtttttcacgagaacaaactttgtaaatcttccataagcaaaatgacagctagtgcttgggatcgtacatgttaattttctgaaagataattctaagtgaaatttaaaataaataaatttttaatgacctgggtcttaaggatttaggaaaaatatgcatgctttaattgcatttccaaagtagcatcttgctagacctagttgagtcaggataacagagagataccacatggcaagaaaaacaaagtgacaattgtagagtcctcaattgtgtttacattaatagtggtgtttttacctatgaaattattctggatctaataggacattttacaaaatggcaagtatggaaaaccatggattctgaaagttaaaaatttagttgttctccccaatgtgtattttaatttggatggcagtctcatgcagattttttaaaagattctttaataacatgatttgtttgcctttctagatttctttatctttctgaccagcaacttagg

SEQ ID NO: 185206 - DNA, 2797 bp, Homo sapiens
  Payload ID: 16473
  Gene Symbol: SPOCK3
  Gene Name: sparc/osteonectin, cwcv and kazal-like domains proteoglycan (testican) 3
  Uniprot ID: Q9BQ16
  ENST ID: ENST00000541354
  CDS Start-End: 310-1260
gtgcccgctcgggctgctgcggctggggcttgcttccttatacccacctctcctcctctgggtctgcgtgtgtatgctcaaggtgtcagccgtactgtgtgtgtgtgcagccgcttggtgcagtcagtctctcgcagctgccgcggcggtggctgcagccggggggcggtcggacggcggtaattttctggatgataaacaatggctcaccacaatctctcagtatgacaaggaagtcggacagtggaacaaattccgagacgatgattatttccgcacttggagtccaggaaaacccttcgatcagggatgaaagaagcaggagtagaccataggcagtggaggggtcccatattatccacctgcaagcagtgcccagtggtctatcccagccctgtttgtggttcagatggtcatacctactcttttcagtgcaaactagaatatcaggcatgtgtcttaggaaaacagatctcagtcaaatgtgaaggacattgcccatgtccttcagataagcccaccagtacaagcagaaatgttaagagagcatgcagtgacctggagttcagggaagtggcaaacagattgcgggactggttcaaggcccttcatgaaagtggaagtcaaaacaagaagacaaaaacattgctgaggcctgagagaagcagattcgataccagcatcttgccaatttgcaaggactcacttggctggatgtttaacagacttgatacaaactatgacctgctattggaccagtcagagctcagaagcatttaccttgataagaatgaacagtgtaccaaggcattcttcaattcttgtgacacatacaaggacagtttaatatctaataatgagtggtgctactgcttccagagacagcaagacccaccttgccagactgagctcagcaatattcagaagcggcaaggggtaaagaagctcctaggacagtatatccccctgtgtgatgaagatggttactacaagccaacacaatgtcatggcagtgttggacagtgctggtgtgttgacagatatggaaatgaagtcatgggatccagaataaatggtgttgcagattgtgctatagattttgagatctccggagattttgctagtggcgattttcatgaatggactgatgatgaggatgatgaagacgatattatgaatgatgaagatgaaattgaagatgatgatgaagatgaaggggatgatgatgatggtggtgatgaccatgatgtatacatttgattgatgacagttgaaatcaataaattctacatttctaatatttacaaaaatgatagcctatttaaaattatcttcttccccaataacaaaatgattctaaacctcacatatattttgtataattatttgaaaaattgcagctaaagttatagaactttatgtttaaataagaatcatttgctttgagtttttatattccttacacaaaaagaaaatacatatgcagtctagtcagacaaaataaagttttgaagtgctactataataagtttttcacgagaacaaactttgtaaatcttccataagcaaaatgacagctagtgcttgggatcgtacatgttaattttctgaaagataattctaagtgaaatttaaaataaataaatttttaatgacctgggtcttaaggatttaggaaaaatatgcatgctttaattgcatttccaaagtagcatcttgctagacctagttgagtcaggataacagagagataccacatggcaagaaaaacaaagtgacaattgtagagtcctcaattgtgtttacattaatagtggtgtttttacctatgaaattattctggatctaataggacattttacaaaatggcaagtatggaaaaccatggattctgaaagttaaaaatttagttgttctccccaatgtgtattttaatttggatggcagtctcatgcagattttttaaaagattctttaataacatgatttgtttgcctttctagatttctttatctttctgaccagcaacttagggagcagaatttaaattaggaagacaaagggaaagattcatttaaaccatatttttacaaagtttgtcatttgccccaaggtcaaattttaaattcttaattttcattttatttcccattttaggtaaaagtttgcatttaatcttagaattatgttatttttgttagtagtgtggaaacttagagaacttattgtatggtgccttgcaaaaatagagatagaaagattttagcatgcataccaatatagtatattacgcaatatataagcacacctaattaacagattaatatcagtaaaggtattgctgctggaatgaagaaaatgggatacgtttgtttctttttttctattgttacataattgccatgtggacttgtttatgattattgtgtagagtagcatttaagatttaactgtagcaaaaattactttaaccgctgtatttaagttagcatgttaattaattgtgtagacattttggcacaccatcacttttaactatatcataccaatggttttgtgcccataataaaaatggaaaaacctgttgaatgttacgtattggtatctttaatttcaacagtgggtaaactggtttcccagtatacaattcattgaaagcaaaattgattaattatttccatttaatttatacacactcaatacaaaatttaatgttgactttacgtaataaagtataatgcattttcttttttactgtttatgtatagtttacaaaataaagaatcttgtaaccaaa

SEQ ID NO: 185207 - DNA, 2906 bp, Homo sapiens
  Payload ID: 16474
  Gene Symbol: SPARCL1
  Gene Name: SPARC-like 1 (hevin)
  Uniprot ID: Q14515
  ENST ID: ENST00000282470
  CDS Start-End: 472-2466
aaaaaatgcataaagagccaagtgcttatattctggccaagttatgaggctctgagaacaagagcttgaggggaagactgttaaccccatccacgccaccagaattagctctttcccttttggtttgcaagcactgcctgtaaagccctcgcatgagaggccagcctgctagggaaatccaggaatctgcaacaaaaacgatgacagtctgaaatactctctggtgccaacctccaaattctcgtctgtcacttcagacccccactagttgacagagcagcagaatttcaactccagtagacttgaatatgcctctgggcaaagaagcagagctaacgaggaaagggatttaaagagtttttcttgggtgtttgtcaaacttttattccctgtctgtgtgcagaggggattcaacttcaatttttctgcagtggctctgggtccagccccttacttaaagatctggaaagcatgaagactgggctttttttcctatgtctcttgggaactgcagctgcaatcccgacaaatgcaagattattatctgatcattccaaaccaactgctgaaacggtagcacctgacaacactgcaatccccagtttaagggctgaagctgaagaaaatgaaaaagaaacagcagtatccacagaagacgattcccaccataaggctgaaaaatcatcagtactaaagtcaaaagaggaaagccatgaacagtcagcagaacagggcaagagttctagccaagagctgggattgaaggatcaagaggacagtgatggtcacttaagtgtgaatttggagtatgcaccaactgaaggtacattggacataaaagaagatatgagtgagcctcaggagaaaaaactctcagagaacactgattttttggctcctggtgttagttccttcacagattctaaccaacaagaaagtatcacaaagagagaggaaaaccaagaacaacctagaaattattcacatcatcagttgaacaggagcagtaaacatagccaaggcctaagggatcaaggaaaccaagagcaggatccaaatatttccaatggagaagaggaagaagaaaaagagccaggtgaagttggtacccacaatgataaccaagaaagaaagacagaattgcccagggagcatgctaacagcaagcaggaggaagacaatacccaatctgatgatattttggaagagtctgatcaaccaactcaagtaagcaagatgcaggaggatgaatttgatcagggtaaccaagaacaagaagataactccaatgcagaaatggaagaggaaaatgcatcgaacgtcaataagcacattcaagaaactgaatggcagagtcaagagggtaaaactggcctagaagctatcagcaaccacaaagagacagaagaaaagactgtttctgaggctctgctcatggaacctactgatgatggtaataccacgcccagaaatcatggagttgatgatgatggcgatgatgatggcgatgatggcggcactgatggccccaggcacagtgcaagtgatgactacttcatcccaagccaggcctttctggaggccgagagagctcaatccattgcctatcacctcaaaattgaggagcaaagagaaaaagtacatgaaaatgaaaatataggtaccactgagcctggagagcaccaagaggccaagaaagcagagaactcatcaaatgaggaggaaacgtcaagtgaaggcaacatgagggtgcatgctgtggattcttgcatgagcttccagtgtaaaagaggccacatctgtaaggcagaccaacagggaaaacctcactgtgtctgccaggatccagtgacttgtcctccaacaaaaccccttgatcaagtttgtggcactgacaatcagacctatgctagttcctgtcatctattcgctactaaatgcagactggaggggaccaaaaaggggcatcaactccagctggattattttggagcctgcaaatctattcctacttgtacggactttgaagtgattcagtttcctctacggatgagagactggctcaagaatatcctcatgcagctttatgaagccaactctgaacacgctggttatctaaatgagaagcagagaaataaagtcaagaaaatttacctggatgaaaagaggcttttggctggggaccatcccattgatcttctcttaagggactttaagaaaaactaccacatgtatgtgtatcctgtgcactggcagtttagtgaacttgaccaacaccctatggatagagtcttgacacattctgaacttgctcctctgcgagcatctctggtgcccatggaacactgcataacccgtttctttgaggagtgtgaccccaacaaggataagcacatcaccctgaaggagtggggccactgctttggaattaaagaagaggacatagatgaaaatctcttgttttgaacgaagattttaaagaactcaactttccagcatcctcctctgttctaaccacttcagaaatatatgcagctgtgatacttgtagatttatatttagcaaaatgttagcatgtatgacaagacaatgagagtaattgcttgacaacaacctatgcaccaggtatttaacattaactttggaaacaaaaatgtacaattaagtaaagtcaacatatgcaaaatactgtacattgtgaacagaagtttaattcatagtaatttcactctctgcattgacttatgagataattaatgattaaactattaatgataaaaataatgcatttgtattgttcataatatcatgtgcacttcaagaaaatggaatgctactcttttgtggtttacgtgtattattttcaatatcttaataccctaataaagagtccataaaaatccaaa

SEQ ID NO: 185208 - DNA, 568 bp, Homo sapiens
  Payload ID: 16474
  Gene Symbol: SPARCL1
  Gene Name: SPARC-like 1 (hevin)
  ENST ID: ENST00000458304
  CDS Start-End: 400-568
actgcctgtaaagccctcgcatgagaggccagcctgctagggaaatccaggaatctgcaacaaaaacgatgacagtctgaaatactctctggtgccaacctccaaattctcgtctgtcacttcagacccccactagttgacagagcagcagaatttcaactccagtagacttgaatatgcctctgggcaaagaagcagagctaacgaggaaagggatttaaagagtttttcttgggtgtttgtcaaacttttattccctgtctgtgtgcagaggggattcaacttcaatttttctgcagtggctctgggtccagccccttacttaaagttattcaatctcctgagcctaacagcaatgtagaaacggaactttttgcttttccaaaagatctggaaagcatgaagactgggctttttttcctatgtctcttgggaactgcagctgcaatcccgacaaatgcaagattattatctgatcattccaaaccaactgctgaaacggtagcacctgacaacactgcaatccccagtttaagggctgaagctgaagaaaatgaaaaagaaacag

SEQ ID NO: 185209 - DNA, 2994 bp, Homo sapiens
  Payload ID: 16474
  Gene Symbol: SPARCL1
  Gene Name: SPARC-like 1 (hevin)
  Uniprot ID: Q14515
  ENST ID: ENST00000418378
  CDS Start-End: 573-2567
aaaaatgcataaagagccaagtgcttatattctggccaagttatgaggctctgagaacaagagcttgaggggaagactgttaaccccatccacgccaccagaattagctctttcccttttggtttgcaagcactgcctgtaaagccctcgcatgagaggccagcctgctagggaaatccaggaatctgcaacaaaaacgatgacagtctgaaatactctctggtgccaacctccaaattctcgtctgtcacttcagacccccactagttgacagagcagcagaatttcaactccagtagacttgaatatgcctctgggcaaagaagcagagctaacgaggaaagggatttaaagagtttttcttgggtgtttgtcaaacttttattccctgtctgtgtgcagaggggattcaacttcaatttttctgcagtggctctgggtccagccccttacttaaaggccataagatgttttattgaaagaaactttcaatatcaagtaatccaaccaaccttctaagataagccttttccttcaacacaaagaagtgcattttgccaaatctggaaagcatgaagactgggctttttttcctatgtctcttgggaactgcagctgcaatcccgacaaatgcaagattattatctgatcattccaaaccaactgctgaaacggtagcacctgacaacactgcaatccccagtttaagggctgaagctgaagaaaatgaaaaagaaacagcagtatccacagaagacgattcccaccataaggctgaaaaatcatcagtactaaagtcaaaagaggaaagccatgaacagtcagcagaacagggcaagagttctagccaagagctgggattgaaggatcaagaggacagtgatggtcacttaagtgtgaatttggagtatgcaccaactgaaggtacattggacataaaagaagatatgagtgagcctcaggagaaaaaactctcagagaacactgattttttggctcctggtgttagttccttcacagattctaaccaacaagaaagtatcacaaagagagaggaaaaccaagaacaacctagaaattattcacatcatcagttgaacaggagcagtaaacatagccaaggcctaagggatcaaggaaaccaagagcaggatccaaatatttccaatggagaagaggaagaagaaaaagagccaggtgaagttggtacccacaatgataaccaagaaagaaagacagaattgcccagggagcatgctaacagcaagcaggaggaagacaatacccaatctgatgatattttggaagagtctgatcaaccaactcaagtaagcaagatgcaggaggatgaatttgatcagggtaaccaagaacaagaagataactccaatgcagaaatggaagaggaaaatgcatcgaacgtcaataagcacattcaagaaactgaatggcagagtcaagagggtaaaactggcctagaagctatcagcaaccacaaagagacagaagaaaagactgtttctgaggctctgctcatggaacctactgatgatggtaataccacgcccagaaatcatggagttgatgatgatggcgatgatgatggcgatgatggcggcactgatggccccaggcacagtgcaagtgatgactacttcatcccaagccaggcctttctggaggccgagagagctcaatccattgcctatcacctcaaaattgaggagcaaagagaaaaagtacatgaaaatgaaaatataggtaccactgagcctggagagcaccaagaggccaagaaagcagagaactcatcaaatgaggaggaaacgtcaagtgaaggcaacatgagggtgcatgctgtggattcttgcatgagcttccagtgtaaaagaggccacatctgtaaggcagaccaacagggaaaacctcactgtgtctgccaggatccagtgacttgtcctccaacaaaaccccttgatcaagtttgtggcactgacaatcagacctatgctagttcctgtcatctattcgctactaaatgcagactggaggggaccaaaaaggggcatcaactccagctggattattttggagcctgcaaatctattcctacttgtacggactttgaagtgattcagtttcctctacggatgagagactggctcaagaatatcctcatgcagctttatgaagccaactctgaacacgctggttatctaaatgagaagcagagaaataaagtcaagaaaatttacctggatgaaaagaggcttttggctggggaccatcccattgatcttctcttaagggactttaagaaaaactaccacatgtatgtgtatcctgtgcactggcagtttagtgaacttgaccaacaccctatggatagagtcttgacacattctgaacttgctcctctgcgagcatctctggtgcccatggaacactgcataacccgtttctttgaggagtgtgaccccaacaaggataagcacatcaccctgaaggagtggggccactgctttggaattaaagaagaggacatagatgaaaatctcttgttttgaacgaagattttaaagaactcaactttccagcatcctcctctgttctaaccacttcagaaatatatgcagctgtgatacttgtagatttatatttagcaaaatgttagcatgtatgacaagacaatgagagtaattgcttgacaacaacctatgcaccaggtatttaacattaactttggaaacaaaaatgtacaattaagtaaagtcaacatatgcaaaatactgtacattgtgaacagaagtttaattcatagtaatttcactctctgcattgacttatgagataattaatgattaaactattaatgataaaaataatgcatttgtattgttcataatatcatgtgcacttcaagaaaatggaatgctactcttttgtggtttacgtgtattattttcaatatcttaataccctaataaagagtcc

SEQ ID NO: 185210 - DNA, 950 bp, Homo sapiens
  Payload ID: 16474
  Gene Symbol: SPARCL1
  Gene Name: SPARC-like 1 (hevin)
  ENST ID: ENST00000434434
  CDS Start-End: 527-950
ggctctgagaacaagagcttgaggggaagactgttaaccccatccacgccaccagaattagctctttcccttttggtttgcaagcactgcctgtaaagccctcgcatgagaggccagcctgctagggaaatccaggaatctgcaacaaaaacgatgacagtctgaaatactctctggtgccaacctccaaattctcgtctgtcacttcagacccccactagttgacagagcagcagaatttcaactccagtagacttgaatatgcctctgggcaaagaagcagagctaacgaggaaagggatttaaagagtttttcttgggtgtttgtcaaacttttattccctgtctgtgtgcagaggggattcaacttcaatttttctgcagtggctctgggtccagccccttacttaaaggccataagatgttttattgaaagaaactttcaatatcaagtaatccaaccaaccttctaagataagccttttccttcaacacaaagaagtgcattttgccaaatctggaaagcatgaagactgggctttttttcctatgtctcttgggaactgcagctgcaatcccgacaaatgcaagattattatctgatcattccaaaccaactgctgaaacggtagcacctgacaacactgcaatccccagtttaagggctgaagctgaagaaaatgaaaaagaaacagcagtatccacagaagacgattcccaccataaggctgaaaaatcatcagtactaaagtcaaaagaggaaagccatgaacagtcagcagaacagggcaagagttctagccaagagctgggattgaaggatcaagaggacagtgatggtcacttaagtgtgaatttggagtatgcaccaactgaaggtacattggacataaaagaagatatgagtgagcctcaggagaaaaaactctcagagaacactgattttttgg

SEQ ID NO: 185211 - DNA, 2520 bp, Homo sapiens
  Payload ID: 16474
  Gene Symbol: SPARCL1
  Gene Name: SPARC-like 1 (hevin)
  Uniprot ID: Q14515
  ENST ID: ENST00000503414
  CDS Start-End: 544-2163
aacttcaatttttctgcagtggctctgggtccagccccttacttaaagatctggaaagcatgaagactgggctttttttcctatgtctcttgggaactgcagctgcaatcccggtgaaaaggagataagaagcaaaggagcaaaccaaacctaatatgaatcctgtactttggccagaagccgtggctcacatctgtaatcccagcactttgggaggccaagacaaatgcaagattattatctgatcattccaaaccaactgctgaaacggtagcacctgacaacactgcaatccccagtttaagggctgaagctgaagaaaatgaaaaagaaacagcagtatccacagaagacgattcccaccataaggctgaaaaatcatcagtactaaagtcaaaagaggaaagccatgaacagtcagcagaacagggcaagagttctagccaagagctgggattgaaggatcaagaggacagtgatggtcacttaagtgtgaatttggagtatgcaccaactgaaggtacattggacataaaagaagatatgagtgagcctcaggagaaaaaactctcagagaacactgattttttggctcctggtgttagttccttcacagattctaaccaacaagaaagtatcacaaagagagaggaaaaccaagaacaacctagaaattattcacatcatcagttgaacaggagcagtaaacatagccaaggcctaagggatcaaggaaaccaagagcaggatccaaatatttccaatggagaagaggaagaagaaaaagagccaggtgaagttggtacccacaatgataaccaagaaagaaagacagaattgcccagggagcatgctaacagcaagcaggaggaagacaatacccaatctgatgatattttggaagagtctgatcaaccaactcaagtaagcaagatgcaggaggatgaatttgatcagggtaaccaagaacaagaagataactccaatgcagaaatggaagaggaaaatgcatcgaacgtcaataagcacattcaagaaactgaatggcagagtcaagagggtaaaactggcctagaagctatcagcaaccacaaagagacagaagaaaagactgtttctgaggctctgctcatggaacctactgatgatggtaataccacgcccagaaatcatggagttgatgatgatggcgatgatgatggcgatgatggcggcactgatggccccaggcacagtgcaagtgatgactacttcatcccaagccaggcctttctggaggccgagagagctcaatccattgcctatcacctcaaaattgaggagcaaagagaaaaagtacatgaaaatgaaaatataggtaccactgagcctggagagcaccaagaggccaagaaagcagagaactcatcaaatgaggaggaaacgtcaagtgaaggcaacatgagggtgcatgctgtggattcttgcatgagcttccagtgtaaaagaggccacatctgtaaggcagaccaacagggaaaacctcactgtgtctgccaggatccagtgacttgtcctccaacaaaaccccttgatcaagtttgtggcactgacaatcagacctatgctagttcctgtcatctattcgctactaaatgcagactggaggggaccaaaaaggggcatcaactccagctggattattttggagcctgcaaatctattcctacttgtacggactttgaagtgattcagtttcctctacggatgagagactggctcaagaatatcctcatgcagctttatgaagccaactctgaacacgctggttatctaaatgagaagcagagaaataaagtcaagaaaatttacctggatgaaaagaggcttttggctggggaccatcccattgatcttctcttaagggactttaagaaaaactaccacatgtatgtgtatcctgtgcactggcagtttagtgaacttgaccaacaccctatggatagagtcttgacacattctgaacttgctcctctgcgagcatctctggtgcccatggaacactgcataacccgtttctttgaggagtgtgaccccaacaaggataagcacatcaccctgaaggagtggggccactgctttggaattaaagaagaggacatagatgaaaatctcttgttttgaacgaagattttaaagaactcaactttccagcatcctcctctgttctaaccacttcagaaatatatgcagctgtgatacttgtagatttatatttagcaaaatgttagcatgtatgacaagacaatgagagtaattgcttgacaacaacctatgcaccaggtatttaacattaactttggaaacaaaaatgtacaattaagtaaagtcaacatatgcaaaatactgtacattgtgaacagaagtttaattcatagtaatttcactctctgcattgacttatgagataattaatgattaaactattaatgataaaaataatgcatttgtattgttcataatatcatgtgcacttcaaga

SEQ ID NO: 185212 - DNA, 587 bp, Homo sapiens
  Payload ID: 16474
  Gene Symbol: SPARCL1
  Gene Name: SPARC-like 1 (hevin)
  ENST ID: ENST00000512317
  CDS Start-End: 228-587
aaaaagacatcaagtcctttcatgctgtcctgggaaaggcggtttggaacaagttatcctgattctagagacgatgcaaagcactgtgctaggcaccaggagaatgcagaaagggcacatccccttccttcaaggagtttacagctttctcagaagcagaggggattcaacttcaatttttctgcagtggctctgggtccagccccttacttaaagatctggaaagcatgaagactgggctttttttcctatgtctcttgggaactgcagctgcaatcccgacaaatgcaagattattatctgatcattccaaaccaactgctgaaacggtagcacctgacaacactgcaatccccagtttaagggctgaagctgaagaaaatgaaaaagaaacagcagtatccacagaagacgattcccaccataaggctgaaaaatcatcagtactaaagtcaaaagaggaaagccatgaacagtcagcagaacagggcaagagttctagccaagagctgggattgaaggatcaagaggacagtgatggtcacttaagtgtgaatttggagtatgcaccaactgaaggtacattg

SEQ ID NO: 185213 - DNA, 583 bp, Homo sapiens
  Payload ID: 16474
  Gene Symbol: SPARCL1
  Gene Name: SPARC-like 1 (hevin)
  ENST ID: ENST00000509407
  CDS Start-End: 153-583
attgtctgaggcaaaaagacatcaagtcctttcatgctgtcctgggaaaggcggtttggaacaagttatcctgattctagagacaggggattcaacttcaatttttctgcagtggctctgggtccagccccttacttaaagatctggaaagcatgaagactgggctttttttcctatgtctcttgggaactgcagctgcaatcccgacaaatgcaagattattatctgatcattccaaaccaactgctgaaacggtagcacctgacaacactgcaatccccagtttaagggctgaagctgaagaaaatgaaaaagaaacagcagtatccacagaagacgattcccaccataaggctgaaaaatcatcagtactaaagtcaaaagaggaaagccatgaacagtcagcagaacagggcaagagttctagccaagagctgggattgaaggatcaagaggacagtgatggtcacttaagtgtgaatttggagtatgcaccaactgaaggtacattggacataaaagaagatatgagtgagcctcaggagaaaaaactctcagagaacactgattttttggctcctgg

SEQ ID NO: 185214 - DNA, 561 bp, Homo sapiens
  Payload ID: 16474
  Gene Symbol: SPARCL1
  Gene Name: SPARC-like 1 (hevin)
  ENST ID: ENST00000535835
  CDS Start-End: 179-561
taaagttattcaatctcctgagcctaacagcaatgtagaaacggaactttttgcttttccaaaaggccataagatgttttattgaaagaaactttcaatatcaagtaatccaaccaaccttctaagataagccttttccttcaacacaaagaagtgcattttgccaaatctggaaagcatgaagactgggctttttttcctatgtctcttgggaactgcagctgcaatcccgacaaatgcaagattattatctgatcattccaaaccaactgctgaaacggtagcacctgacaacactgcaatccccagtttaagggctgaagctgaagaaaatgaaaaagaaacagcagtatccacagaagacgattcccaccataaggctgaaaaatcatcagtactaaagtcaaaagaggaaagccatgaacagtcagcagaacagggcaagagttctagccaagagctgggattgaaggatcaagaggacagtgatggtcacttaagtgtgaatttggagtatgcaccaactgaaggtacattggacataaaagaagatatgagtga

SEQ ID NO: 185215 - DNA, 583 bp, Homo sapiens
  Payload ID: 16474
  Gene Symbol: SPARCL1
  Gene Name: SPARC-like 1 (hevin)
  ENST ID: ENST00000543631
  CDS Start-End: 317-583
actagttgacagagcagcagaatttcaactccagtagacttgaatatgcctctgggcaaagaagcagagctaacgaggaaagggatttaaagagtttttcttgggtgtttgtcaaacttttattccctgtctgtgtgcagaggggattcaacttcaatttttctgcagtggctctgggtccagccccttacttaaaggtattaaaggtcactctgcaagagaaaaaaagaaaagaaaggaaaagaaaagaaaaaaaaacatgcttttaactgcagatcaatactgttgaaacagtacaccaagagatctggaaagcatgaagactgggctttttttcctatgtctcttgggaactgcagctgcaatcccgacaaatgcaagattattatctgatcattccaaaccaactgctgaaacggtagcacctgacaacactgcaatccccagtttaagggctgaagctgaagaaaatgaaaaagaaacagcagtatccacagaagacgattcccaccataaggctgaaaaatcatcagtactaaagtcaaaagaggaaagccatgaacagtcagcagaacagggcaag

SEQ ID NO: 185216 - DNA, 818 bp, Homo sapiens
  Payload ID: 16474
  Gene Symbol: SPARCL1
  Gene Name: SPARC-like 1 (hevin)
  ENST ID: ENST00000541496
  CDS Start-End: 763-818
agaattagctctttcccttttggtttgcaagcactgcctgtaaagccctcgcatgagaggccagcctgctagggaaatccaggaatctgcaacaaaaacgatgacagtctgaaatactctctggtgccaacctccaaattctcgtctgtcacttcagacccccactagttgacagagcagcagaatttcaactccagtagacttgaatatgcctctgggcaaagaagcagagctaacgaggaaagggatttaaagagtttttcttgggtgtttgtcaaacttttattccctgtctgtgtgcagaggggattcaacttcaatttttctgcagtggctctgggtccagccccttacttaaagatctggaaagcatgaagactgggctttttttcctatgtctcttgggaactgcagctgcaatcccgtttttaattttttcagacaaatgcaagattattatctgatcattccaaaccaactgctgaaacggtagcacctgacaacactgcaatccccagtttaagggctgaagctgaagaaaatgaaaaagaaacagcagtatccacagaagacgattcccaccataaggctgaaaaatcatcagtactaaagtcaaaagaggaaagccatgaacagtcagcagaacagggcaagagttctagccaagagctgggattgaaggatcaagaggacagtgatggtcacttaagtgtgaatttggagtatgcaccaactgaaggtacattggacataaaagaagatatgagtgagcctcaggagaaaaaactctcagagaacactgattttttggctcctgg

SEQ ID NO: 185217 - DNA, 7774 bp, Homo sapiens
  Payload ID: 16475
  Gene Symbol: SPG11
  Gene Name: spastic paraplegia 11 (autosomal recessive)
  Uniprot ID: Q96JI7
  ENST ID: ENST00000261866
  CDS Start-End: 18-7349
gtaaccgccgggccaagatggctgcagaggaaggggtcgcgagtgctgcttccgccggcggtagctggggcaccgcggccatggggcgggttctaccgatgctgttggtgccagtccccgccgaggcgatggggcagctcggctcccgggcgcagctgcgcacacagccggaggctctggggagcctgacggctgcgggcagcctccaagtgctttctttgacgcctggcagccggggcgggggtcgctgctgcctggagggccccttctggcactttctatgggaggattctcgtaacagcagcacaccaactgaaaagcccaaactgctcgctcttggtgaaaattatgaactgcttatctatgaatttaatttgaaagatggaagatgtgatgcaaccattttgtatagctgtagtagggaggcattgcaaaagctcattgacgatcaagatatcagtatttccttattgtctttgagaatcctgtcatttcacaataacacatcattactgttcatcaacaaatgtgtcatcctacatattatatttcctgaaagagatgctgcaattagagtactcaactgtttcacacttcccttgcctgcacaggcagtggacatgattattgacacgcagctctgcagaggaattctttttgttttgagtagtttaggctggatctacatttttgatgttgtggatggtacatatgtagctcatgtggatttagcacttcacaaagaagacatgtgtaatgagcagcaacaggagccagccaagatttcttcatttacttcactgaaagtttctcaagacctcgatgttgcagtgattgtcagctcctccaactccgcagttgctcttaacttaaatttgtatttcaggcaacacccaggacacctactgtgtgaaagaatactagaagatcttcctattcaaggacctaagggcgtagatgaagatgatcctgttaactctgcctacaacatgaaactggccaagttttccttccaaattgataggtcttggaaagcccagctatcatcattgaatgaaacaataaagaactccaaactggaggtttcctgttgtgctccatggttccaggatattttgcatttggagtcacctgaatctggtaaccacagtacaagtgtgcagagctgggccttcattccacaggacataatgcatgggcaatataatgttctacagaaagatcatgccaagaccagtgatccaggaagatcatggaaaataatgcacatcagtgaacaagaggaacccatagagcttaaatgtgtgtctgtgacaggattcactgcactgtttacttgggaagtggaaaggatgggctataccattaccctctgggatttggagacccagggcatgcagtgtttttcccttggcacaaagtgtattcctgtagacagtagtggagaccagcagctgtgctttgttttgacagagaatggactctctctgattttgtttggtttgactcaagaagagtttttaaacagactcatgatccatggaagtgccagcactgtggacactctttgtcatctcaatggctggggaaggtgctcaattcccatacatgcactagaggccgggatagaaaatcgtcagctggacacagtaaatttctttttgaagagcaaggaaaatctttttaatccatcctcaaaatcttctgtatctgatcagtttgatcacttgtcatcccatttatatttaagaaatgtggaagagctgataccagcattggatttactttgctcggcaattagagaaagttattctgaaccccaaagcaaacacttttcagaacaattgcttaatcttacactgtctttccttaacaaccaaataaaggagcttttcattcacactgaagaactagatgaacatctgcaaaaaggagtgaacattttgactagctacattaatgaacttcgaaccttcatgataaagtttccttggaagctaacagatgctatagatgaatatgatgtacatgaaaatgtccccaaagtaaaggagagcaatatatggaagaaactcagctttgaggaagttattgccagcgccattttaaacaacaaaataccagaggcacagactttcttcaggattgatagtcattctgctcaaaaacttgaggagcttattggcataggcctaaatttggtctttgacaatttaaaaaagaacaatataaaggaagcctctgaacttttgaagaatatggggtttgatgtaaaaggccaattgctcaagatctgcttctatacaactaataaaaatatacgtgactttttggttgaaattttaaaagaaaaaaattatttttctgaaaaagagaaaagaactatagacttcgtgcatcaagttgagaagctttatttgggacatttccaagaaaatatgcaaatccagtcatttcccaggtactggataaaggaacaagattttttcaagcacaagtctgttttggactcattcctgaaatatgattgtaaagatgaatttaacaaacaggaccatagaattgtgttaaattgggctctgtggtgggatcaactaacacaagaatccatccttctccccaggataagtccagaagaatacaaatcatattcccctgaagccctctggagatacctcacagctcgccatgattggttaaacattatcttatggattggagaatttcaaacccagcatagttatgcttcacttcagcagaacaaatggccccttctgactgttgatgttattaaccagaatacttcctgtaacaactacatgaggaatgaaattttagataagctggccaggaatggggtttttttggcatctgaactggaagactttgaatgcttcctcctaagactgagccgtattggaggtgtaatacaggataccctccctgttcaaaactacaagaccaaagaaggttgggatttccattctcaattcattctctattgtttggagcacagtctgcagcatcttctttatgtctaccttgactgttacaaacttagtcctgaaaattgtccctttttggaaaaaaaagagttacatgaagcacacccttggtttgaatttttagttcagtgtcgacaagttgccagtaacttaacagatcccaaactgatcttccaggctagccttgcaaatgctcagattttgattcccaccaatcaggccagtgtaagcagtatgctattggaaggacataccctcctggcccttgctactacaatgtattctcctgggggtgtcagtcaggttgttcagaatgaagaaaatgaaaactgtttgaagaaagtggatccccagctattgaagatggcattaactccttaccccaagctaaaaactgctctcttcccacagtgcactcctcctagtgtcctgccatctgatattacaatctaccaccttattcagtcattatcaccctttgatcctagcagattgtttggctggcagtctgctaacacactagctataggagatgcatggagtcatctcccacatttctctagccctgacctggttaataaatatgctatagtggaacgtctgaattttgcttattatttacataatgggcggccatcatttgcatttggtacttttctggtccaggaattaatcaagagcaagactcccaagcagctgatccagcaagtaggcaatgaagcctatgttatagggctctcctccttccacataccttcaataggagctgcatgtgtttgtttcttagaattgcttggccttgacagcctcaagctcagagttgatatgaaagtggccaatataattttgagctacaagtgcagaaatgaagatgctcagtacagctttatcagagagtctgtagccgaaaaactatctaaactagctgatggtgaaaagacaaccacagaagaattgcttgttctcttagaagaaggtacatggaacagcattcagcaacaggaaataaagaggttatccagtgaatctagcagccaatgggcattagtggtgcagttctgcaggctacacaatatgaaactaagcatatcttaccttagagaatgtgccaaagcaaatgattggctgcagttcattattcacagccaactccacaactaccacccagcagaggtgaaatcccttatccagtacttcagcccagtcattcaagaccacttaaggctggcttttgagaacttgccctcagtgcccacctccaaaatggacagcgatcaagtctgcaataagtgcccccaggaacttcaaggaagcaaacaagagatgaccgatttatttgaaattctgctccaatgctcagaggagccagactcctggcactggcttctggttgaagcagtgaaacaacaggcccctatcctcagtgttctggcctcatgtctccagggtgccagtgccatttcttgtctctgtgtttggatcatcacttctgtggaggacaatgttgcaactgaagcaatgggacacattcaggactcaacagaggaccatacctggaaccttgaggatctttcagtcatctggagaacattattaacaagacaaaagagcaaaactctcatcagaggtttccagcttttctttaaggattccccgttactactggtgatggagatgtatgaactgtgtatgttcttcaggaattataaagaagctgaagctaaacttctggagtttcagaagagccttgaaacgcttaacacagcagccacaaaggtccaccctgtcatccctgccatgtggctggaggatcaggtgtgtttccttttgaagcttatgctacagcagtgtaagacccagtatgagctggggaagcttttacagctctttgttgaaagagagcatctcttctctgatggtccagatgtgaaaaagctttgcatcctttgccagattttgaaggatacatccatagccattaatcatacaattattaccagctacagcattgagaatcttcagcatgaatgtagatctattttggaaagactgcagacagatggacaattcgctttggccaggagggtagcagaattagctgagttacctgtggacaacttggttattaaagagataacacaggaaatgcagaccctaaaacacattgaacagtggtcactaaaacaagcaagaattgacttctggaaaaaatgccatgagaattttaagaaaaattcaatttcaagcaaagcagcttcttcctttttctcaacccaggcccatgtggcatgtgagcacccaactggatggagcagcatggaggagcgccatctgctgctcaccttggcagggcactggcttgcccaggaggacgtggtgcccttggataagctggaggagctggagaagcagatctggctgtgccgcatcacccagcacactcttggaagaaatcaggaggaaacagagcccagattttctcgacagatctcaactagtggtgaactttcctttgatagtttagccagtgagttttccttctccaagttggctgctctgaacacatcaaaatacttagaacttaacagccttccatccaaagagacatgcgagaatagattggattggaaagagcaggagtcactaaactttttgattgggcgcctactggatgatggctgtgtgcatgaagcaagtagagtatgccggtattttcatttttataatccagatgtcgccttggtattgcactgcagagcactggcctcaggggaagctagtatggaggatctgcacccagagatccatgctctcctacaaagtgctgagctgcttgaggaagaagcacccgacattcccctaaggagagtccacagcacttcaagtctggatagtcagaagtttgtgacagtgccctccagtaatgaagtggtaactaacctggaagtgctgacaagcaaatgcctccatgggaagaactactgtcgacaggtcctctgtctgtatgatcttgccaaggagttgggctgttcctacacagatgttgctgctcaggatggtgaagccatgctccggaaaatcttggcctctcagcagcctgaccgatgcaaacgagcccaggccttcatcagcacacagggccttaagccagatactgtggctgaactcgtggcagaagaggtgacacgggagctgcttacttcatcacagggaacaggacataagcagatgttcaacccaacagaggaaagccagacatttcttcagctgaccactctgtgtcaagaccgcacattggtaggcatgaagttgttggataagatttcctccgttccccatggggaactgtcttgcaccacagagctcctgatcctggcccatcattgcttcaccctgacgtgccacatggagggcatcatccgagtcctacaggccgcccacatgctcacagataaccacctggcccccagtgaggagtatgggctggtggtacggctcctcactggcattggaaggtacaacgagatgacatacatatttgatttgctgcataaaaagcactactttgaagtgctaatgaggaagaagttggatccgagtggtaccctgaaaacagccctgctggactacatcaaacgctgccgtcctggagacagtgaaaagcacaatatgattgccctgtgcttcagcatgtgccgggagattggcgagaaccacgaggcagctgcccgcatccaactgaaattgattgagtctcagccctgggaggacagcctcaaggatgggcaccagctgaaacaactgctgctgaaggccctgactctgatgttggatgcagcagagagttatgccaaggactcctgtgtgcgacaggcccagcactgtcagcggctcaccaagttgataactctgcagattcactttctgaacactggccagaacacaatgctcatcaacttgggccgccacaagctgatggactgtattctggccctacctcggttctaccaggcttctattgtggctgaggcctacgattttgttccagattgggctgaaattttataccagcaagtgattcttaaaggagactttaattacttggaagaatttaagcagcaaaggttattaaagtccagtatatttgaagagatttccaaaaaatataaacaacatcagcctactgacatggtcatggaaaacctgaagaaattactcacatattgtgaagatgtttacctgtattacaagttggcatacgaacacaagttttatgaaattgtaaatgtgcttctgaaggaccctcagacaggttgctgtctaaaggacatgctagcaggttagatgatttcataggtgtctgttttcttgtactgttagcagattctgacagatgtgatgagaagaagaatgcattggagatctttgctaaagttgaacaatcccggtactgtaccatatcagtcctttgtgggtagtaggtagcaagtaagaaacttttcaggaggaaattcctatttaaaatagattgattttagatgattgttcatccacaccattttatatagatactagtattaagatcaaaagcttcctcttcctcaggacagcttctactttagatgatccaataatgattaaagaatacctgtacctgcagattccagtttcaaagaaatttaattattatttacacagttaaggaacaggtgatacattttcatttgttagaaactgatctttctgtaataaaatagattttcaattca

SEQ ID NO: 185218 - DNA, 6935 bp, Homo sapiens
  Payload ID: 16475
  Gene Symbol: SPG11
  Gene Name: spastic paraplegia 11 (autosomal recessive)
  ENST ID: ENST00000427534
  CDS Start-End: 1-6798
atggctgcagaggaaggggtcgcgagtgctgcttccgccggcggtagctggggcaccgcggccatggggcgggttctaccgatgctgttggtgccagtccccgccgaggcgatggggcagctcggctcccgggcgcagctgcgcacacagccggaggctctggggagcctgacggctgcgggcagcctccaagtgctttctttgacgcctggcagccggggcgggggtcgctgctgcctggagggccccttctggcactttctatgggaggattctcgtaacagcagcacaccaactgaaaagcccaaactgctcgctcttggtgaaaattatgaactgcttatctatgaatttaatttgaaagatggaagatgtgatgcaaccattttgtatagctgtagtagggaggcattgcaaaagctcattgacgatcaagatatcagtatttccttattgtctttgagaatcctgtcatttcacaataacacatcattactgttcatcaacaaatgtgtcatcctacatattatatttcctgaaagagatgctgcaattagagtactcaactgtttcacacttcccttgcctgcacaggcagtggacatgattattgacacgcagctctgcagaggaattctttttgttttgagtagtttaggctggatctacatttttgatgttgtggatggtacatatgtagctcatgtggatttagcacttcacaaagaagacatgtgtaatgagcagcaacaggagccagccaagatttcttcatttacttcactgaaagtttctcaagacctcgatgttgcagtgattgtcagctcctccaactccgcagttgctcttaacttaaatttgtatttcaggcaacacccaggacacctactgtgtgaaagaatactagaagatcttcctattcaaggacctaagggcgtagatgaagatgatcctgttaactctgcctacaacatgaaactggccaagttttccttccaaattgataggtcttggaaagcccagctatcatcattgaatgaaacaataaagaactccaaactggaggtttcctgttgtgctccatggttccaggatattttgcatttggagtcacctgaatctggtaaccacagtacaagtgtgcagagctgggccttcattccacaggacataatgcatgggcaatataatgttctacagaaagatcatgccaagaccagtgatccaggaagatcatggaaaataatgcacatcagtgaacaagaggaacccatagagcttaaatgtgtgtctgtgacaggattcactgcactgtttacttgggaagtggaaaggatgggctataccattaccctctgggatttggagacccagggcatgcagtgtttttcccttggcacaaagtgtattcctgtagacagtagtggagaccagcagctgtgctttgttttgacagagaatggactctctctgattttgtttggtttgactcaagaagagtttttaaacagactcatgatccatggaagtgccagcactgtggacactctttgtcatctcaatggctggggaaggtgctcaattcccatacatgcactagaggccgggatagaaaatcgtcagctggacacagtaaatttctttttgaagagcaaggaaaatctttttaatccatcctcaaaatcttctgtatctgatcagtttgatcacttgtcatcccatttatatttaagaaatgtggaagagctgataccagcattggatttactttgctcggcaattagagaaagttattctgaaccccaaagcaaacacttttcagaacaattgcttaatcttacactgtctttccttaacaaccaaataaaggagcttttcattcacactgaagaactagatgaacatctgcaaaaaggagtgaacattttgactagctacattaatgaacttcgaaccttcatgataaagtttccttggaagctaacagatgctatagatgaatatgatgtacatgaaaatgtccccaaagtaaaggagagcaatatatggaagaaactcagctttgaggaagttattgccagcgccattttaaacaacaaaataccagaggcacagactttcttcaggattgatagtcattctgctcaaaaacttgaggagcttattggcataggcctaaatttggtctttgacaatttaaaaaagaacaatataaaggaagcctctgaacttttgaagaatatggggtttgatgtaaaaggccaattgctcaagatctgcttctatacaactaataaaaatatacgtgactttttggttgaaattttaaaagaaaaaaattatttttctgaaaaagagaaaagaactatagacttcgtgcatcaagttgagaagctttatttgggacatttccaagaaaatatgcaaatccagtcatttcccaggtactggataaaggaacaagattttttcaagcacaagtctgttttggactcattcctgaaatatgattgtaaagatgaatttaacaaacaggaccatagaattgtgttaaattgggctctgtggtgggatcaactaacacaagaatccatccttctccccaggataagtccagaagaatacaaatcatattcccctgaagccctctggagatacctcacagctcgccatgattggttaaacattatcttatggattggagaatttcaaacccagcatagttatgcttcacttcagcagaacaaatggccccttctgactgttgatgttattaaccagaatacttcctgtaacaactacatgaggaatgaaattttagataagctggccaggaatggggtttttttggcatctgaactggaagactttgaatgcttcctcctaagactgagccgtattggaggtgtaatacaggataccctccctgttcaaaactacaagaccaaagaaggttgggatttccattctcaattcattctctattgtttggagcacagtctgcagcatcttctttatgtctaccttgactgttacaaacttagtcctgaaaattgtccctttttggaaaaaaaagagttacatgaagcacacccttggtttgaatttttagttcagtgtcgacaagttgccagtaacttaacagatcccaaactgatcttccaggctagccttgcaaatgctcagattttgattcccaccaatcaggccagtgtaagcagtatgctattggaaggacataccctcctggcccttgctactacaatgtattctcctgggggtgtcagtcaggttgttcagaatgaagaaaatgaaaactgtttgaagaaagtggatccccagctattgaagatggcattaactccttaccccaagctaaaaactgctctcttcccacagtgcactcctcctagtgtcctgccatctgatattacaatctaccaccttattcagtcattatcaccctttgatcctagcagattgtttggctggcagtctgctaacacactagctataggagatgcatggagtcatctcccacatttctctagccctgacctggttaataaatatgctatagtggaacgtctgaattttgcttattatttacataatgggcggccatcatttgcatttggtacttttctggtccaggaattaatcaagagcaagactcccaagcagctgatccagcaagtaggcaatgaagcctatgttatagggctctcctccttccacataccttcaataggagctgcatgtgtttgtttcttagaattgcttggccttgacagcctcaagctcagagttgatatgaaagtggccaatataattttgagctacaagtgcagaaatgaagatgctcagtacagctttatcagagagtctgtagccgaaaaactatctaaactagctgatggtgaaaagacaaccacagaagaattgcttgttctcttagaagaaggtacatggaacagcattcagcaacaggaaataaagaggttatccagtgaatctagcagccaatgggcattagtggtgcagttctgcaggctacacaatatgaaactaagcatatcttaccttagagaatgtgccaaagcaaatgattggctgcagttcattattcacagccaactccacaactaccacccagcagaggtgaaatcccttatccagtacttcagcccagtcattcaagaccacttaaggctggcttttgagaacttgccctcagtgcccacctccaaaatggacagcgatcaagtctgcaataagtgcccccaggaacttcaaggaagcaaacaagagatgaccgatttatttgaaattctgctccaatgctcagaggagccagactcctggcactggcttctggttgaagcagtgaaacaacaggcccctatcctcagtgttctggcctcatgtctccagggtgccagtgccatttcttgtctctgtgtttggatcatcacttctgtggaggacaatgttgcaactgaagcaatgggacacattcaggactcaacagaggaccatacctggaaccttgaggatctttcagtcatctggagaacattattaacaagacaaaagagcaaaactctcatcagaggtttccagcttttctttaaggattccccgttactactggtgatggagatgtatgaactgtgtatgttcttcaggaattataaagaagctgaagctaaacttctggagtttcagaagagccttgaaacgcttaacacagcagccacaaaggtccaccctgtcatccctgccatgtggctggaggatcaggtgtgtttccttttgaagcttatgctacagcagtgtaagacccagtatgagctggggaagcttttacagctctttgttgaaagagagcatctcttctctgatggtccagatgtgaaaaagctttgcatcctttgccagattttgaaggatacatccatagccattaatcatacaattattaccagctacagcattgagaatcttcagcatgaatgtagatctattttggaaagactgcagacagatggacaattcgctttggccaggagggtagcagaattagctgagttacctgtggacaacttggttattaaagagataacacaggaaatgcagaccctaaaacacattgaacagtggtcactaaaacaagcaagaattgacttctggaaaaaatgccatgagaattttaagaaaaattcaatttcaagcaaagcagcttcttcctttttctcaacccaggcccatgtggcatgtgagcacccaactggatggagcagcatggaggagcgccatctgctgctcaccttggcagggcactggcttgcccaggaggacgtggtgcccttggataagctggaggagctggagaagcagatctggctgtgccgcatcacccagcacactcttggaagaaatcaggaggaaacagagcccagattttctcgacagatctcaactagtggtgaactttcctttgatagtttagccagtgagttttccttctccaagttggctgctctgaacacatcaaaatacttagaacttaacagccttccatccaaagagacatgcgagaatagattggattggaaagagcaggagtcactaaactttttgattgggcgcctactggatgatggctgtgtgcatgaagcaagtagagtatgccggtattttcatttttataatccagatgtcgccttggtattgcactgcagagcactggcctcaggggaagctagtatggaggatctgcacccagagatccatgctctcctacaaagtgctgagctgcttgaggaagaagcacccgacattcccctaaggagagtccacagcacttcaagtctggatagtcagaagtttgtgacagtgccctccagtaatgaagtggtaactaacctggaagtgctgacaagcaaatgcctccatgggaagaactactgtcgacaggtcctctgtctgtatgatcttgccaaggagttgggctgttcctacacagatgttgctgctcaggatggtgaagccatgctccggaaaatcttggcctctcagcagcctgaccgatgcaaacgagcccaggccttcatcagcacacagggccttaagccagatactgtggctgaactcgtggcagaagaggtgacacgggagctgcttacttcatcacagggaacaggacataagcagatgttcaacccaacagaggaaagccagacatttcttcagctgaccactctgtgtcaagaccgcacattggtaggcatgaagttgttggataagatttcctccgttccccatggggaactgtcttgcaccacagagctcctgatcctggcccatcattgcttcaccctgacgtgccacatggagggcatcatccgagtcctacaggccgcccacatgctcacagataaccacctggcccccagtgaggagtatgggctggtggtacggctcctcactggcattggaaggtacaacgagatgacatacatatttgatttgctgcataaaaagcactactttgaagtgctaatgaggaagaagttggatccgagtggtaccctgaaaacagccctgctggactacatcaaacgctgccgtcctggagacagtgaaaagcacaatatgattgccctgtgcttcagcatgtgccgggagattggcgagaaccacgaggcagctgcccgcatccaactgaaattgattgagtctcagccctgggatataaacaacatcagcctactgacatggtcatggaaaacctgaagaaattactcacatattgtgaagatgtttacctgtattacaagttggcatacgaacacaagttttatgaaattgtaaatgtgcttctgaaggaccctcagacaggttgctgtctaaaggacatgctagcaggttag

SEQ ID NO: 185219 - DNA, 7288 bp, Homo sapiens
  Payload ID: 16475
  Gene Symbol: SPG11
  Gene Name: spastic paraplegia 11 (autosomal recessive)
  Uniprot ID: Q96JI7
  ENST ID: ENST00000535302
  CDS Start-End: 29-7021
agtgaccggaagtaaccgccgggccaagatggctgcagaggaaggggtcgcgagtgctgcttccgccggcggtagctggggcaccgcggccatggggcgggttctaccgatgctgttggtgccagtccccgccgaggcgatggggcagctcggctcccgggcgcagctgcgcacacagccggaggctctggggagcctgacggctgcgggcagcctccaagtgctttctttgacgcctggcagccggggcgggggtcgctgctgcctggagggccccttctggcactttctatgggaggattctcgtaacagcagcacaccaactgaaaagcccaaactgctcgctcttggtgaaaattatgaactgcttatctatgaatttaatttgaaagatggaagatgtgatgcaaccattttgtatagctgtagtagggaggcattgcaaaagctcattgacgatcaagatatcagtatttccttattgtctttgagaatcctgtcatttcacaataacacatcattactgttcatcaacaaatgtgtcatcctacatattatatttcctgaaagagatgctgcaattagagtactcaactgtttcacacttcccttgcctgcacaggcagtggacatgattattgacacgcagctctgcagaggaattctttttgttttgagtagtttaggctggatctacatttttgatgttgtggatggtacatatgtagctcatgtggatttagcacttcacaaagaagacatgtgtaatgagcagcaacaggagccagccaagatttcttcatttacttcactgaaagtttctcaagacctcgatgttgcagtgattgtcagctcctccaactccgcagttgctcttaacttaaatttgtatttcaggcaacacccaggacacctactgtgtgaaagaatactagaagatcttcctattcaaggacctaagggcgtagatgaagatgatcctgttaactctgcctacaacatgaaactggccaagttttccttccaaattgataggtcttggaaagcccagctatcatcattgaatgaaacaataaagaactccaaactggaggtttcctgttgtgctccatggttccaggatattttgcatttggagtcacctgaatctggtaaccacagtacaagtgtgcagagctgggccttcattccacaggacataatgcatgggcaatataatgttctacagaaagatcatgccaagaccagtgatccaggaagatcatggaaaataatgcacatcagtgaacaagaggaacccatagagcttaaatgtgtgtctgtgacaggattcactgcactgtttacttgggaagtggaaaggatgggctataccattaccctctgggatttggagacccagggcatgcagtgtttttcccttggcacaaagtgtattcctgtagacagtagtggagaccagcagctgtgctttgttttgacagagaatggactctctctgattttgtttggtttgactcaagaagagtttttaaacagactcatgatccatggaagtgccagcactgtggacactctttgtcatctcaatggctggggaaggtgctcaattcccatacatgcactagaggccgggatagaaaatcgtcagctggacacagtaaatttctttttgaagagcaaggaaaatctttttaatccatcctcaaaatcttctgtatctgatcagtttgatcacttgtcatcccatttatatttaagaaatgtggaagagctgataccagcattggatttactttgctcggcaattagagaaagttattctgaaccccaaagcaaacacttttcagaacaattgcttaatcttacactgtctttccttaacaaccaaataaaggagcttttcattcacactgaagaactagatgaacatctgcaaaaaggagtgaacattttgactagctacattaatgaacttcgaaccttcatgataaagtttccttggaagctaacagatgctatagatgaatatgatgtacatgaaaatgtccccaaagtaaaggagagcaatatatggaagaaactcagctttgaggaagttattgccagcgccattttaaacaacaaaataccagaggcacagactttcttcaggattgatagtcattctgctcaaaaacttgaggagcttattggcataggcctaaatttggtctttgacaatttaaaaaagaacaatataaaggaagcctctgaacttttgaagaatatggggtttgatgtaaaaggccaattgctcaagatctgcttctatacaactaataaaaatatacgtgactttttggttgaaattttaaaagaaaaaaattatttttctgaaaaagagaaaagaactatagacttcgtgcatcaagttgagaagctttatttgggacatttccaagaaaatatgcaaatccagtcatttcccaggtactggataaaggaacaagattttttcaagcacaagtctgttttggactcattcctgaaatatgattgtaaagatgaatttaacaaacaggaccatagaattgtgttaaattgggctctgtggtgggatcaactaacacaagaatccatccttctccccaggataagtccagaagaatacaaatcatattcccctgaagccctctggagatacctcacagctcgccatgattggttaaacattatcttatggattggagaatttcaaacccagcatagttatgcttcacttcagcagaacaaatggccccttctgactgttgatgttattaaccagaatacttcctgtaacaactacatgaggaatgaaattttagataagctggccaggaatggggtttttttggcatctgaactggaagactttgaatgcttcctcctaagactgagccgtattggaggtgtaatacaggataccctccctgttcaaaactacaagaccaaagaaggttgggatttccattctcaattcattctctattgtttggagcacagtctgcagcatcttctttatgtctaccttgactgttacaaacttagtcctgaaaattgtccctttttggaaaaaaaagagttacatgaagcacacccttggtttgaatttttagttcagtgtcgacaagttgccagtaacttaacagatcccaaactgatcttccaggctagccttgcaaatgctcagattttgattcccaccaatcaggccagtgtaagcagtatgctattggaaggacataccctcctggcccttgctactacaatgtattctcctgggggtgtcagtcaggttgttcagaatgaagaaaatgaaaactgtttgaagaaagtggatccccagctattgaagatggcattaactccttaccccaagctaaaaactgctctcttcccacagtgcactcctcctagtgtcctgccatctgatattacaatctaccaccttattcagtcattatcaccctttgatcctagcagattgtttggctggcagtctgctaacacactagctataggagatgcatggagtcatctcccacatttctctagccctgacctggttaataaatatgctatagtggaacgtctgaattttgcttattatttacataatgggcggccatcatttgcatttggtacttttctggtccaggaattaatcaagagcaagactcccaagcagctgatccagcaagtaggcaatgaagcctatgttatagggctctcctccttccacataccttcaataggagctgcatgtgtttgtttcttagaattgcttggccttgacagcctcaagctcagagttgatatgaaagtggccaatataattttgagctacaagtgcagaaatgaagatgctcagtacagctttatcagagagtctgtagccgaaaaactatctaaactagctgatggtgaaaagacaaccacagaagaattgcttgttctcttagaagaaggtacatggaacagcattcagcaacaggaaataaagaggttatccagtgaatctagcagccaatgggcattagtggtgcagttctgcaggctacacaatatgaaactaagcatatcttaccttagagaatgtgccaaagcaaatgattggctgcagttcattattcacagccaactccacaactaccacccagcagaggtgaaatcccttatccagtacttcagcccagtcattcaagaccacttaaggctggcttttgagaacttgccctcagtgcccacctccaaaatggacagcgatcaagtctgcaataagtgcccccaggaacttcaaggaagcaaacaagagatgaccgatttatttgaaattctgctccaatgctcagaggagccagactcctggcactggcttctggttgaagcagtgaaacaacaggcccctatcctcagtgttctggcctcatgtctccagggtgccagtgccatttcttgtctctgtgtttggatcatcacttctgtggaggacaatgttgcaactgaagcaatgggacacattcaggactcaacagaggaccatacctggaaccttgaggatctttcagtcatctggagaacattattaacaagacaaaagagcaaaactctcatcagaggtttccagcttttctttaaggattccccgttactactggtgatggagatgtatgaactgtgtatgttcttcaggaattataaagaagctgaagctaaacttctggagtttcagaagagccttgaaacgcttaacacagcagccacaaaggtccaccctgtcatccctgccatgtggctggaggatcaggtgtgtttccttttgaagcttatgctacagcagtgtaagacccagtatgagctggggaagcttttacagctctttgttgaaagagagcatctcttctctgatggtccagatgtgaaaaagctttgcatcctttgccagattttgaaggatacatccatagccattaatcatacaattattaccagctacagcattgagaatcttcagcatgaatgtagatctattttggaaagactgcagacagatggacaattcgctttggccaggagggtagcagaattagctgagttacctgtggacaacttggttattaaagagataacacaggaaatgcagaccctaaaacacattgaacagtggtcactaaaacaagcaagaattgacttctggaaaaaatgccatgagaattttaagaaaaattcaatttcaagcaaagcagcttcttcctttttctcaacccaggcccatgtggcatgtgagcacccaactggatggagcagcatggaggagcgccatctgctgctcaccttggcagggcactggcttgcccaggaggacgtggtgcccttggataagctggaggagctggagaagcagatctggctgtgccgcatcacccagcacactcttggaagaaatcaggaggaaacagagcccagattttctcgacagatctcaactagtggtgaactttcctttgatagtttagccagtgagttttccttctccaagttggctgctctgaacacatcaaaatacttagaacttaacagccttccatccaaagagacatgcgagaatagattggattggaaagagcaggagtcactaaactttttgattgggcgcctactggatgatggctgtgtgcatgaagcaagtagagtatgccggtattttcatttttataatccagatgtcgccttggtattgcactgcagagcactggcctcaggggaagctagtatggaggatctgcacccagagatccatgctctcctacaaagtgctgagctgcttgaggaagaagcacccgacattcccctaaggagagtccacagcagacataagcagatgttcaacccaacagaggaaagccagacatttcttcagctgaccactctgtgtcaagaccgcacattggtaggcatgaagttgttggataagatttcctccgttccccatggggaactgtcttgcaccacagagctcctgatcctggcccatcattgcttcaccctgacgtgccacatggagggcatcatccgagtcctacaggccgcccacatgctcacagataaccacctggcccccagtgaggagtatgggctggtggtacggctcctcactggcattggaaggtacaacgagatgacatacatatttgatttgctgcataaaaagcactactttgaagtgctaatgaggaagaagttggatccgagtggtaccctgaaaacagccctgctggactacatcaaacgctgccgtcctggagacagtgaaaagcacaatatgattgccctgtgcttcagcatgtgccgggagattggcgagaaccacgaggcagctgcccgcatccaactgaaattgattgagtctcagccctgggaggacagcctcaaggatgggcaccagctgaaacaactgctgctgaaggccctgactctgatgttggatgcagcagagagttatgccaaggactcctgtgtgcgacaggcccagcactgtcagcggctcaccaagttgataactctgcagattcactttctgaacactggccagaacacaatgctcatcaacttgggccgccacaagctgatggactgtattctggccctacctcggttctaccaggcttctattgtggctgaggcctacgattttgttccagattgggctgaaattttataccagcaagtgattcttaaaggagactttaattacttggaagaatttaagcagcaaaggttattaaagtccagtatatttgaagagatttccaaaaaatataaacaacatcagcctactgacatggtcatggaaaacctgaagaaattactcacatattgtgaagatgtttacctgtattacaagttggcatacgaacacaagttttatgaaattgtaaatgtgcttctgaaggaccctcagacaggttgctgtctaaaggacatgctagcaggttagatgatttcataggtgtctgttttcttgtactgttagcagattctgacagatgtgatgagaagaagaatgcattggagatctttgctaaagttgaacaatcccggtactgtaccatatcagtcctttgtgggtagtaggtagcaagtaagaaacttttcaggaggaaattcctatttaaaatagattgattttagatgattgttcatccacaccattttatatagatactagtattaagatcaaaagcttcctcttcctcaggacagc

SEQ ID NO: 185220 - DNA, 413 bp, Homo sapiens
  Payload ID: 16475
  Gene Symbol: SPG11
  Gene Name: spastic paraplegia 11 (autosomal recessive)
  ENST ID: ENST00000560435
  CDS Start-End: 1-132
catagttatgcttcacttcagcagaacaaatggccccttctgactgttgatgttattaaccagaatacttcctgtaacaactacatgaggaatgaaattttagataagctggccaggtattataactgttgaactaatacccaatgggaagaatacaagggaagagcaagaaaaaataatggaatggggtttttttggcatctgaactggaagactttgaatgcttcctcctaagactgagccgtattggaggtgtaatacaggataccctccctgttcaaaactacaagaccaaagaaggttgggatttccattctcaattcattctctattgtttggagcacagtctgcagcatcttctttatgtctaccttgactgttacaaacttagtcctgaaaattgtccctttttg

SEQ ID NO: 185221 - DNA, 561 bp, Homo sapiens
  Payload ID: 16475
  Gene Symbol: SPG11
  Gene Name: spastic paraplegia 11 (autosomal recessive)
  ENST ID: ENST00000559822
  CDS Start-End: 1-394
ttcaagcaaagcagcttcttcctttttctcaacccaggcccatgtggcatgtgagcacccaactggatggagcagcatggaggagcgccatctgctgctcaccttggcagggcactggcttgcccaggaggacgtggtgcccttggataagctggaggagctggagaagcagatctggctgtgccgcatcacccagcacactcttggaagaaatcaggaggaaacagagcccagattttctcgacagatctcaactagtggtgaactttcctttgatagtttagccaagcactggcctcaggggaagctagtatggaggatctgcacccagagatccatgctctcctacaaagtgctgagctgcttgaggaagaagcacccgacattcccctaaggagagtccacagcacttcaagtctggatagtcagaagtttgtgacagtgccctccagtaatgaagtggtaactaacctggaagtgctgacaagcaaatgcctccatgggaagaactactgtcgacaggtcctctgtctgtatgatcttgccaaggagttgggctgt

SEQ ID NO: 185222 - DNA, 447 bp, Homo sapiens
  Payload ID: 16475
  Gene Symbol: SPG11
  Gene Name: spastic paraplegia 11 (autosomal recessive)
  ENST ID: ENST00000560858
  CDS Start-End: 1-300
cagcttttctttaaggattccccgttactactggtgatggagatgtatgaactgtgtatgttcttcaggaattataaagaagctgaagctaaacttctggagtttcagaagagccttgaaacgcttaacacagcagccacaaaggtccaccctgtcatccctgccatgtggctggaggatcaggtgtgtttccttttgaagcttatgctacagcagtgtaagacccagtatgagctggggaagcttttacagctctttgttgaaagagagcatctcttctctgatggtaaagaggattaggctgccttcagccaaatctgtcactgaagctatgcaaacggcccagccttctgagaaggtccagatgtgaaaaagctttgcatcctttgccagattttgaaggatacatccatagccattaatcatacaattattaccagctacagc

SEQ ID NO: 185223 - DNA, 468 bp, Homo sapiens
  Payload ID: 16475
  Gene Symbol: SPG11
  Gene Name: spastic paraplegia 11 (autosomal recessive)
  ENST ID: ENST00000557866
  CDS Start-End: 1-468
ttcactgcactgtttacttgggaagtggaaaggatgggctataccattaccctctgggatttggagacccagggcatgcagtgtttttcccttggcacaaagtgtattcctgtagacagtagtggagaccagcagctgtgctttgttttgacagagaatggactctctctgattttgtttggtttgactcaagaagagtttttaaacagactcatgatccatggaagtgccagcactgtggacactctttgtcatctcaatggctggggaaggtgctcaattcccatacatgcactagaggccgggatagaaaatcgtcagctggacacagtaaatttctttttgaagagcaaggaaaatctttttaatccatcctcaaaatcttctgtatctgatcagtttgatcacttgtcatcccatttatatttaagaagtaagtggaataaagatttctacatttgtatttat

SEQ ID NO: 185224 - DNA, 571 bp, Homo sapiens
  Payload ID: 16475
  Gene Symbol: SPG11
  Gene Name: spastic paraplegia 11 (autosomal recessive)
  ENST ID: ENST00000558155
  CDS Start-End: 1-309
cttatccagtacttcagcccagtcattcaagaccacttaaggctggcttttgagaacttgccctcagtgcccacctccaaaatggacagcgatcaagtctgcaataagtgcccccaggaacttcaaggaagcaaacaagagatgaccgatttatttgaaattctgctccaatgctcagaggagccagactcctggcactggcttctggttgaagcagtgaaacaacaggcccctatcctcagtgttctggcctcatgtctccaggtgaggatcatgagaagcctgaagattccccgttactactggtgatggagatgtatgaactgtgtatgttcttcaggaattataaagaagctgaagctaaacttctggagtttcagaagagccttgaaacgcttaacacagcagccacaaaggtccaccctgtcatccctgccatgtggctggaggatcaggtgtgtttccttttgaagcttatgctacagcagtgtaagacccagtatgagctggggaagcttttacagctctttgttgaaagagagcatctcttctctgatggtccagatgtgaa

SEQ ID NO: 185225 - DNA, 2127 bp, Homo sapiens
  Payload ID: 16475
  Gene Symbol: SPG11
  Gene Name: spastic paraplegia 11 (autosomal recessive)
  ENST ID: ENST00000559511
  CDS Start-End: 1-1703
ttgaacagtggtcactaaaacaagcaagaattgacttctggaaaaaatgccatgagaattttaagaaaaattcaatttcaagcaaagcagcttcttcctttttctcaacccaggcccatgtggcatgtgagcacccaactggatggagcagcatggaggagcgccatctgctgctcaccttggcagggcactggcttgcccaggaggacgtggtgcccttggataagctggaggagctggagaagcagatctggctgtgccgcatcacccagcacactcttggaagaaatcaggaggaaacagagcccagattttctcgacagatctcaactagtggtgaactttcctttgatagtttagccagtgagttttccttctccaagttggctgctctgaacacatcaaaatacttagaacttaacagccttccatccaaagagacatgcgagaatagattggattggaaagagcaggagtcactaaactttttgattgggcgcctactggatgatggctgtgtgcatgaagcaagtagagtatgccggtattttcatttttataatccagatgtcgccttggtattgcactgcagagcactggcctcaggggaagctagtatggaggatctgcacccagagatccatgctctcctacaaagtgctgagctgcttgaggaagaagcacccgacattcccctaaggagagtccacagcaccacagagctcctgatcctggcccatcattgcttcaccctgacgtgccacatggagggcatcatccgagtcctacaggccgcccacatgctcacagataaccacctggcccccagtgaggagtatgggctggtggtacggctcctcactggcattggaaggtacaacgagatgacatacatatttgatttgctgcataaaaagcactactttgaagtgctaatgaggaagaagttggatccgagtggtaccctgaaaacagccctgctggactacatcaaacgctgccgtcctggagacagtgaaaagcacaatatgattgccctgtgcttcagcatgtgccgggagattggcgagaaccacgaggcagctgcccgcatccaactgaaattgattgagtctcagccctgggaggacagcctcaaggatgggcaccagctgaaacaactgctgctgaaggccctgactctgatgttggatgcagcagagagttatgccaaggactcctgtgtgcgacaggcccagcactgtcagcggctcaccaagttgataactctgcagattcactttctgaacactggccagaacacaatgctcatcaacttgggccgccacaagctgatggactgtattctggccctacctcggttctaccaggcttctattgtggctgaggcctacgattttgttccagattgggctgaaattttataccagcaagtgattcttaaaggagactttaattacttggaagaatttaagcagcaaaggttattaaagtccagtatatttgaagagatttccaaaaaatataaacaacatcagcctactgacatggtcatggaaaacctgaagaaattactcacatattgtgaagatgtttacctgtattacaagttggcatacgaacacaagttttatgaaattgtaaatgtgcttctgaaggaccctcagacaggttgctgtctaaaggacatgctagcaggttagatgatttcataggtgtctgttttcttgtactgttagcagattctgacagatgtgatgagaagaagaatgcattggagatctttgctaaagttgaacaatcccggtactgtaccatatcagtcctttgtgggtagtaggtagcaagtaagaaacttttcaggaggaaattcctatttaaaatagattgattttagatgattgttcatccacaccattttatatagatactagtattaagatcaaaagcttcctcttcctcaggacagcttctactttagatgatccaataatgattaaagaatacctgtacctgcagattccagtttcaaagaaatttaattattatttacacagttaaggaacaggtgatacattttcatttgttagaaactgatctttctgtaataaaatagattttcaattc

SEQ ID NO: 185226 - DNA, 750 bp, Homo sapiens
  Payload ID: 16475
  Gene Symbol: SPG11
  Gene Name: spastic paraplegia 11 (autosomal recessive)
  ENST ID: ENST00000558138
  CDS Start-End: 1-750
acaggacataagcagatgttcaacccaacagaggaaagccagacatttcttcagctgaccactctgtgtcaagaccgcacattggtaggcatgaagttgttggataagatttcctccgttccccatggggaactgtcttgcaccacagagctcctgatcctggcccatcattgcttcaccctgacgtgccacatggagggcatcatccgagtcctacaggccgcccacatgctcacagataaccacctggcccccagtgaggagtatgggctggtgagtggtaccctgaaaacagccctgctggactacatcaaacgctgccgtcctggagacagtgaaaagcacaatatgattgccctgtgcttcagcatgtgccgggagattggcgagaaccacgaggcagctgcccgcatccaactgaaattgattgagtctcagccctgggaggacagcctcaaggatgggcaccagctgaaacaactgctgctgaaggccctgactctgatgttggatgcagcagagagttatgccaaggactcctgtgtgcgacaggcccagcactgtcagcggctcaccaagttgataactctgcagattcactttctgaacactggccagaacacaatgctcatcaacttgggccgccacaagctgatggactgtattctggccctacctcggttctaccaggcttctattgtggctgaggcctacgattttgttccagattgggctgaaattttataccag

SEQ ID NO: 185227 - DNA, 411 bp, Homo sapiens
  Payload ID: 16475
  Gene Symbol: SPG11
  Gene Name: spastic paraplegia 11 (autosomal recessive)
  ENST ID: ENST00000559754
  CDS Start-End: 1-323
ctcctgggggtgtcagtcaggttgttcagaatgaagaaaatgaaaactgtttgaagaaagtggatccccagctattgaagatggcattaactccttaccccaagctaaaaactgctctcttcccacagtgcactcctcctagtgtcctgccatctgatattacaatctaccaccttattcagtcattatcaccctttgatcctagcagattgtttggctggcagtctgctaacacactagctataggaggaatcaggtcacaatgtgaaaagtccttggaattccatgagaaaacacaactttatttcagaaataagctttgaactttgaaaacaagagcagatgcatggagtcatctcccacatttctctagccctgacctggttaataaatatgctatagtggaacgtc

SEQ ID NO: 185228 - DNA, 6426 bp, Homo sapiens
  Payload ID: 16475
  Gene Symbol: SPG11
  Gene Name: spastic paraplegia 11 (autosomal recessive)
  Uniprot ID: Q96JI7
  ENST ID: ENST00000558319
  CDS Start-End: 32-6271
gaaagtgaccggaagtaaccgccgggccaagatggctgcagaggaaggggtcgcgagtgctgcttccgccggcggtagctggggcaccgcggccatggggcgggttctaccgatgctgttggtgccagtccccgccgaggcgatggggcagctcggctcccgggcgcagctgcgcacacagccggaggctctggggagcctgacggctgcgggcagcctccaagtgctttctttgacgcctggcagccggggcgggggtcgctgctgcctggagggccccttctggcactttctatgggaggattctcgtaacagcagcacaccaactgaaaagcccaaactgctcgctcttggtgaaaattatgaactgcttatctatgaatttaatttgaaagatggaagatgtgatgcaaccattttgtatagctgtagtagggaggcattgcaaaagctcattgacgatcaagatatcagtatttccttattgtctttgagaatcctgtcatttcacaataacacatcattactgttcatcaacaaatgtgtcatcctacatattatatttcctgaaagagatgctgcaattagagtactcaactgtttcacacttcccttgcctgcacaggcagtggacatgattattgacacgcagctctgcagaggaattctttttgttttgagtagtttaggctggatctacatttttgatgttgtggatggtacatatgtagctcatgtggatttagcacttcacaaagaagacatgtgtaatgagcagcaacaggagccagccaagatttcttcatttacttcactgaaagtttctcaagacctcgatgttgcagtgattgtcagctcctccaactccgcagttgctcttaacttaaatttgtatttcaggcaacacccaggacacctactgtgtgaaagaatactagaagatcttcctattcaaggacctaagggcgtagatgaagatgatcctgttaactctgcctacaacatgaaactggccaagttttccttccaaattgataggtcttggaaagcccagctatcatcattgaatgaaacaataaagaactccaaactggaggtttcctgttgtgctccatggttccaggatattttgcatttggagtcacctgaatctggtaaccacagtacaagtgtgcagagctgggccttcattccacaggacataatgcatgggcaatataatgttctacagaaagatcatgccaagaccagtgatccaggaagatcatggaaaataatgcacatcagtgaacaagaggaacccatagagcttaaatgtgtgtctgtgacaggattcactgcactgtttacttgggaagtggaaaggatgggctataccattaccctctgggatttggagacccagggcatgcagtgtttttcccttggcacaaagtgtattcctgtagacagtagtggagaccagcagctgtgctttgttttgacagagaatggactctctctgattttgtttggtttgactcaagaagagtttttaaacagactcatgatccatggaagtgccagcactgtggacactctttgtcatctcaatggctggggaaggtgctcaattcccatacatgcactagaggccgggatagaaaatcgtcagctggacacagtaaatttctttttgaagagcaaggaaaatctttttaatccatcctcaaaatcttctgtatctgatcagtttgatcacttgtcatcccatttatatttaagaaatgtggaagagctgataccagcattggatttactttgctcggcaattagagaaagttattctgaaccccaaagcaaacacttttcagaacaattgcttaatcttacactgtctttccttaacaaccaaataaaggagcttttcattcacactgaagaactagatgaacatctgcaaaaaggagtgaacattttgactagctacattaatgaacttcgaaccttcatgataaagtttccttggaagctaacagatgctatagatgaatatgatgtacatgaaaatgtccccaaagtaaaggagagcaatatatggaagaaactcagctttgaggaagttattgccagcgccattttaaacaacaaaataccagaggcacagactttcttcaggattgatagtcattctgctcaaaaacttgaggagcttattggcataggcctaaatttggtctttgacaatttaaaaaagaacaatataaaggaagcctctgaacttttgaagaatatggggtttgatgtaaaaggccaattgctcaagatctgcttctatacaactaataaaaatatacgtgactttttggttgaaattttaaaagaaaaaaattatttttctgaaaaagagaaaagaactatagacttcgtgcatcaagttgagaagctttatttgggacatttccaagaaaatatgcaaatccagtcatttcccaggtactggataaaggaacaagattttttcaagcacaagtctgttttggactcattcctgaaatatgattgtaaagatgaatttaacaaacaggaccatagaattgtgttaaattgggctctgtggtgggatcaactaacacaagaatccatccttctccccaggataagtccagaagaatacaaatcatattcccctgaagccctctggagatacctcacagctcgccatgattggttaaacattatcttatggattggagaatttcaaacccagcatagttatgcttcacttcagcagaacaaatggccccttctgactgttgatgttattaaccagaatacttcctgtaacaactacatgaggaatgaaattttagataagctggccaggaatggggtttttttggcatctgaactggaagactttgaatgcttcctcctaagactgagccgtattggaggtgtaatacaggataccctccctgttcaaaactacaagaccaaagaaggttgggatttccattctcaattcattctctattgtttggagcacagtctgcagcatcttctttatgtctaccttgactgttacaaacttagtcctgaaaattgtccctttttggaaaaaaaagagttacatgaagcacacccttggtttgaatttttagttcagtgtcgacaagttgccagtaacttaacagatcccaaactgatcttccaggctagccttgcaaatgctcagattttgattcccaccaatcaggccagtgtaagcagtatgctattggaaggacataccctcctggcccttgctactacaatgtattctcctgggggtgtcagtcaggttgttcagaatgaagaaaatgaaaactgtttgaagaaagtggatccccagctattgaagatggcattaactccttaccccaagctaaaaactgctctcttcccacagtgcactcctcctagtgtcctgccatctgatattacaatctaccaccttattcagtcattatcaccctttgatcctagcagattgtttggctggcagtctgctaacacactagctataggagatgcatggagtcatctcccacatttctctagccctgacctggttaataaatatgctatagtggaacgtctgaattttgcttattatttacataatgggcggccatcatttgcatttggtacttttctggtccaggaattaatcaagagcaagactcccaagcagctgatccagcaagtaggcaatgaagcctatgttatagggctctcctccttccacataccttcaataggagctgcatgtgtttgtttcttagaattgcttggccttgacagcctcaagctcagagttgatatgaaagtggccaatataattttgagctacaagtgcagaaatgaagatgctcagtacagctttatcagagagtctgtagccgaaaaactatctaaactagctgatggtgaaaagacaaccacagaagaattgcttgttctcttagaagaaggtacatggaacagcattcagcaacaggaaataaagaggttatccagtgaatctagcagccaatgggcattagtggtgcagttctgcaggctacacaatatgaaactaagcatatcttaccttagagaatgtgccaaagcaaatgattggctgcagttcattattcacagccaactccacaactaccacccagcagaggtgaaatcccttatccagtacttcagcccagtcattcaagaccacttaaggctggcttttgagaacttgccctcagtgcccacctccaaaatggacagcgatcaagtctgcaataagtgcccccaggaacttcaaggaagcaaacaagagatgaccgatttatttgaaattctgctccaatgctcagaggagccagactcctggcactggcttctggttgaagcagtgaaacaacaggcccctatcctcagtgttctggcctcatgtctccagggtgccagtgccatttcttgtctctgtgtttggatcatcacttctgtggaggacaatgttgcaactgaagcaatgggacacattcaggactcaacagaggaccatacctggaaccttgaggatctttcagtcatctggagaacattattaacaagacaaaagagcaaaactctcatcagaggtttccagcttttctttaaggattccccgttactactggtgatggagatgtatgaactgtgtatgttcttcaggaattataaagaagctgaagctaaacttctggagtttcagaagagccttgaaacgcttaacacagcagccacaaaggtccaccctgtcatccctgccatgtggctggaggatcaggtgtgtttccttttgaagcttatgctacagcagtgtaagacccagtatgagctggggaagcttttacagctctttgttgaaagagagcatctcttctctgatggtccagatgtgaaaaagctttgcatcctttgccagattttgaaggatacatccatagccattaatcatacaattattaccagctacagcattgagaatcttcagcatgaatgtagatctattttggaaagactgcagacagatggacaattcgctttggccaggagggtagcagaattagctgagttacctgtggacaacttggttattaaagagataacacaggaaatgcagaccctaaaacacattgaacagtggtcactaaaacaagcaagaattgacttctggaaaaaatgccatgagaattttaagaaaaattcaatttcaagcaaagcagcttcttcctttttctcaacccaggcccatgtggcatgtgagcacccaactggatggagcagcatggaggagcgccatctgctgctcaccttggcagggcactggcttgcccaggaggacgtggtgcccttggataagctggaggagctggagaagcagatctggctgtgccgcatcacccagcacactcttggaagaaatcaggaggaaacagagcccagattttctcgacagatctcaactagtggtgaactttcctttgatagtttagccagtgagttttccttctccaagttggctgctctgaacacatcaaaatacttagaacttaacagccttccatccaaagagacatgcgagaatagattggattggaaagagcaggagtcactaaactttttgattgggcgcctactggatgatggctgtgtgcatgaagcaagtagagtatgccggtattttcatttttataatccagatgtcgccttggtattgcactgcagagcactggcctcaggggaagctagtatggaggatctgcacccagagatccatgctctcctacaaagtgctgagctgcttgaggaagaagcacccgacattcccctaaggagagtccacagcacttcaagtctggatagtcagaagtttgtgacagtgccctccagtaatgaagtggtaactaacctggaagtgctgacaagcaaatgcctccatgggaagaactactgtcgacaggtcctctgtctgtatgatcttgccaaggagttgggctgttcctacacagatgttgctgctcaggatggtgaagccatgctccggaaaatcttggcctctcagcagcctgaccgatgcaaacgagcccaggccttcatcagcacacagggccttaagccagatactgtggctgaactcgtggcagaagaggtgacacgggagctgcttacttcatcacagggaacaggtgccctaccccccggggattcccaacctctctgacagcattctctagttcccagtgttaaggatttggatgttgtgcttatatacatcctgtatgtggttctctcaagtttctggattgcagtaatgtattttgtttaaataaaacaaaatacatgctttattttttacaaaatacatgtacaaaatac

SEQ ID NO: 185229 - DNA, 2579 bp, Homo sapiens
  Payload ID: 16475
  Gene Symbol: SPG11
  Gene Name: spastic paraplegia 11 (autosomal recessive)
  ENST ID: ENST00000559193
  CDS Start-End: 12-2351
gccgggccaagatggctgcagaggaaggggtcgcgagtgctgcttccgccggcggtagctggggcaccgcggccatggggcgggttctaccgatgctgttggtgccagtccccgccgaggcgatggggcagctcggctcccgggcgcagctgcgcacacagccggaggctctggggagcctgacggctgcgggcagcctccaagtgctttctttgacgcctggcagccggggcgggggtcgctgctgcctggagggccccttctggcactttctatgggaggattctcgtaacagcagcacaccaactgaaaagcccaaactgctcgctcttggtgaaaattatgaactgcttatctatgaatttaatttgaaagatggaagatgtgatgcaaccattttgtatagctgtagtagggaggcattgcaaaagctcattgacgatcaagatatcagtatttccttattgtctttgagaatcctgtcatttcacaataacacatcattactgttcatcaacaaatgtgtcatcctacatattatatttcctgaaagagatgctgcaattagagtactcaactgtttcacacttcccttgcctgcacaggcagtggacatgattattgacacgcagctctgcagaggaattctttttgttttgagtagtttaggctggatctacatttttgatgttgtggatggtacatatgtagctcatgtggatttagcacttcacaaagaagacatgtgtaatgagcagcaacaggagccagccaagatttcttcatttacttcactgaaagtttctcaagacctcgatgttgcagtgattgtcagctcctccaactccgcagttgctcttaacttaaatttgtatttcaggcaacacccaggacacctactgtgtgaaagaatactagaagatcttcctattcaaggacctaagggcgtagatgaagatgatcctgttaactctgcctacaacatgaaactggccaagttttccttccaaattgataggtcttggaaagcccagctatcatcattgaatgaaacaataaagaactccaaactggaggtttcctgttgtgctccatggttccaggatattttgcatttggagtcacctgaatctggtaaccacagtacaagtgtgcagagctgggccttcattccacaggacataatgcatgggcaatataatgttctacagaaagatcatgccaagaccagtgatccaggaagatcatggaaaataatgcacatcagtgaacaagaggaacccatagagcttaaatgtgtgtctgtgacaggattcactgcactgtttacttgggaagtggaaaggatgggctataccattaccctctgggatttggagacccagggcatgcagtgtttttcccttggcacaaagtgtattcctgtagacagtagtggagaccagcagctgtgctttgttttgacagagaatggactctctctgattttgtttggtttgactcaagaagagtttttaaacagactcatgatccatggaagtgccagcactgtggacactctttgtcatctcaatggctggggaaggtgctcaattcccatacatgcactagaggccgggatagaaaatcgtcagctggacacagtaaatttctttttgaagagcaaggaaaatctttttaatccatcctcaaaatcttctgtatctgatcagtttgatcacttgtcatcccatttatatttaagaaatgtggaagagctgataccagcattggatttactttgctcggcaattagagaaagttattctgaaccccaaagcaaacacttttcagaacaattgcttaatcttacactgtctttccttaacaaccaaataaaggagcttttcattcacactgaagaactagatgaacatctgcaaaaaggagtgaacattttgactagctacattaatgaacttcgaaccttcatgataaagtttccttggaagctaacagatgctatagatgaatatgatgtacatgaaaatgtccccaaagtaaaggagagcaatatatggaagaaactcagctttgaggaagttattgccagcgccattttaaacaacaaaataccagaggcacagactttcttcaggattgatagtcattctgctcaaaaacttgaggagcttattggcataggcctaaatttggtctttgacaatttaaaaaagaacaatataaaggaagcctctgaacttttgaagaatatggggtttgatgtaaaaggccaattgctcaagatctgcttctatacaactaataaaaatatacgtgactttttggtaggtaaaggtgagactacatagtatacattttctagaaagcctgggtgaaaaacttggaagaaaaccttggaagaaaaaccttaagtaattttaatgttcaactaatatctaataagtaaaagtgtgacaaccccttcatctttttttccccttcatctttcttcaatgactattttacatttgtggcaaaagaaaatttgtgttaacatacattaactcaaatgttcaaaatataattcttgaatggca

SEQ ID NO: 185230 - DNA, 620 bp, Homo sapiens
  Payload ID: 16475
  Gene Symbol: SPG11
  Gene Name: spastic paraplegia 11 (autosomal recessive)
  ENST ID: ENST00000558988
  CDS Start-End: 1-417
cctgggggtgtcagtcaggttgttcagaatgaagaaaatgaaaactgtttgaagaaagtggatccccagctattgaagatggcattaactccttaccccaagctaaaaactgctctcttcccacagtgcactcctcctagtgtcctgccatctgatattacaatctaccaccttattcagtcattatcaccctttgatcctagcagattgtttggctggcagtctgctaacacactagctataggagatgcatggagtcatctcccacatttctctagccctgacctggttaataaatatgctatagtggaacgtctgaattttgcttattatttacataatgggcggccatcatttgcatttggtacttttctggtccaggaattaatcaagagcaagactcccaagcagctgtgagtatttaaaatataattttgtctgggtacagtggttcacacctgtaatcccagcactttgggaagcaggaggatcacttgagcccaggagttcaaggaagcagtgagctatggtcatgccactgcactctagcctgggtgacagtgaggctctgccactaaaacaaaaaaagtaaaataaaatataatttgtattctaaaaaa

SEQ ID NO: 185231 - DNA, 4820 bp, Homo sapiens
  Payload ID: 16476
  Gene Symbol: SPG20
  Gene Name: spastic paraplegia 20 (Troyer syndrome)
  Uniprot ID: Q8N0X7
  ENST ID: ENST00000355182
  CDS Start-End: 95-2095
accagtaccagcccccaccttccgtctgtgcatgttttcttcagtcctggaaggaaatcataagtgatttgccccaaaaggattgctgttgaaaatggagcaagagccacaaaatggagaacctgctgaaattaagatcatcagagaagcatataagaaggcctttttatttgttaacaaaggtctgaatacagatgaattaggtcagaaggaagaagcaaagaactactataagcaaggaataggacacctgctcagagggatcagcatttcatcaaaagagtctgaacacacaggtcctgggtgggaatctgctagacagatgcaacagaaaatgaaagaaactctacagaatgtacgcaccaggctggaaattctagagaagggtcttgccacttctctgcagaatgatcttcaggaggtgcccaagttatatccagaatttccacctaaagacatgtgtgaaaaattaccagagcctcagtcttttagttcagctcctcagcatgctgaagtaaatggaaacacctcaactccaagtgcaggggcagttgctgcacctgcttctctgtctttaccatcacaaagttgtccagcagaagctcctcctgcttatactcctcaagctgctgaaggtcactacactgtatcctatggaacagattctggggagttttcatcagttggagaggagttttataggaatcattctcagccaccgcctcttgagaccttagggctggatgcagatgaattgattttgataccaaatggagtacagattttttttgtaaatcctgcaggggaggttagtgcaccttcgtatcctgggtaccttcgaattgtgaggtttttggataattctctcgatacggttctaaaccgtcctcccgggtttcttcaggtttgtgactggttatatcctctagttcctgatagatctccggttctgaaatgtactgcgggagcctacatgtttcctgatacaatgctacaagcagcaggatgctttgtgggggtcgtcctgtcctctgagttaccagaggatgatagagagctctttgaggatctgttaaggcaaatgtctgaccttcggctccaggccaactggaacagagcagaagaagaaaatgaattccaaatccctggaagaactagaccctcctctgaccaactaaaagaagcctctggcactgatgtgaaacagttggaccaaggcaataaggatgtacgtcataaaggaaaacgtggaaaaagggctaaagatacttcaagtgaagaagttaacctgagtcacattgtaccatgtgagccagttccagaagaaaagccaaaagaattacctgaatggagtgaaaaagtggctcacaacattttgtcaggtgcttcctgggtgagttggggtttagtcaaaggtgctgagattactggtaaggcaatccagaaaggtgcttctaaactccgagagcggattcaaccagaagaaaaacccgtggaagttagtccagctgtcaccaagggactttatatagcgaagcaagctacaggaggagcagcaaaagtcagtcagttcctggttgatggagtttgcactgtagcaaattgcgttggaaaagaactagctccacatgtcaagaagcatggaagcaaacttgttccagaatctcttaaaaaagacaaagatgggaaatctcctctggatggtgctatggttgtagcagcaagtagtgttcaaggattttcaactgtctggcaaggattggaatgtgcagctaaatgcatcgttaacaatgtttcagcagaaactgtacaaactgtcagatacaaatacggatataatgcaggagaagctacccaccatgcggtggattctgcggtcaatgttggcgtaactgcctacaatattaacaacattggtatcaaagcaatggtgaagaaaactgcaacacaaacaggacacactctccttgaggactatcagatagttgataattctcagagggaaaatcaagaaggagcagcaaatgtcaacgtgagaggggagaaggatgagcagacgaaggaagtaaaggaggcaaagaagaaagataaatgatgaagtgctgggaatcacttataccaaagccttatgaaatggatgaaattttgttaaataggcaaatgtggaattcctcacagattaaccagtattttttaaatgtattcattcctacaaattaactttcataaattttatggcatgtcttctatttaaaaggaaaagaataagtattcttgcatctggccttagaaatgtgaagttatattctcaagtttatttttttccaagtgtagctaaaatatttttgcaggtaaaataaagctgatagtacatgtgttgttcaaaccttgttaaacctaatattgaactatttttatatctgctgtctttcagaaggcaaataggaaactatatatttgcttaaaaattggcatttagtaaccttaattctttttatagaaggaatgacttaaagtattgtcccctctttttgcactaattgtggatttttttagatgcttctcaaaattttcagtgtgtaagctaaacaaaaactaaaactaagaattctcaaaaaaacttgttcaaaacagggaaagactgatgaaaagtaaaatggactacttttgtaacttacctgtttgttaggaaatggaatggtctctttgatttaaaataaataaaaatagattattacgtcttttgtattgagactgtattgttatgagcctaggaaatttgggaacatgattgtattgtattaaaattcgaagtgattattatcagcttaattggattaaaaaagtacttcaagaaattattttatcatatctgcttctgtttttccaaaaggttaaaacttgtaaaaaaaatatatataaacaattgagtttactaatggtaaacatttttattctgggattcggtcattggaatttatattaaaagacaagttattaaaaaggaaaggttctattcataatcagggtaaagaatatgaaaaccttagacgtaatccatggtggataggcattatggtttccactttggcagaaggcagactattcacagccctatttacttacataggctaaaaaactatgtaactaaatacctaatggtatttaatttttgtttattgaatttaagagattggtattagttttcatagctgtagtccattctaataatttctgatcttctagtggctacttaattagacattatttgaagctgtctgaagaatgcactttatgaattaaaaaactgaattgcctgacctcgttatcacatgagcttatattttgggaacacatagaactgatggaggcttttcctaaggccaaggataatgtactagttgttaaaatggaaataaaagtgaagtggtaaatagcttacagacagtctatgctttgtttaagaaatggaatggcacttcatatattctcatttgtgggagctaaaaattacaataatcaaacttaaggagatagagagtagaatgatggttaccagaggctgggaggcattgaagggatggggagggaagtgaggttgattaatgggtacgaaaatatagttagaacgaatttgttgtagtatttgatagcccaacagggtgactacagtcaacaataactttatacatttaaaaataaaagagtgtaattgggacgtttgtaacacaaatgaatgcttgaagcagtagatacaccctgatgtaattattataaatcgcatacctgtatcaaaatatctcatgtatcccataaatatatacacctaccatgtacccataaaaatttaaaaagaaatggaatggcaaataatggaacataaactttaaacagttagctttgaccagaggtcagcaaatatcctccatgggctaaatccagatgtccacctgttttcataaataacgttttattggagcatagctgtacccatttgtttacatattggctatggctgctgtctagttcaacgtgagagttgaatagttgcatcagagagtatatggtccacaagcctaacttattcactctctggccctttgcagaaaaagtgtgctgccttagtctatagaaaatggacttttcccaccattcactgactcattaggagataggcatcttctaaagattttttttatattgtgtaatgattgatatatagataaaattatatattacttgtaaggtatgatgaataacaacacttaaaaactcatcacacctaaagacatggaaagctgccaattacctatatgtatgttcttcctattttcttacctctttccccatgtcattttttattgttccttgccattttttaatcacacatgtatgttctccaaacatactgtttcattttttgaagctttctacatatagtgtctgaatgtgaagtcttactcaacttgcttttttgagtttatgtttaaaattcattcttgcgcttatatgcatggatggtttacttgctctatagtattctgtgtgagtataccacaatttaagtgttcattttcctatcagttgacatttgtttttagtttttgttggtagaaacagtacactcaaaacatccttgactgtcccctggtacacatatgcaagagactttatgcgtaagagtggagttgttggcttgtcaagttttgcaaaataatgccaggtattttccaaaatgatgatattctcttgagtattacttccctttgcaatgtttttattgttaatgtagcatatataaaaaagtatctcataatttt

SEQ ID NO: 185232 - DNA, 4789 bp, Homo sapiens
  Payload ID: 16476
  Gene Symbol: SPG20
  Gene Name: spastic paraplegia 20 (Troyer syndrome)
  Uniprot ID: Q8N0X7
  ENST ID: ENST00000438666
  CDS Start-End: 62-2062
gcggccgcgcagggagctctcgaggcaacgccggggcgcccgaggtctggaaggcgcagaaatggagcaagagccacaaaatggagaacctgctgaaattaagatcatcagagaagcatataagaaggcctttttatttgttaacaaaggtctgaatacagatgaattaggtcagaaggaagaagcaaagaactactataagcaaggaataggacacctgctcagagggatcagcatttcatcaaaagagtctgaacacacaggtcctgggtgggaatctgctagacagatgcaacagaaaatgaaagaaactctacagaatgtacgcaccaggctggaaattctagagaagggtcttgccacttctctgcagaatgatcttcaggaggtgcccaagttatatccagaatttccacctaaagacatgtgtgaaaaattaccagagcctcagtcttttagttcagctcctcagcatgctgaagtaaatggaaacacctcaactccaagtgcaggggcagttgctgcacctgcttctctgtctttaccatcacaaagttgtccagcagaagctcctcctgcttatactcctcaagctgctgaaggtcactacactgtatcctatggaacagattctggggagttttcatcagttggagaggagttttataggaatcattctcagccaccgcctcttgagaccttagggctggatgcagatgaattgattttgataccaaatggagtacagattttttttgtaaatcctgcaggggaggttagtgcaccttcgtatcctgggtaccttcgaattgtgaggtttttggataattctctcgatacggttctaaaccgtcctcccgggtttcttcaggtttgtgactggttatatcctctagttcctgatagatctccggttctgaaatgtactgcgggagcctacatgtttcctgatacaatgctacaagcagcaggatgctttgtgggggtcgtcctgtcctctgagttaccagaggatgatagagagctctttgaggatctgttaaggcaaatgtctgaccttcggctccaggccaactggaacagagcagaagaagaaaatgaattccaaatccctggaagaactagaccctcctctgaccaactaaaagaagcctctggcactgatgtgaaacagttggaccaaggcaataaggatgtacgtcataaaggaaaacgtggaaaaagggctaaagatacttcaagtgaagaagttaacctgagtcacattgtaccatgtgagccagttccagaagaaaagccaaaagaattacctgaatggagtgaaaaagtggctcacaacattttgtcaggtgcttcctgggtgagttggggtttagtcaaaggtgctgagattactggtaaggcaatccagaaaggtgcttctaaactccgagagcggattcaaccagaagaaaaacccgtggaagttagtccagctgtcaccaagggactttatatagcgaagcaagctacaggaggagcagcaaaagtcagtcagttcctggttgatggagtttgcactgtagcaaattgcgttggaaaagaactagctccacatgtcaagaagcatggaagcaaacttgttccagaatctcttaaaaaagacaaagatgggaaatctcctctggatggtgctatggttgtagcagcaagtagtgttcaaggattttcaactgtctggcaaggattggaatgtgcagctaaatgcatcgttaacaatgtttcagcagaaactgtacaaactgtcagatacaaatacggatataatgcaggagaagctacccaccatgcggtggattctgcggtcaatgttggcgtaactgcctacaatattaacaacattggtatcaaagcaatggtgaagaaaactgcaacacaaacaggacacactctccttgaggactatcagatagttgataattctcagagggaaaatcaagaaggagcagcaaatgtcaacgtgagaggggagaaggatgagcagacgaaggaagtaaaggaggcaaagaagaaagataaatgatgaagtgctgggaatcacttataccaaagccttatgaaatggatgaaattttgttaaataggcaaatgtggaattcctcacagattaaccagtattttttaaatgtattcattcctacaaattaactttcataaattttatggcatgtcttctatttaaaaggaaaagaataagtattcttgcatctggccttagaaatgtgaagttatattctcaagtttatttttttccaagtgtagctaaaatatttttgcaggtaaaataaagctgatagtacatgtgttgttcaaaccttgttaaacctaatattgaactatttttatatctgctgtctttcagaaggcaaataggaaactatatatttgcttaaaaattggcatttagtaaccttaattctttttatagaaggaatgacttaaagtattgtcccctctttttgcactaattgtggatttttttagatgcttctcaaaattttcagtgtgtaagctaaacaaaaactaaaactaagaattctcaaaaaaacttgttcaaaacagggaaagactgatgaaaagtaaaatggactacttttgtaacttacctgtttgttaggaaatggaatggtctctttgatttaaaataaataaaaatagattattacgtcttttgtattgagactgtattgttatgagcctaggaaatttgggaacatgattgtattgtattaaaattcgaagtgattattatcagcttaattggattaaaaaagtacttcaagaaattattttatcatatctgcttctgtttttccaaaaggttaaaacttgtaaaaaaaatatatataaacaattgagtttactaatggtaaacatttttattctgggattcggtcattggaatttatattaaaagacaagttattaaaaaggaaaggttctattcataatcagggtaaagaatatgaaaaccttagacgtaatccatggtggataggcattatggtttccactttggcagaaggcagactattcacagccctatttacttacataggctaaaaaactatgtaactaaatacctaatggtatttaatttttgtttattgaatttaagagattggtattagttttcatagctgtagtccattctaataatttctgatcttctagtggctacttaattagacattatttgaagctgtctgaagaatgcactttatgaattaaaaaactgaattgcctgacctcgttatcacatgagcttatattttgggaacacatagaactgatggaggcttttcctaaggccaaggataatgtactagttgttaaaatggaaataaaagtgaagtggtaaatagcttacagacagtctatgctttgtttaagaaatggaatggcacttcatatattctcatttgtgggagctaaaaattacaataatcaaacttaaggagatagagagtagaatgatggttaccagaggctgggaggcattgaagggatggggagggaagtgaggttgattaatgggtacgaaaatatagttagaacgaatttgttgtagtatttgatagcccaacagggtgactacagtcaacaataactttatacatttaaaaataaaagagtgtaattgggacgtttgtaacacaaatgaatgcttgaagcagtagatacaccctgatgtaattattataaatcgcatacctgtatcaaaatatctcatgtatcccataaatatatacacctaccatgtacccataaaaatttaaaaagaaatggaatggcaaataatggaacataaactttaaacagttagctttgaccagaggtcagcaaatatcctccatgggctaaatccagatgtccacctgttttcataaataacgttttattggagcatagctgtacccatttgtttacatattggctatggctgctgtctagttcaacgtgagagttgaatagttgcatcagagagtatatggtccacaagcctaacttattcactctctggccctttgcagaaaaagtgtgctgccttagtctatagaaaatggacttttcccaccattcactgactcattaggagataggcatcttctaaagattttttttatattgtgtaatgattgatatatagataaaattatatattacttgtaaggtatgatgaataacaacacttaaaaactcatcacacctaaagacatggaaagctgccaattacctatatgtatgttcttcctattttcttacctctttccccatgtcattttttattgttccttgccattttttaatcacacatgtatgttctccaaacatactgtttcattttttgaagctttctacatatagtgtctgaatgtgaagtcttactcaacttgcttttttgagtttatgtttaaaattcattcttgcgcttatatgcatggatggtttacttgctctatagtattctgtgtgagtataccacaatttaagtgttcattttcctatcagttgacatttgtttttagtttttgttggtagaaacagtacactcaaaacatccttgactgtcccctggtacacatatgcaagagactttatgcgtaagagtggagttgttggcttgtcaagttttgcaaaataatgccaggtattttccaaaatgatgatattctcttgagtattacttccctttgcaatgtttttattgttaatgtagcatatataaaaaagtatctcataattttaa

SEQ ID NO: 185233 - DNA, 4944 bp, Homo sapiens
  Payload ID: 16476
  Gene Symbol: SPG20
  Gene Name: spastic paraplegia 20 (Troyer syndrome)
  Uniprot ID: Q8N0X7
  ENST ID: ENST00000451493
  CDS Start-End: 219-2219
cggaggcctcggtttcgctggagagaaagagattgcgcaggcgccgagcagccgacgtggccgcaggggaccgtgcctgggggggtctgcgcggggccgctgactcgcgaggttctctgtcgcctgccgccctcgctccttttctccccttctagagtgttacggtgactcttgggtccgaaggggacggacgtcctcccacgtaccatttagaagaaatggagcaagagccacaaaatggagaacctgctgaaattaagatcatcagagaagcatataagaaggcctttttatttgttaacaaaggtctgaatacagatgaattaggtcagaaggaagaagcaaagaactactataagcaaggaataggacacctgctcagagggatcagcatttcatcaaaagagtctgaacacacaggtcctgggtgggaatctgctagacagatgcaacagaaaatgaaagaaactctacagaatgtacgcaccaggctggaaattctagagaagggtcttgccacttctctgcagaatgatcttcaggaggtgcccaagttatatccagaatttccacctaaagacatgtgtgaaaaattaccagagcctcagtcttttagttcagctcctcagcatgctgaagtaaatggaaacacctcaactccaagtgcaggggcagttgctgcacctgcttctctgtctttaccatcacaaagttgtccagcagaagctcctcctgcttatactcctcaagctgctgaaggtcactacactgtatcctatggaacagattctggggagttttcatcagttggagaggagttttataggaatcattctcagccaccgcctcttgagaccttagggctggatgcagatgaattgattttgataccaaatggagtacagattttttttgtaaatcctgcaggggaggttagtgcaccttcgtatcctgggtaccttcgaattgtgaggtttttggataattctctcgatacggttctaaaccgtcctcccgggtttcttcaggtttgtgactggttatatcctctagttcctgatagatctccggttctgaaatgtactgcgggagcctacatgtttcctgatacaatgctacaagcagcaggatgctttgtgggggtcgtcctgtcctctgagttaccagaggatgatagagagctctttgaggatctgttaaggcaaatgtctgaccttcggctccaggccaactggaacagagcagaagaagaaaatgaattccaaatccctggaagaactagaccctcctctgaccaactaaaagaagcctctggcactgatgtgaaacagttggaccaaggcaataaggatgtacgtcataaaggaaaacgtggaaaaagggctaaagatacttcaagtgaagaagttaacctgagtcacattgtaccatgtgagccagttccagaagaaaagccaaaagaattacctgaatggagtgaaaaagtggctcacaacattttgtcaggtgcttcctgggtgagttggggtttagtcaaaggtgctgagattactggtaaggcaatccagaaaggtgcttctaaactccgagagcggattcaaccagaagaaaaacccgtggaagttagtccagctgtcaccaagggactttatatagcgaagcaagctacaggaggagcagcaaaagtcagtcagttcctggttgatggagtttgcactgtagcaaattgcgttggaaaagaactagctccacatgtcaagaagcatggaagcaaacttgttccagaatctcttaaaaaagacaaagatgggaaatctcctctggatggtgctatggttgtagcagcaagtagtgttcaaggattttcaactgtctggcaaggattggaatgtgcagctaaatgcatcgttaacaatgtttcagcagaaactgtacaaactgtcagatacaaatacggatataatgcaggagaagctacccaccatgcggtggattctgcggtcaatgttggcgtaactgcctacaatattaacaacattggtatcaaagcaatggtgaagaaaactgcaacacaaacaggacacactctccttgaggactatcagatagttgataattctcagagggaaaatcaagaaggagcagcaaatgtcaacgtgagaggggagaaggatgagcagacgaaggaagtaaaggaggcaaagaagaaagataaatgatgaagtgctgggaatcacttataccaaagccttatgaaatggatgaaattttgttaaataggcaaatgtggaattcctcacagattaaccagtattttttaaatgtattcattcctacaaattaactttcataaattttatggcatgtcttctatttaaaaggaaaagaataagtattcttgcatctggccttagaaatgtgaagttatattctcaagtttatttttttccaagtgtagctaaaatatttttgcaggtaaaataaagctgatagtacatgtgttgttcaaaccttgttaaacctaatattgaactatttttatatctgctgtctttcagaaggcaaataggaaactatatatttgcttaaaaattggcatttagtaaccttaattctttttatagaaggaatgacttaaagtattgtcccctctttttgcactaattgtggatttttttagatgcttctcaaaattttcagtgtgtaagctaaacaaaaactaaaactaagaattctcaaaaaaacttgttcaaaacagggaaagactgatgaaaagtaaaatggactacttttgtaacttacctgtttgttaggaaatggaatggtctctttgatttaaaataaataaaaatagattattacgtcttttgtattgagactgtattgttatgagcctaggaaatttgggaacatgattgtattgtattaaaattcgaagtgattattatcagcttaattggattaaaaaagtacttcaagaaattattttatcatatctgcttctgtttttccaaaaggttaaaacttgtaaaaaaaatatatataaacaattgagtttactaatggtaaacatttttattctgggattcggtcattggaatttatattaaaagacaagttattaaaaaggaaaggttctattcataatcagggtaaagaatatgaaaaccttagacgtaatccatggtggataggcattatggtttccactttggcagaaggcagactattcacagccctatttacttacataggctaaaaaactatgtaactaaatacctaatggtatttaatttttgtttattgaatttaagagattggtattagttttcatagctgtagtccattctaataatttctgatcttctagtggctacttaattagacattatttgaagctgtctgaagaatgcactttatgaattaaaaaactgaattgcctgacctcgttatcacatgagcttatattttgggaacacatagaactgatggaggcttttcctaaggccaaggataatgtactagttgttaaaatggaaataaaagtgaagtggtaaatagcttacagacagtctatgctttgtttaagaaatggaatggcacttcatatattctcatttgtgggagctaaaaattacaataatcaaacttaaggagatagagagtagaatgatggttaccagaggctgggaggcattgaagggatggggagggaagtgaggttgattaatgggtacgaaaatatagttagaacgaatttgttgtagtatttgatagcccaacagggtgactacagtcaacaataactttatacatttaaaaataaaagagtgtaattgggacgtttgtaacacaaatgaatgcttgaagcagtagatacaccctgatgtaattattataaatcgcatacctgtatcaaaatatctcatgtatcccataaatatatacacctaccatgtacccataaaaatttaaaaagaaatggaatggcaaataatggaacataaactttaaacagttagctttgaccagaggtcagcaaatatcctccatgggctaaatccagatgtccacctgttttcataaataacgttttattggagcatagctgtacccatttgtttacatattggctatggctgctgtctagttcaacgtgagagttgaatagttgcatcagagagtatatggtccacaagcctaacttattcactctctggccctttgcagaaaaagtgtgctgccttagtctatagaaaatggacttttcccaccattcactgactcattaggagataggcatcttctaaagattttttttatattgtgtaatgattgatatatagataaaattatatattacttgtaaggtatgatgaataacaacacttaaaaactcatcacacctaaagacatggaaagctgccaattacctatatgtatgttcttcctattttcttacctctttccccatgtcattttttattgttccttgccattttttaatcacacatgtatgttctccaaacatactgtttcattttttgaagctttctacatatagtgtctgaatgtgaagtcttactcaacttgcttttttgagtttatgtttaaaattcattcttgcgcttatatgcatggatggtttacttgctctatagtattctgtgtgagtataccacaatttaagtgttcattttcctatcagttgacatttgtttttagtttttgttggtagaaacagtacactcaaaacatccttgactgtcccctggtacacatatgcaagagactttatgcgtaagagtggagttgttggcttgtcaagttttgcaaaataatgccaggtattttccaaaatgatgatattctcttgagtattacttccctttgcaatgtttttattgttaatgtagcatatataaaaaagtatctcataatttt

SEQ ID NO: 185234 - DNA, 3018 bp, Homo sapiens
  Payload ID: 16476
  Gene Symbol: SPG20
  Gene Name: spastic paraplegia 20 (Troyer syndrome)
  Uniprot ID: Q8N0X7
  ENST ID: ENST00000494062
  CDS Start-End: 255-2255
ggcggcggcgtgctgcgggctctgtggcgggagcgaggccgacgggcggggccgcgcggccgcgtgacgcgaagcgttcgagagcgcgcgtcgtggaacgtcttggttgccacggcaagcgcgcgcgcgaggccttgggaacctcgggaccggcccccggcgagcgcagcggcgcccagtagtcatcttagtgggatttggggaagcaacagggctgtgtggggtaacctgccacctttaagtggaaatcagaaatggagcaagagccacaaaatggagaacctgctgaaattaagatcatcagagaagcatataagaaggcctttttatttgttaacaaaggtctgaatacagatgaattaggtcagaaggaagaagcaaagaactactataagcaaggaataggacacctgctcagagggatcagcatttcatcaaaagagtctgaacacacaggtcctgggtgggaatctgctagacagatgcaacagaaaatgaaagaaactctacagaatgtacgcaccaggctggaaattctagagaagggtcttgccacttctctgcagaatgatcttcaggaggtgcccaagttatatccagaatttccacctaaagacatgtgtgaaaaattaccagagcctcagtcttttagttcagctcctcagcatgctgaagtaaatggaaacacctcaactccaagtgcaggggcagttgctgcacctgcttctctgtctttaccatcacaaagttgtccagcagaagctcctcctgcttatactcctcaagctgctgaaggtcactacactgtatcctatggaacagattctggggagttttcatcagttggagaggagttttataggaatcattctcagccaccgcctcttgagaccttagggctggatgcagatgaattgattttgataccaaatggagtacagattttttttgtaaatcctgcaggggaggttagtgcaccttcgtatcctgggtaccttcgaattgtgaggtttttggataattctctcgatacggttctaaaccgtcctcccgggtttcttcaggtttgtgactggttatatcctctagttcctgatagatctccggttctgaaatgtactgcgggagcctacatgtttcctgatacaatgctacaagcagcaggatgctttgtgggggtcgtcctgtcctctgagttaccagaggatgatagagagctctttgaggatctgttaaggcaaatgtctgaccttcggctccaggccaactggaacagagcagaagaagaaaatgaattccaaatccctggaagaactagaccctcctctgaccaactaaaagaagcctctggcactgatgtgaaacagttggaccaaggcaataaggatgtacgtcataaaggaaaacgtggaaaaagggctaaagatacttcaagtgaagaagttaacctgagtcacattgtaccatgtgagccagttccagaagaaaagccaaaagaattacctgaatggagtgaaaaagtggctcacaacattttgtcaggtgcttcctgggtgagttggggtttagtcaaaggtgctgagattactggtaaggcaatccagaaaggtgcttctaaactccgagagcggattcaaccagaagaaaaacccgtggaagttagtccagctgtcaccaagggactttatatagcgaagcaagctacaggaggagcagcaaaagtcagtcagttcctggttgatggagtttgcactgtagcaaattgcgttggaaaagaactagctccacatgtcaagaagcatggaagcaaacttgttccagaatctcttaaaaaagacaaagatgggaaatctcctctggatggtgctatggttgtagcagcaagtagtgttcaaggattttcaactgtctggcaaggattggaatgtgcagctaaatgcatcgttaacaatgtttcagcagaaactgtacaaactgtcagatacaaatacggatataatgcaggagaagctacccaccatgcggtggattctgcggtcaatgttggcgtaactgcctacaatattaacaacattggtatcaaagcaatggtgaagaaaactgcaacacaaacaggacacactctccttgaggactatcagatagttgataattctcagagggaaaatcaagaaggagcagcaaatgtcaacgtgagaggggagaaggatgagcagacgaaggaagtaaaggaggcaaagaagaaagataaatgatgaagtgctgggaatcacttataccaaagccttatgaaatggatgaaattttgttaaataggcaaatgtggaattcctcacagattaaccagtattttttaaatgtattcattcctacaaattaactttcataaattttatggcatgtcttctatttaaaaggaaaagaataagtattcttgcatctggccttagaaatgtgaagttatattctcaagtttatttttttccaagtgtagctaaaatatttttgcaggtaaaataaagctgatagtacatgtgttgttcaaaccttgttaaacctaatattgaactatttttatatctgctgtctttcagaaggcaaataggaaactatatatttgcttaaaaattggcatttagtaaccttaattctttttatagaaggaatgacttaaagtattgtcccctctttttgcactaattgtggatttttttagatgcttctcaaaattttcagtgtgtaagctaaacaaaaactaaaactaagaattctcaaaaaaacttgttcaaaacagggaaagactgatgaaaagtaaaatggactacttttgtaacttacctgtttgttaggaaatggaatggtctctttgatttaaaataaataaaaatagattattacgtcttttgtattgagactgtattgttatgagcctaggaaatttgggaacatgattgtattgtattaaaattcgaagtgattattatcagcttaattggattaaaaaagtacttcaagaaa

SEQ ID NO: 185235 - DNA, 1822 bp, Homo sapiens
  Payload ID: 16477
  Gene Symbol: SPG21
  Gene Name: spastic paraplegia 21 (autosomal recessive, Mast syndrome)
  Uniprot ID: Q9NZD8
  ENST ID: ENST00000204566
  CDS Start-End: 297-1223
cgccctctgagaacccggaagcgggagtctcgcgccagctgagcggcggtcgggcggggggagcgcggcggcccaagctcgctcggccacgcgccccgccccctcagaggccggcctcccgcacgcaccgcgcagcctgctgtgcccgtgggtcccgagtgctccgccgcccgccccgacccgggcccagccgcctccacggcccgcgctcgtactggagcgaagagcggcctcctgaaggaggggaagggacgtgggggcggccacggcaggattaacctccatttcagctaatcatgggagagattaaagtctctcctgattataactggtttagaggtacagttccccttaaaaagattattgtggatgatgatgacagtaagatatggtcgctctatgacgcgggcccccgaagtatcaggtgtcctctcatattcctgccccctgtcagtggaactgcagatgtctttttccggcagattttggctctgactggatggggttaccgggttatcgctttgcagtatccagtttattgggaccatctcgagttctgtgatggattcagaaaacttttagaccatttacaattggataaagttcatctttttggcgcttctttgggaggctttttggcccagaaatttgctgaatacactcacaaatctcctagagtccattccctaatcctctgcaattccttcagtgacacctctatcttcaaccaaacttggactgcaaacagcttttggctgatgcctgcatttatgctcaaaaaaatagttcttggaaatttttcatctggcccggtggaccctatgatggctgatgccattgatttcatggtagacaggctagaaagtttgggtcagagtgaactggcttcaagacttaccttgaattgtcaaaattcttatgtggaacctcataaaattcgggacatacctgtaactattatggatgtgtttgatcagagtgcgctttcaactgaagctaaagaagaaatgtacaagctgtatcctaatgcccgaagagctcatctgaaaacaggaggcaatttcccatacctgtgcagaagtgcagaggtcaatctttatgtacagatacatttgctgcaattccatggaaccaaatacgcggccattgacccatcaatggtcagtgccgaggagcttgaggtgcagaaaggcagccttggcatcagccaggaggagcagtagtgtgtctctcgctgtcaatgatgagttgacccggtgtgttcttgtatagtcagtggcatcagcacccgtcagccagccttttccttcaggttcgtcaggctcaccggttctcactgtgtctgggaagtaggactgatggtcatcttcatgacaggcggcatctccactaagcctgtgtaactgttccctctttggttttcttagcttttgaatttgaagaagtacttttgaagactcccattttaagaaccgtgcaaattttgctaccaaaagtcttcaccactgtgttcttaagtgaatgttaatttctgaggtttgggactttgtggtggtttttttcttcttttcttttccattcttctttctttctttttatgttgtttgctgtaaatgctgcacatccagattgcatatcaggacattggttattttatgctttcttggatataaccatgatcagagtgccatggccactaccccactgtttgctctcctgcaaatcaactgcttttaatttacacttaaacaaattgttttgagtgttagctactgcctttctagatattagtcatttggaataaaaattcaatttaactgag

SEQ ID NO: 185236 - DNA, 1533 bp, Homo sapiens
  Payload ID: 16477
  Gene Symbol: SPG21
  Gene Name: spastic paraplegia 21 (autosomal recessive, Mast syndrome)
  Uniprot ID: Q9NZD8
  ENST ID: ENST00000416889
  CDS Start-End: 272-1117
agtctcgcgccagctgagcggcggtcgggcggggggagcgcggcggcccaagctcgctcggccacgcgccccgccccctcagaggccggcctcccgcacgcaccgcgcagcctgctgtgcccgtgggtcccgagtgctccgccgcccgccccgacccgggcccagccgcctccacggcccgcgctcgtactggagcgaagagcggcctcctgaaggaggggaagggacgtgggggcggccacggcaggattaacctccatttcagctaatcatgggagagattaaagtctctcctgattataactggtttagaggtacagttccccttaaaaagattattgtggatgatgatgacagtaagatatggtcgctctatgacgcgggcccccgaagtatcaggtgtcctctcatattcctgccccctgtcagtggaactgcagatgtctttttccggcagattttggctctgactggatggggttaccgggttatcgctgttcatctttttggcgcttctttgggaggctttttggcccagaaatttgctgaatacactcacaaatctcctagagtccattccctaatcctctgcaattccttcagtgacacctctatcttcaaccaaacttggactgcaaacagcttttggctgatgcctgcatttatgctcaaaaaaatagttcttggaaatttttcatctggcccggtggaccctatgatggctgatgccattgatttcatggtagacaggctagaaagtttgggtcagagtgaactggcttcaagacttaccttgaattgtcaaaattcttatgtggaacctcataaaattcgggacatacctgtaactattatggatgtgtttgatcagagtgcgctttcaactgaagctaaagaagaaatgtacaagctgtatcctaatgcccgaagagctcatctgaaaacaggaggcaatttcccatacctgtgcagaagtgcagaggtcaatctttatgtacagatacatttgctgcaattccatggaaccaaatacgcggccattgacccatcaatggtcagtgccgaggagcttgaggtgcagaaaggcagccttggcatcagccaggaggagcagtagtgtgtctctcgctgtcaatgatgagttgacccggtgtgttcttgtatagtcagtggcatcagcacccgtcagccagccttttccttcaggttcgtcaggctcaccggttctcactgtgtctgggaagtaggactgatggtcatcttcatgacaggcggcatctccactaagcctgtgtaactgttccctctttggttttcttagcttttgaatttgaagaagtacttttgaagactcccattttaagaaccgtgcaaattttgctaccaaaagtcttcaccactgtgttcttaagtgaatgttaatttctgaggtttgggactttgtggtggtttttttcttcttttcttttccattcttctttctttctttttatgttgtttgctgtaaatgctgcacatccagattgcatatca

SEQ ID NO: 185237 - DNA, 1613 bp, Homo sapiens
  Payload ID: 16477
  Gene Symbol: SPG21
  Gene Name: spastic paraplegia 21 (autosomal recessive, Mast syndrome)
  Uniprot ID: Q9NZD8
  ENST ID: ENST00000433215
  CDS Start-End: 94-1020
gggtggtcggtgtgcttgtgaccctgcctttgtgtggctgtcaccggtgggactggcggggagctgtgtgattaacctccatttcagctaatcatgggagagattaaagtctctcctgattataactggtttagaggtacagttccccttaaaaagattattgtggatgatgatgacagtaagatatggtcgctctatgacgcgggcccccgaagtatcaggtgtcctctcatattcctgccccctgtcagtggaactgcagatgtctttttccggcagattttggctctgactggatggggttaccgggttatcgctttgcagtatccagtttattgggaccatctcgagttctgtgatggattcagaaaacttttagaccatttacaattggataaagttcatctttttggcgcttctttgggaggctttttggcccagaaatttgctgaatacactcacaaatctcctagagtccattccctaatcctctgcaattccttcagtgacacctctatcttcaaccaaacttggactgcaaacagcttttggctgatgcctgcatttatgctcaaaaaaatagttcttggaaatttttcatctggcccggtggaccctatgatggctgatgccattgatttcatggtagacaggctagaaagtttgggtcagagtgaactggcttcaagacttaccttgaattgtcaaaattcttatgtggaacctcataaaattcgggacatacctgtaactattatggatgtgtttgatcagagtgcgctttcaactgaagctaaagaagaaatgtacaagctgtatcctaatgcccgaagagctcatctgaaaacaggaggcaatttcccatacctgtgcagaagtgcagaggtcaatctttatgtacagatacatttgctgcaattccatggaaccaaatacgcggccattgacccatcaatggtcagtgccgaggagcttgaggtgcagaaaggcagccttggcatcagccaggaggagcagtagtgtgtctctcgctgtcaatgatgagttgacccggtgtgttcttgtatagtcagtggcatcagcacccgtcagccagccttttccttcaggttcgtcaggctcaccggttctcactgtgtctgggaagtaggactgatggtcatcttcatgacaggcggcatctccactaagcctgtgtaactgttccctctttggttttcttagcttttgaatttgaagaagtacttttgaagactcccattttaagaaccgtgcaaattttgctaccaaaagtcttcaccactgtgttcttaagtgaatgttaatttctgaggtttgggactttgtggtggtttttttcttcttttcttttccattcttctttctttctttttatgttgtttgctgtaaatgctgcacatccagattgcatatcaggacattggttattttatgctttcttggatataaccatgatcagagtgccatggccactaccccactgtttgctctcctgcaaatcaactgcttttaatttacacttaaacaaattgttttgagtgttagctactgcctttctagatattagtcatttggaataaaaattcaattta

SEQ ID NO: 185238 - DNA, 624 bp, Homo sapiens
  Payload ID: 16477
  Gene Symbol: SPG21
  Gene Name: spastic paraplegia 21 (autosomal recessive, Mast syndrome)
  ENST ID: ENST00000558765
  CDS Start-End: 173-624
gcctcctgaaggaggggaagggacgtgggggcggccacggcagcaaacttttaagaactgtgagcagaggccagtaattttggagacaggacctcggcctgaaagtgatagatgtctttgttgttactgagtgtgggccaggtgtaaggattaacctccatttcagctaatcatgggagagattaaagtctctcctgattataactggtttagaggtacagttccccttaaaaagattattgtggatgatgatgacagtaagatatggtcgctctatgacgcgggcccccgaagtatcaggtgtcctctcatattcctgccccctgtcagtggaactgcagatgtctttttccggcagattttggctctgactggatggggttaccgggttatcgctttgcagtatccagtttattgggaccatctcgagttctgtgatggattcagaaaacttttagaccatttacaattggataaagttcatctttttggcgcttctttgggaggctttttggcccagaaatttgctgaatacactcacaaatctcctagagtccattccctaatcctctgcaattccttcagtgacacctctatcttcaaccaaacttggactgcaaacag

SEQ ID NO: 185239 - DNA, 1520 bp, Homo sapiens
  Payload ID: 16477
  Gene Symbol: SPG21
  Gene Name: spastic paraplegia 21 (autosomal recessive, Mast syndrome)
  ENST ID: ENST00000561078
  CDS Start-End: 176-565
cacgcaccgcgcagcctgctgtgcccgtgggtcccgagtgctccgccgcccgccccgacccgggcccagccgcctccacggcccgcgctcgtactggagcgaagagcggcctcctgaaggaggggaagggacgtgggggcggccacggcaggattaacctccatttcagctaatcatgggagagattaaagtctctcctgattataactggtttagaggtacagttccccttaaaaagattattgtggatgatgatgacagtaagatatggtcgctctatgacgcgggcccccgaagtatcaggtgtcctctcatattcctgccccctgtcagtggaactgcagatgtctttttccggcagattttggctctgactggatggggttaccgggttatcgctttgcagtatccagtttattgggaccatctcgagttctgtgatggattcagaaaacttttagaccatttacaattggataaacttttggctgatgcctgcatttatgctcaaaaaaatagttcttggaaatttttcatctggcccggtggaccctatgatggctgatgccattgatttcatggtagacaggctagaaagtttgggtcagagtgaactggcttcaagacttaccttgaattgtcaaaattcttatgtggaacctcataaaattcgggacatacctgtaactattatggatgtgtttgatcagagtgcgctttcaactgaagctaaagaagaaatgtacaagctgtatcctaatgcccgaagagctcatctgaaaacaggaggcaatttcccatacctgtgcagaagtgcagaggtcaatctttatgtacagatacatttgctgcaattccatggaaccaaatacgcggccattgacccatcaatggtcagtgccgaggagcttgaggtgcagaaaggcagccttggcatcagccaggaggagcagtagtgtgtctctcgctgtcaatgatgagttgacccggtgtgttcttgtatagtcagtggcatcagcacccgtcagccagccttttccttcaggttcgtcaggctcaccggttctcactgtgtctgggaagtaggactgatggtcatcttcatgacaggcggcatctccactaagcctgtgtaactgttccctctttggttttcttagcttttgaatttgaagaagtacttttgaagactcccattttaagaaccgtgcaaattttgctaccaaaagtcttcaccactgtgttcttaagtgaatgttaatttctgaggtttgggactttgtggtggtttttttcttcttttcttttccattcttctttctttctttttatgttgtttgctgtaaatgctgcacatccagattgcatatcaggacattggttattttatgctttcttggatataaccatgatcagagtgccatggccactaccccactgtttgctctcctgcaaatcaactgcttttaatttacacttaaacaaattgttttgagtgttagctactgcctttctagata

SEQ ID NO: 185240 - DNA, 562 bp, Homo sapiens
  Payload ID: 16477
  Gene Symbol: SPG21
  Gene Name: spastic paraplegia 21 (autosomal recessive, Mast syndrome)
  ENST ID: ENST00000558415
  CDS Start-End: 404-562
ctggggccgaatctgggctgtggggtggtcggtgtgcttgtgaccctgcctttgtgtggctgtcaccggtgggactggcggggagctgtgttagagacggggtttcaccgtgttagccaggatggcctcgatctcctgacctcgtgatccgcccgcctcggcctcccaaagggctgagattacaggcgtgagccatcgcggctggccactgaggagtaacttaatagctgtgtccaaattccaaaagcttttttcccaagagcatgagaagagatgtcacagatgtcagtcacagcggagtggaatctctccatcttgtaagattacttttaacacgttggcatcctgaggtggttgtgaattattctgaagactgttggattaacctccatttcagctaatcatgggagagattaaagtctctcctgattataactggtttagaggtacagttccccttaaaaagattattgtggatgatgatgacagtaagatatggtcgctctatgacgcgggcccccgaagtatcaggtgtcctctcatattcctgccccctgtcagt

SEQ ID NO: 185241 - DNA, 553 bp, Homo sapiens
  Payload ID: 16477
  Gene Symbol: SPG21
  Gene Name: spastic paraplegia 21 (autosomal recessive, Mast syndrome)
  ENST ID: ENST00000559677
  CDS Start-End: 246-553
aaaggaagcggaggctttgagtggaggactacggagagcgtctacggttgtgccaaaggaaaaaaaatgttcctaagaaaagagtatacaaagttgtgttcatcaaagtctggaacccaaaggtgtccctccaaagctgtacacgacagagaaaacgcgaactgaaagaagaagcaggtcccaaggggccaggcgcctcctccacctcctcctcctcctaggattaacctccatttcagctaatcatgggagagattaaagtctctcctgattataactggtttagaggtacagttccccttaaaaagattattgtggatgatgatgacagtaagatatggtcgctctatgacgcgggcccccgaagtatcaggtgtcctctcatattcctgccccctgtcagtggaactgcagatgtctttttccggcagattttggctctgactggatggggttaccgggttatcgctttgcagtatccagtttattgggaccatctcgagttctgtgatggattcagaaaacttttagaccatttacaattggataaagt

SEQ ID NO: 185242 - DNA, 544 bp, Homo sapiens
  Payload ID: 16477
  Gene Symbol: SPG21
  Gene Name: spastic paraplegia 21 (autosomal recessive, Mast syndrome)
  ENST ID: ENST00000558943
  CDS Start-End: 330-544
gatttggaaaagtatacccctttggtggatgaaagagagctaggagaacaaactttcctattcataccactcacagctgttttccctttgcagcagtgatctttttttcacttagacgtcagttggtcagatgcaacatttggtatccattttacctttcatgtactgccaaactagcacaagtgttaaaattacttgtctctacaaaaatttagtcacagcggagtggaatctctccatcttgtaagattacttttaacacgttggcatcctgaggtggttgtgaattattctgaagactgttggattaacctccatttcagctaatcatgggagagattaaagtctctcctgattataactggtttagaggtacagttccccttaaaaagattattgtggatgatgatgacagtaagatatggtcgctctatgacgcgggcccccgaagtatcaggtgtcctctcatattcctgccccctgtcagtggaactgcagatgtctttttccggcagattttggctctgactggatggggttaccg

SEQ ID NO: 185243 - DNA, 747 bp, Homo sapiens
  Payload ID: 16477
  Gene Symbol: SPG21
  Gene Name: spastic paraplegia 21 (autosomal recessive, Mast syndrome)
  ENST ID: ENST00000557795
  CDS Start-End: 324-747
gagtgtgtgtctggggccgaatctgggctgtggggtggtcggtgtgcttgtgaccctgcctttgtgtggctgtcaccggtgggactggcggggagctgtgttagagacggggtttcaccgtgttagccaggatggcctcgatctcctgacctcgtgatccgcccgcctcggcctcccaaagggctgagattacaggcgtgagccatcgcggctggccactgaggagtaacttaatagctgtgtccaaattccaaaagcttttttcccaagagcatgagaagagatgtcacagatgtcaggattaacctccatttcagctaatcatgggagagattaaagtctctcctgattataactggtttagaggtacagttccccttaaaaagattattgtggatgatgatgacagtaagatatggtcgctctatgacgcgggcccccgaagtatcaggtgtcctctcatattcctgccccctgtcagtggaactgcagatgtctttttccggcagattttggctctgactggatggggttaccgggttatcgctttgcagtatccagtttattgggaccatctcgagttctgtgatggattcagaaaacttttagaccatttacaattggataaagttcatctttttggcgcttctttgggaggctttttggcccagaaatttgctgaatacactcacaaatctcctagagtccattccctaatcctctgcaattccttcagtgacacctcta

SEQ ID NO: 185244 - DNA, 541 bp, Homo sapiens
  Payload ID: 16477
  Gene Symbol: SPG21
  Gene Name: spastic paraplegia 21 (autosomal recessive, Mast syndrome)
  ENST ID: ENST00000560878
  CDS Start-End: 422-541
actgcaagctctgtctgctgggtttacgccattctcctgcctcagcctcccgagtagctggcactacaggctcccgccaccacgcccggctaattttttgtatttttagtagagacggggtttcaccgtgttagccaggatggcctcgatctcctgacctcgtgatccgcccgcctcggcctcccaaagggctgagattacaggcgtgagccatcgcggctggccactgaggagtaacttaatagctgtgtccaaattccaaaagcttttttcccaagagcatgagaagagatgtcacagatgtcagtcacagcggagtggaatctctccatcttgtaagattacttttaacacgttggcatcctgaggtggttgtgaattattctgaagactgttggattaacctccatttcagctaatcatgggagagattaaagtctctcctgattataactggtttagaggtacagttccccttaaaaagattattgtggatgatgatgacagtaagatatggtcgctctatgacgcgggcccccga

SEQ ID NO: 185245 - DNA, 2059 bp, Homo sapiens
  Payload ID: 16477
  Gene Symbol: SPG21
  Gene Name: spastic paraplegia 21 (autosomal recessive, Mast syndrome)
  ENST ID: ENST00000559199
  CDS Start-End: 1002-1466
ttatttatttatttatgtattttaaagagacaggatccaggccgggcgcagtggctcacgcctgtaatcccagcactttgggaggccaaggcgggtggatcatgagctcaggagttcgagaccagcctgaccaatatggtgaaaccccgtctctactaaaaatacaaaaaattagctgggcatgagggtgtgtgcctataatcccagctacttgggaggctgaggcaggagaatcgcttgaacctgggaggcagaggttgtagtgagccaagatcgtgccactgcactccagcctgggctacagagcgagactctgtctcaaaaaaaaaaaaaaaaaaggaggagggggaagaaacagagaagcagcagccctttggaagattataaagtagttctaagtagttctgtggaatacgttagccctgaggaaagaaaaggagatcagaggagtttgtcatgcatgctaatctggtgtgagctccaggttaccttgtaacaaacaaggcagtagtagtaaaattgtcagtgaaatgacagtgtaaaataacataaaaagcaaatttataaggttttccacttttttcttttaaccttccctccagattattgtggatgatgatgacagtaagatatggtcgctctatgacgcgggcccccgaagtatcaggtgtcctctcatattcctgccccctgtcagtggaactgcagatgtctttttccggcagattttggctctgactggatggggttaccgggttatcgctttgcagtatccagtttattgggaccatctcgagttctgtgatggattcagaaaacttttagaccatttacaattggataaagttcatctttttggcgcttctttgggaggctttttggcccagaaatttgctgaatacactcacaaatctcctagagtccattccctaatcctctgcaattccttcagtgacacctctatcttcaaccaaacttggactgcaaacagcttttggctgatgcctgcatttatgctcaaaaaaatagttcttggaaatttttcatctggcccggtggaccctatgatggctgatgccattgatttcatggtagacaggctagaaagtttgggtcagagtgaactggcttcaagacttaccttgaattgtcaaaattcttatgtggaacctcataaaattcgggacatacctgtaactattatggatgtgtttgatcagagtgcgctttcaactgaagctaaagaagaaatgtacaagctgtatcctaatgcccgaagagctcatctgaaaacaggaggcaatttcccatacctgtgcagaagtgcagaggtcaatctttatgtacagatacatttgctgcaattccatggaaccaaatacgcggccattgacccatcaatggtcagtgccgaggagcttgaggtgcagaaaggcagccttggcatcagccaggaggagcagtagtgtgtctctcgctgtcaatgatgagttgacccggtgtgttcttgtatagtcagtggcatcagcacccgtcagccagccttttccttcaggttcgtcaggctcaccggttctcactgtgtctgggaagtaggactgatggtcatcttcatgacaggcggcatctccactaagcctgtgtaactgttccctctttggttttcttagcttttgaatttgaagaagtacttttgaagactcccattttaagaaccgtgcaaattttgctaccaaaagtcttcaccactgtgttcttaagtgaatgttaatttctgaggtttgggactttgtggtggtttttttcttcttttcttttccattcttctttctttctttttatgttgtttgctgtaaatgctgcacatccagattgcatatcaggacattggttattttatgctttcttggatataaccatgatcagagtgccatggccactaccccactgtttgctctcctgcaaatcaactgcttttaatttacacttaaacaaattgttttgagtgttagctactgcctttctagatattagtcatttggaataaaaattcaattta

SEQ ID NO: 185246 - DNA, 3076 bp, Homo sapiens
  Payload ID: 16478
  Gene Symbol: SPG7
  Gene Name: spastic paraplegia 7 (pure and complicated autosomal recessive)
  Uniprot ID: Q9UQ90
  ENST ID: ENST00000268704
  CDS Start-End: 16-2403
ggctttcaggccaacatggccgtgctgctgctgctgctccgtgccctccgccggggtccaggcccgggtcctcggccgctgtggggcccaggcccggcctggagtccagggttccccgccaggcccgggagggggcggccgtacatggccagcaggcctccgggggacctcgccgaggctggaggccgagctctgcagagcttacaattgagactgctaacccctacctttgaagggatcaacggattgttgttgaaacaacatttagttcagaatccagtcagactctggcaacttttaggtggtactttctattttaacacctcaaggttgaagcagaagaataaggagaaggataagtcgaaggggaaggcgcctgaagaggacgaagaggagaggagacgccgtgagcgggacgaccagatgtaccgagagcggctgcgcaccttgctggtcatcgcggttgtcatgagcctcctgaatgctctcagcaccagcggaggcagcatttcctggaacgactttgtccacgagatgctggccaagggcgaggtgcagcgcgtccaggtggtgcctgagagcgacgtggtggaagtctacctgcaccctggagccgtggtgtttgggcggcctcggctagccttgatgtaccgaatgcaggttgcaaatattgacaagtttgaagagaagcttcgagcagctgaagatgagctgaatatcgaggccaaggacaggatcccagtttcctacaagcgaacaggattctttggaaatgccctgtactctgtggggatgacggcagtgggcctggccatcctgtggtatgttttccgtctggccgggatgactggaagggaaggtggattcagtgcttttaatcagcttaaaatggctcgtttcaccattgtggatgggaagatggggaaaggagtcagcttcaaagacgtggcaggaatgcacgaagccaaactggaagtccgcgagtttgtggattatctgaagagcccagaacgcttcctccagcttggcgccaaggtcccaaagggcgcactgctgctcggcccccccggctgtgggaagacgctgctggccaaggcggtggccacggaggctcaggtgcccttcctggcgatggccggcccagagttcgtggaggtcattggaggcctcggcgctgcccgtgtgcggagcctctttaaggaagcccgagcccgggccccctgcatcgtctacatcgatgagatcgacgcggtgggcaagaagcgctccaccaccatgtccggcttctccaacacggaggaggagcagacgctcaaccagcttctggtagaaatggatggaatgggtaccacagaccatgtcatcgtcctggcgtccacgaaccgagctgacattttggacggtgctctgatgaggccaggccgactggaccggcacgtcttcattgatctccccacgctgcaggagaggcgggagatttttgagcagcacctgaagagcctgaagctgacccagtccagcaccttttactcccagcgtctggcagagctgacaccaggattcagtggggctgacatcgccaacatctgcaatgaggctgcgctgcacgcggcgcgggagggacacacttccgtgcacactctcaacttcgagtacgccgtggagcgcgtcctcgcagggactgccaaaaagagcaagatcctgtccaaggaagaacagaaagtggttgcgtttcatgagtcgggccacgccttggtgggctggatgctggagcacacggaggccgtgatgaaggtctccataacccctcggacaaacgccgccctgggctttgctcagatgctccccagagaccagcacctcttcaccaaggagcagctgtttgagcggatgtgcatggccctgggaggacgggcctcggaagcactgtccttcaacgaggtcacttctggggcacaggacgacctgaggaaggtcacccgcatcgcctactccatggtgaagcagtttgggatggcacctggcatcgggcccatctccttccctgaggcgcaggagggcctcatgggcatcgggcggcgccccttcagccaaggcctgcagcagatgatggaccatgaagcaagactgctggtggccaaggcctacagacacaccgagaaggtgctgcaggacaacctggacaagttgcaggcgctggcaaacgcccttctggaaaaggaagtgataaactatgaggacattgaggctctcattggcccgccgccccatgggccgaagaaaatgatcgcaccgcagaggtggatcgacgcccagagggagaaacaggacttgggcgaggaggagaccgaagagacccagcagcctccacttggaggcgaagagccgacttggcccaagtagttgggaggtgttggctgcacgtgcgggtggtccgggaagtgagggctcactcagccaccctgagttgcttttcagctgaggtttgcacttcctctcgcggccctcagtagtccctgcacagtgacttctgagatctgttgattgatgacccttttcatgattttaagtttctctgcagaaactactgacggagtcctgtgtttgtgagtcgtttcccctatggggaaggttatcagtgcttcccgagtgagcatggaacacttcgagttcccagggttatagacagtcgttcccagtgtggctgaggccacccagaggcagcagagcattcagactccaaacagacccctgttcatgccgacgcttgcacgaccgccccagttcctgtggctccctcggaatgctaaggggatcggacatgaaaggaccctgtgagccgattgtcctatctccagcggccctgtcatccagctcactcatcaatggggccagtcaggcccaggcactgggctccggaggactcaccactgccccctgctgccatgtggactggtgcaagttgaggacttcttgctggtctagtcacgcatgcagtgttggggatgccttggtttttactgctctgagaattgttgagatactttactaataaactgtgtagttggaaaatcta

SEQ ID NO: 185247 - DNA, 2288 bp, Homo sapiens
  Payload ID: 16478
  Gene Symbol: SPG7
  Gene Name: spastic paraplegia 7 (pure and complicated autosomal recessive)
  Uniprot ID: Q9UQ90
  ENST ID: ENST00000341316
  CDS Start-End: 8-1477
ggccaacatggccgtgctgctgctgctgctccgtgccctccgccggggtccaggcccgggtcctcggccgctgtggggcccaggcccggcctggagtccagggttccccgccaggcccgggagggggcggccgtacatggccagcaggcctccgggggacctcgccgaggctggaggccgagctctgcagagcttacaattgagactgctaacccctacctttgaagggatcaacggattgttgttgaaacaacatttagttcagaatccagtcagactctggcaacttttaggtggtactttctattttaacacctcaaggttgaagcagaagaataaggagaaggataagtcgaaggggaaggcgcctgaagaggacgaagaggagaggagacgccgtgagcgggacgaccagatgtaccgagagcggctgcgcaccttgctggtcatcgcggttgtcatgagcctcctgaatgctctcagcaccagcggaggcagcatttcctggaacgactttgtccacgagatgctggccaagggcgaggtgcagcgcgtccaggtggtgcctgagagcgacgtggtggaagtctacctgcaccctggagccgtggtgtttgggcggcctcggctagccttgatgtaccgaatgcaggttgcaaatattgacaagtttgaagagaagcttcgagcagctgaagatgagctgaatatcgaggccaaggacaggatcccagtttcctacaagcgaacaggattctttggaaatgccctgtactctgtggggatgacggcagtgggcctggccatcctgtggtatgttttccgtctggccgggatgactggaagggaaggtggattcagtgcttttaatcagcttaaaatggctcgtttcaccattgtggatgggaagatggggaaaggagtcagcttcaaagacgtggcaggaatgcacgaagccaaactggaagtccgcgagtttgtggattatctgaagagcccagaacgcttcctccagcttggcgccaaggtcccaaagggcgcactgctgctcggcccccccggctgtgggaagacgctgctggccaaggcggtggccacggaggctcaggtgcccttcctggcgatggccggcccagagttcgtggaggtcattggaggcctcggcgctgcccgtgtgcggagcctctttaaggaagcccgagcccgggccccctgcatcgtctacatcgatgagatcgacgcggtgggcaagaagcgctccaccaccatgtccggcttctccaacacggaggaggagcagacgctcaaccagcttctggtagaaatggatggtgcctctcttgaccagctaccctcccaggggaccatgaggaagctcagaggaaagacccccgcctgctcctgtctcacggagcccacagggtcacggagggcaatggagggtcattcgctctgctggggttgccttttgcactgaagatagagaccacctttttgagtgacttgagcccaaaggcaagcgtatatcaaacgatcttctccacataacctctctgtgccatcataagaatagctgcttccgcccccggatttgctcaggcctgggaatccgctgactgaaggcctcttgttgagtgccagctctaaacaagtccctttatgcagagccacagctgtgcatgctcagccctgccgaggtcccaggccaggctttgttgcttccgttcatggaagcgcacaggatagggccgacgctgtgccggtcgtggggaaatctcactggggaagagaaaagcccaagccttgttggttacgtcagccggtccatggcggtgtcctgcggaccccagagcccccgggaagggcgcaagtcaaagagcactggaggcaccgccggcgatggacgtccaggtcccggctcctgtgctggaaagcgttgatggggagcgtcggcgctgaccacacgcgggagctgcggaagcccagcggttcacacaggcctcccttcaacgtagtcatcccctggtggtggaagcaagacgacggcccctgacgtgcagccacacacagaaaaggctgctgtgaacattttatgcttcgactttttttttcttcagagacagggtgtcgttctgtcgcccaggctggagtgcagtgccaccatcatagctcactgcagcctccacctcctaggctcaagcttcctaagtagttgggactcaaggcttgagtcaccatgccaggctctgttttttcagtctgtgaaaaataaagtcatcagcatgtga

SEQ ID NO: 185248 - DNA, 581 bp, Homo sapiens
  Payload ID: 16478
  Gene Symbol: SPG7
  Gene Name: spastic paraplegia 7 (pure and complicated autosomal recessive)
  ENST ID: ENST00000566371
  CDS Start-End: 189-581
actcaacaagctttccagctcttggcgtcagctctagacctaaggcggacggaggaaggggtcggggtggcggaggaccccgcgcgcctgggagcccacgagggaccctgcccgggcccggagggcggaccctgaagagaacagagcctcttcctaagcttccagacggcgcctccccgcttcctacgatgggctcgcgcagcggccggggcaggaccgaggctcgaagcgcctccgagagcttacaattgagactgctaacccctacctttgaagggatcaacggattgttgttgaaacaacatttagttcagaatccagtcagactctggcaacttttaggtggtactttctattttaacacctcaaggttgaagcagaagaataaggagaaggataagtcgaaggggaaggcgcctgaagaggacgaagaggagaggagacgccgtgagcgggacgaccagatgtaccgagagcggctgcgcaccttgctggtcatcgcggttgtcatgagcctcctgaatgctctcagcaccagcggaggcagcatttcctggaacgactttgtccacgagatgctg

SEQ ID NO: 185249 - DNA, 2305 bp, Homo sapiens
  Payload ID: 16478
  Gene Symbol: SPG7
  Gene Name: spastic paraplegia 7 (pure and complicated autosomal recessive)
  ENST ID: ENST00000569820
  CDS Start-End: 1-212
gaatgggtaccacagaccatgtcatcgtcctggcgtccacgaaccgagctgacattttggacggtgctctgatgaggccaggccgactggaccggcacgtcttcattgatctccccacgctgcagagaaagggtgttgcgctgtcacccaggctggagtgcagtgctgcgatcaccactcactgcggcctcaaccttcagggctcaagctgaggagctaggactactatgggcgtgcgccgccgtgctggttaatttttaacagagtctcgctgtgttgccaaggctggagtgcagcggcgcgatctcggctcactgcaaccaccatctcccaggagaggcgggagatttttgagcagcacctgaagagcctgaagctgacccagtccagcaccttttactcccagcgtctggcagagctgacaccaggattcagtggggctgacatcgccaacatctgcaatgaggctgcgctgcacgcggcgcgggagggacacacttccgtgcacactctcaacttcgagtacgccgtggagcgcgtcctcgcaggtccccagggcttcagcttgggaaagcagtgggttcctgcagaggagtggggcagctgctgtgccagacactgcaaaacacacctggcttctctccgacagccctgcgggtcgagaggactggcgctgcctgtgtcttactgaaatttattttcgtgtaaccatttacttttatgtggaaatcgaaaagcttttgataatagtagcaaagcaggaaggactgagtgggaaccacaagccagttgaaagaaaatacatgacgtacttgagtgctcaggaccacgagctgattcaagttgtacagaatggacacttacagatgtgtggaaaatctgagacaggaaatgaagcctcaccaggactgccaaaaagagcaagatcctgtccaaggaagaacagaaagtggttgcgtttcatgagtcgggccacgccttggtgggctggatgctggagcacacggaggccgtgatgaaggtctccataacccctcggacaaacgccgccctgggctttgctcagatgctccccagagaccagcacctcttcaccaaggagcagctgtttgagcggatgtgcatggccctgggaggacgggcctcggaagcactgtccttcaacgaggtcacttctggggcacaggacgacctgaggaaggtcacccgcatcgcctactccatggtgaagcagtttgggatggcacctggcatcgggcccatctccttccctgaggcgcaggagggcctcatgggcatcgggcggcgccccttcagccaaggcctgcagcagatgatggaccatgaagcaagactgctggtggccaaggcctacagacacaccgagaaggtgctgcaggacaacctggacaagttgcaggcgctggcaaacgcccttctggaaaaggaagtgataaactatgaggacattgaggctctcattggcccgccgccccatgggccgaagaaaatgatcgcaccgcagaggtggatcgacgcccagagggagaaacaggacttgggcgaggaggagaccgaagagacccagcagcctccacttggaggcgaagagccgacttggcccaagtagttgggaggtgttggctgcacgtgcgggtggtccgggaagtgagggctcactcagccaccctgagttgcttttcagctgaggtttgcacttcctctcgcggccctcagtagtccctgcacagtgacttctgagatctgttgattgatgacccttttcatgattttaagtttctctgcagaaactactgacggagtcctgtgtttgtgagtcgtttcccctatggggaaggttatcagtgcttcccgagtgagcatggaacacttcgagttcccagggttatagacagtcgttcccagtgtggctgaggccacccagaggcagcagagcattcagactccaaacagacccctgttcatgccgacgcttgcacgaccgccccagttcctgtggctccctcggaatgctaaggggatcggacatgaaaggaccctgtgagccgattgtcctatctccagcggccctgtcatccagctcactcatcaatggggccagtcaggcccaggcactgggctccggaggactcaccactgccccctgctgccatgtggactggtgcaagttgaggacttcttgctggtctagtcacgcatgcagtgttggggatgccttggtttttactgctctgagaattgttgagatactttactaataaactgtgtagttggaaaatctaca

SEQ ID NO: 185250 - DNA, 734 bp, Homo sapiens
  Payload ID: 16478
  Gene Symbol: SPG7
  Gene Name: spastic paraplegia 7 (pure and complicated autosomal recessive)
  ENST ID: ENST00000566221
  CDS Start-End: 1-320
caggccgactggaccggcacgtcttcattgatctccccacgctgcaggagaggcgggagatttttgagcagcacctgaagagcctgaagctgacccagtccagcaccttttactcccagcgtctggcagagctgacaccaggattcagtggggctgacatcgccaacatctgcaatgaggctgcgctgcacgcggcgcgggagggacacacttccgtgcacactctcaacttcgagtacgccgtggagcgcgtcctcgcagccctgcgggtcgagaggactggcgctgcctgtgtcttactgaaatttattttcgtgtaaccatttacttttatgtggaaatcgaaaagcttttgataatagtagcaaagcaggaaggactgagtgggaaccacaagccagttgaaagaaaatacatgacgtacttgagtgctcaggaccacgagctgattcaagttgtacagaatggacacttacagatgtgtggaaaatctgagacaggaaatgaagcctcaccaggactgccaaaaagagcaagatcctgtccaaggaagaacagaaagtggttgcgtttcatgagtcgggccacgccttggtgggctggatgctggagcacacggaggccgtgatgaaggtctccataacccctcggacaaacgccgccctgggctttgctcagatgctccccagagaccagcacctcttcaccaaggagcagctgtttgagcggatgtg

SEQ ID NO: 185251 - DNA, 1025 bp, Homo sapiens
  Payload ID: 16478
  Gene Symbol: SPG7
  Gene Name: spastic paraplegia 7 (pure and complicated autosomal recessive)
  ENST ID: ENST00000561911
  CDS Start-End: 1-633
cgggagatttttgagcagcacctgaagagcctgaagctgacccagtccagcaccttttactcccagcgtctggcagagctgacaccaggattcagtggggctgacatcgccaacatctgcaatgaggctgcgctgcacgcggcgcgggagggacacacttccgtgcacactctcaacttcgagtacgccgtggagcgcgtcctcgcagggactgccaaaaagagcaagatcctgtccaaggaagaacagaaagtggttgcgtttcatgagtcgggccacgccttggtgggctggatgctggagcacacggaggccgtgatgaaggtctccataacccctcggacaaacgccgccctgggctttgctcagatgctccccagagaccagcacctcttcaccaaggagcagctgtttgagcggatgtgcatggccctgggaggacgggcctcggaagcactgtccttcaacgaggtcacttctgcactgctctgcgcctgcagtgctgaggatgcctctgtctcgaccccgccctccaggggcacaggacgacctgaggaaggtcacccgcatcgcctactccatggtgaagcagtttgggatggcacctggcatcgggcccatctccttccctgaggcgcaggagggcctcatgggcatcgggcggcgccccttcagccaaggcctgcagcagatgatggaccatgaagcaagactgctggtggccaaggcctacagacacaccgagaaggtgctgcaggacaacctggacaagttgcaggcgctggcaaacgcccttctggaaaaggaagtgataaactatgaggacattgaggctctcattggcccgccgccccatgggccgaagaaaatgatcgcaccgcagaggtggatcgacgcccagagggagaaacaggacttgggcgaggaggagaccgaagagacccagcagcctccacttggaggcgaagagccgacttggcccaagtagttgggaggtgttggctgcacgtgcgggtggtccggga

SEQ ID NO: 185252 - DNA, 544 bp, Homo sapiens
  Payload ID: 16478
  Gene Symbol: SPG7
  Gene Name: spastic paraplegia 7 (pure and complicated autosomal recessive)
  ENST ID: ENST00000568151
  CDS Start-End: 1-544
ctgtgggcccgcggatcccccagctgtggacctcggcgcggagcgactgttggggccctggatcgtgggcgctgggcgggccgggaagaggcagggctgggatccgcgcagtcctcggcgtggactttcccaacccgtctgttgtgtgtggatgttctccgcccgtcttcctcgccttttaaagtggaatccagtaacggtttccggcgtagcactaatttacagtccacgcctgtggatcgattccgtcaccaggaattccagcgccttccagttaggagcttacaattgagactgctaacccctacctttgaagggatcaacggattgttgttgaaacaacatttagttcagaatccagtcagactctggcaacttttaggtggtactttctattttaacacctcaaggttgaagcagaagaataaggagaaggataagtcgaaggggaaggcgcctgaagaggacgaagaggagaggagacgccgtgagcgggacgaccagatgtaccgagagcggctgcgcaccttgctggtcatcgcgg

SEQ ID NO: 185253 - DNA, 756 bp, Homo sapiens
  Payload ID: 16478
  Gene Symbol: SPG7
  Gene Name: spastic paraplegia 7 (pure and complicated autosomal recessive)
  ENST ID: ENST00000566682
  CDS Start-End: 1-464
tgtttgagcggatgtgcatggccctgggaggacgggcctcggaagcactgtccttcaacgaggtcacttctggggcacaggacgacctgaggaaggtcacccgcatcgcctactccatggtgaagcagtttgggatggcacctggcatcgggcccatctccttccctgaggcgcaggagggcctcatgggcatcgggcggcgccccttcagccaaggcctgcagcagatgatggaccatgaagcaagactgctggtggccaaggcctacagacacaccgagaaggtgctgcaggacaacctggacaagttgcaggcggtgaggccctggccaggcgtgggggctacggcgtcacacagtgtccacacagcacccacggtccccacccctctcgtgaagtatttccaaggcacacagagtacagagaacactctgaccgatgtgaattctacccagctcaactgaaacttacgtgttccatactttttatcctgaactcgtcaagtgtgttcccccgaggtagaaagaaggctgccacagtctcctgtgcctcttcctgccattagcaattaccaatgttttgtcagttttgtttaatcttttcccaagtcttacacttttttcttgaacatttttttaaaacaaagctttaattttagagtaggaatttttttttctttttttttttgagacaaagtcttgctctgtcacccaggctggagtgcgatggcgacatcttggctcactgcaacctctg

SEQ ID NO: 185254 - DNA, 3420 bp, Homo sapiens
  Payload ID: 16478
  Gene Symbol: SPG7
  Gene Name: spastic paraplegia 7 (pure and complicated autosomal recessive)
  ENST ID: ENST00000620811
  CDS Start-End: 1598-2314
aggcgcggctttcaggccaacatggccgtgctgctgctgctgctccgtgccctccgccggggtccaggcccgggtcctcggccgctgtggggcccaggcccggcctggagtccagggttccccgccaggcccgggagggggcggccgtacatggccagcaggcctccgggggacctcgccgaggctggaggccgagctctgcagagcttacaattgagactgctaacccctacctttgaagggatcaacggattgttgttgaaacaacatttagttcagaatccagtcagactctggcaacttttaggtggtactttctattttaacacctcaaggttgaagcagaagaataaggagaaggataagtcgaaggggaaggcgcctgaagaggacgaagaggagaggagacgccgtgagcgggacgaccagatgtaccgagagcggctgcgcaccttgctggtcatcgcggttgtcatgagcctcctgaatgctctcagcaccagcggaggcagcatttcctggaacgactttgtccacgagatgctggccaagggcgaggtgcagcgcgtccaggtggtgcctgagagcgacgtggtggaagtctacctgcaccctggagccgtggtgtttgggcggcctcggctagccttgatgtaccgaatgcaggttgcaaatattgacaagtttgaagagaagcttcgagcagctgaagatgagctgaatatcgaggccaaggacaggatcccagtttcctacaagcgaacaggattctttggaaatgccctgtactctgtggggatgacggcagtgggcctggccatcctgtggtatgttttccgtctggccgggatgactggaagggaaggtggattcagtgcttttaatcagcttaaaatggctcgtttcaccattgtggatgggaagatggggaaaggagtcagcttcaaagacgtggcaggaatgcacgaagccaaactggaagtccgcgagtttgtggattatctgaagagcccagaacgcttcctccagcttggcgccaaggtcccaaagggcgcactgctgctcggcccccccggctgtgggaagacgctgctggccaaggcggtggccacggaggctcaggtgcccttcctggcgatggccggcccagagttcgtggaggtcattggaggcctcggcgctgcccgtgtgcggagcctctttaaggaagcccgagcccgggccccctgcatcgtctacatcgatgagatcgacgcggtgggcaagaagcgctccaccaccatgtccggcttctccaacacggaggaggagcagacgctcaaccagcttctggtagaaatggatggaatgggtaccacagaccatgtcatcgtcctggcgtccacgaaccgagctgacattttggacggtgctctgatgaggccaggccgactggaccggcacgtcttcattgatctccccacgctgcaggagaggcgggagatttttgagcagcacctgaagagcctgaagctgacccagtccagcaccttttactcccagcgtctggcagagctgacaccaggattcagtggggctgacatcgccaacatctgcaatgaggctgcgctgcacgcggcgcgggagggacacacttccgtgcacactctcaacttcgagtacgccgtggagcgcgtcctcgcaggtccccagggctcagcttgggaaagcagtgggttcctgcagaggagtggggagctgctgtgccagacactgcaaaacacacctggcttctctccgacagccctgcggggagaggactggcgctgcctgtgtcttactgatttattttcgtgtaaccatttacttttatgtggaaatcgaaaagcttttgataatagtagcaaagcaggaaggactgagtgggaaccacaagccagttgaaagaaaatacatgacgtacttgagtgctcaggaccacgagctgattcaagttgtacagaatggacacttacagatgtgtggaaaatctgagacaggaaatgaagcctcaccaggactgccaaaaagagcaagatcctgtccaaggaagaacagaaagtggttgcgtttcatgagtcgggccacgccttggtgggctggatgctggagcacacggcgtgatgaaggtctccataacccctcgacaaacgccgccctgggctttgctcaggctccccagagaccagcacctcttcacgagcagctgtttgagcggatgtgcatggccctgggaggacgggcctcggaagcactgtcccaacgaggtcacttctgggggcacaggacgacctgaggaaggtcacccgcatcgcctactccatggtgaagcagtttgggatggcacctggcatcgggcccatctccttccctgaggcgcaggagggcctcatgggcatcgggcggcgccccttcagccaaggcctgcagcagatgatggaccatgaagcaagactgctggtggccaaggcctacagacacaccgagaaggtgctgcaggacaacctggacaagttgcaggcgctggcaaacgcccttctggaaaaggaagtgataaactatgaggacattgaggctctcattggcccgccgccccatgggccgaagaaaatgatcgcaccgcagaggtggatcgacgcccagagggagaaacaggacttgggcgaggaggagaccgaagagacccagcagcctccacttggaggcgaagagccgacttggcccaagtagttgggaggtgttggctgcacgtgcgggtggtccgggaagtgagggctcactcagccaccctgagttgcttttcagctgaggtttgcacttcctctcgcggccctcagtagtccctgcacagtgacttctgagatctgttgattgatgacccttttcatgattttaagtttctctgcagaaactactgacggagtcctgtgtttgtgagtcgtttcccctatggggaaggttatcagtgcttcccgagtgagcatggaacacttcgagttcccagggttatagacagtcgttcccagtgtggctgaggccacccagaggcagcagagcattcagactccaaacagacccctgttcatgccgacgcttgcacgaccgccccagttcctgtggctccctcggaatgctaaggggatcggacatgaaaggaccctgtgagccgattgtcctatctccagcggccctgtcatccagctcactcatcaatggggccagtcaggcccaggcactgggctccggaggactcaccactgccccctgctgccatgtggactggtgcaagttgaggacttcttgctggtctagtcacgcatgcagtgttggggatgccttggtttttactgctctgagaattgttgagatactttactaataaactgtgtagttggaaaatct

SEQ ID NO: 185255 - DNA, 1361 bp, Homo sapiens
  Payload ID: 16478
  Gene Symbol: SPG7
  Gene Name: spastic paraplegia 7 (pure and complicated autosomal recessive)
  ENST ID: ENST00000567138
  CDS Start-End: 1-328
ggccggcccagagttcgtggaggtcattggaggcctcggcgctgcccgtgtgcggagcctctttaaggaagcccgagcccgggccccctgcatcgtctacatcgatgagatcgacgcggtgggcaagaagcgctccaccaccatgtccggcttctccaacacggaggaggagcagacgctcaaccagcttctggtagaaatggatggtcagtgctcgtgcgccccgcacccccattgcaccatcagaggaggttttccgatgtctttcagaacaggttgtggtgagccaagatcgtgtcactgcactccggcctgggtgacagagtgagactctgtctcaagaaaaaaaaaaaatagaaatgtagctttcagacccggcgcagtggctcacgcctgtaatcccagcactttgggaggccaagacaggcggatcaccagaggtcaggatttcatgagcagcctggccaacatgctgaaaccccatctctacaaaaatacaaaagtcagccgggtgtggtggcaggtgcttataatcgctagtactctggagaatcgcttgaactcgggaggtggaggttgcagtgagccaagatctcaccattgcactccagcctgcctgggtgacagagggagactccatctcaaaaaaaaaaaaaaaaaaaacacagcttttaattaaaaaaaggtcaagacaatagtaaaaaagacaagtaggaatataagtggtacgtcagatgtaatctttccttttcttttttagatagtcttgctctctctcccaggctggagcgcagtggcacaatcttggctcactgcaggctctgtctcccgggttctcgccattctcctgcctcagcctctcgagtagctgagactacaggcgcctgtcaccacgcctggctaattttttgtatttttagtagagacggggtttcaccgtgttagccaggatggtctcgatctcctgacctcgtgatccgcctgcctcggcctcccaaagtgctgagattacagacgtgagccttagcacccaggctttttttttcattattactgttttttaggggctttgcagcaaaacccagagggactgctagacagattctggaagagctgtgccactcataattttaggtgtaatgagtctgtctggttgtgctgccacgtctctccctgtgccccctggagagggtgtgacgctggttagagggcggagcagagcatcagggtgctgcactgcagcgagggagacaccccatttgttgtgaccccttgaaaatgacttctggtctggctttgacaatttttttttttaatggagctgacccaataaaggtgacatggaattatttttcttctga

SEQ ID NO: 185256 - DNA, 5117 bp, Homo sapiens
  Payload ID: 16479
  Gene Symbol: SPAST
  Gene Name: spastin
  Uniprot ID: Q9UBP0
  ENST ID: ENST00000315285
  CDS Start-End: 126-1976
gctcctgagaccggcgggcacacgggggtctgtggcccccgccgtagcagtggctgccgccgtcgcttggttcccgtcggtctgcgggaggcgggttatggcggcggcggcagtgagagctgtgaatgaattctccgggtggacgagggaagaagaaaggctccggcggcgccagcaacccggtgcctcccaggcctccgcccccttgcctggcccccgcccctcccgccgccgggccggcccctccgcccgagtcgccgcataagcggaacctgtactatttctcctacccgctgtttgtaggcttcgcgctgctgcgtttggtcgccttccacctggggctcctcttcgtgtggctctgccagcgcttctcccgcgccctcatggcagccaagaggagctccggggccgcgccagcacctgcctcggcctcggccccggcgccggtgccgggcggcgaggccgagcgcgtccgagtcttccacaaacaggccttcgagtacatctccattgccctgcgcatcgatgaggatgagaaagcaggacagaaggagcaagctgtggaatggtataagaaaggtattgaagaactggaaaaaggaatagctgttatagttacaggacaaggtgaacagtgtgaaagagctagacgccttcaagctaaaatgatgactaatttggttatggccaaggaccgcttacaacttctagagaagatgcaaccagttttgccattttccaagtcacaaacggacgtctataatgacagtactaacttggcatgccgcaatggacatctccagtcagaaagtggagctgttccaaaaagaaaagaccccttaacacacactagtaattcactgcctcgttcaaaaacagttatgaaaactggatctgcaggcctttcaggccaccatagagcacctagttacagtggtttatccatggtttctggagtgaaacagggatctggtcctgctcctaccactcataagggtactccgaaaacaaataggacaaataaaccttctacccctacaactgctactcgtaagaaaaaagacttgaagaattttaggaatgtggacagcaaccttgctaaccttataatgaatgaaattgtggacaatggaacagctgttaaatttgatgatatagctggtcaagacttggcaaaacaagcattgcaagaaattgttattcttccttctctgaggcctgagttgttcacagggcttagagctcctgccagagggctgttactctttggtccacctgggaatgggaagacaatgctggctaaagcagtagctgcagaatcgaatgcaaccttctttaatataagtgctgcaagtttaacttcaaaatacgtgggagaaggagagaaattggtgagggctctttttgctgtggctcgagaacttcaaccttctataatttttatagatgaagttgatagccttttgtgtgaaagaagagaaggggagcacgatgctagtagacgcctaaaaactgaatttctaatagaatttgatggtgtacagtctgctggagatgacagagtacttgtaatgggtgcaactaataggccacaagagcttgatgaggctgttctcaggcgtttcatcaaacgggtatatgtgtctttaccaaatgaggagacaagactacttttgcttaaaaatctgttatgtaaacaaggaagtccattgacccaaaaagaactagcacaacttgctagaatgactgatggatactcaggaagtgacctaacagctttggcaaaagatgcagcactgggtcctatccgagaactaaaaccagaacaggtgaagaatatgtctgccagtgagatgagaaatattcgattatctgacttcactgaatccttgaaaaaaataaaacgcagcgtcagccctcaaactttagaagcgtacatacgttggaacaaggactttggagataccactgtttaaggaaatacctttgtaaacctgcagaacattttacttaaaagaggaaacacaagatcttcaatgaacgtcatcggctacagaaacagcctaagtttacaggactttttagagtcttacatatttgtgcaccaaacttgaagatgaaccagaaaacagacttaaacaaaatatacaatgcaaatgtaattttttgttgtttaaggccttgccttgatggtcacagttatcccaatggacactaagttagagcacaacaaaacctgattctggtcttctttaccaatataatcataatgtaaataataatttgtatattgtgttgcagatgaaagtattccaggaacagtgaatggtagaagacacaagaacatttgtttgtttgtcttctgatgttttttcttaaaatagtaatttctcctacttttcttttctactgttgtcttaactacaggtgattggaatgccaaacactcttaagtttattttcttttttcgttttataaattcagtgtgccaaatgaaacttttttcctaagtaactgtaataggaaaaagtttattttgagagtttcttcttcataaatctacagacattaaacaattgttgtgttctttttaccttttatttttctattaccttgctaccaaacagtttagatagcaatataatagcaaaaaagcaaatatggtaaaatagagaaggtttgaaggtttgagttactctgtcatataacatgtagatcagtcttcatgtgacctgcagtatttttttttctaatgtatttgtcagaaatctgttgtagactgttaacttcttcctgatggaatttattttctgcaagaattattctgatatttaagagagccaattttaactgctgtgaaaatgtttccagtgcaagagaagggaaatactaggaactaagacatttctaatttattgcttattactttcttaattttacaggataattataagcaagtggaactaccatcttttattcttaataattattaatcccttcaatgaaactttaaaaaaactgaatttttatacatggcatacatttttctagttccttctgcttgctttattaactcaaaagttctagttctagtctgttgatctgccttttgttctcccaaaatgtacagtaattccatttgtttgtataaatatgcctggattttcattataaaaatgtcattgtagggagtagagactcatatcatggccttttaaatattgtaataaaggcaaatagatatttgcccttagtttactggttaaaagtttgtttacagaacttttctctggtgcttaaatgatgctatgtaaaatgtcatgagtggaaagaatatttgtagtagtaacaagaatttttcatttaggaaagatttcttaggttttgaaagaatacattaaaataaaaaacttgcccctactaggtaagaactttataatgaagacatacattcttcttaattttactcttgctcttgttaaagatttgtttgaatatagaagatgcatgatttctgggtttttttttttttttgagacagagtttcgctcttgttgcccaggctggagtgcaatggcgcaatctcgactcaccacaacctccgcctcccaggttcaagcaattctcctgcctcagcctcccgagtagctgggattacaggcatgcgccactaccccagctaattttgtatttttagtagagatggggtttctccatgttggtcaggctggtcttgaactcctgacctcaggtgatccgcctgcctcggcctcccaaagtgctgggattacaggcataagccactgcgcccagccagaagatgcatgatttcttaggatcatatgctgtttgtagccataaggtaaatcatgtctcttccaatcatgactttggaactccctgaataataaaaatgagagttgagataaataggggaaaaaaaatttttttcaagccagagctatgcatatgttaggtgatgggtagtatccctttaaggtctcaaacattacaacatcaattatgaaatactgataacgaaaggtagtaatgaaatatatatgatgaaaagaattgagaagttctaaattaagacatttcagttaagctcataaaatttcattgttttcatttaaaagattaacgttattgatacttggataactggctaatcatattaaaggactatgtggttccagctcaacttttaatatattgtctcctttaaaactatcatggttataattctattgggaaagacttttagataacaaagatttcaaatgttaaaagagataaaagtcaggttaatactatcttaaacactgagtcagaaaatcattactgtatagaagttgctttcctgatcaagtctgaacttcagctagtgctagagaactattttctatgacttaactctaaccaagttttattttaagctgtttctttgatagaagggccatgaaaatagagtaatgatatagtaggagataagggattggtttggtctttttcaataaagatagaagttgctgaagttttctgaattaataatgacttagattgtgaccttttagattcggtgttgagctctgtgttgtattacttcctaaaagataatgcttaaacattaagcattagtgtgctcttcatgttaatatggcagagttttgtaaactaaattaaaacttactgatatattggactttgagccaagggaaagaatgagtactatctttccagatatcttaagggtaaaagcttattctaagacagtctgtccattgagaatattagatttctgacttgcaaatatgtttgtactccagaagaattagaggaaaagcagatactagaattctaatttaattacatatacagccgtctttgtttatagtgtagaattctttatattttgtacaaaaactaattcttttggtaaaatgaaccatttacagttcggttttggactctgagtcaaaggattttcctttaaatgcttgtctcaattttagtctggtcttttgtacttttcttcagaagaaatgaattaaagggtacagttgcataaagtgggtttttatcctaatgtattggaaataaatgataaacttta

SEQ ID NO: 185257 - DNA, 5116 bp, Homo sapiens
  Payload ID: 16479
  Gene Symbol: SPAST
  Gene Name: spastin
  Uniprot ID: Q9UBP0
  ENST ID: ENST00000345662
  CDS Start-End: 222-1976
ggcccgagccaccgactgcaggaggagaaggggttgtgctcctggccgaggaaggagaaaggggcggggccggcgggcagcgtgcggcagtgcggagctcctgagaccggcgggcacacgggggtctgtggcccccgccgtagcagtggctgccgccgtcgcttggttcccgtcggtctgcgggaggcgggttatggcggcggcggcagtgagagctgtgaatgaattctccgggtggacgagggaagaagaaaggctccggcggcgccagcaacccggtgcctcccaggcctccgcccccttgcctggcccccgcccctcccgccgccgggccggcccctccgcccgagtcgccgcataagcggaacctgtactatttctcctacccgctgtttgtaggcttcgcgctgctgcgtttggtcgccttccacctggggctcctcttcgtgtggctctgccagcgcttctcccgcgccctcatggcagccaagaggagctccggggccgcgccagcacctgcctcggcctcggccccggcgccggtgccgggcggcgaggccgagcgcgtccgagtcttccacaaacaggccttcgagtacatctccattgccctgcgcatcgatgaggatgagaaagcaggacagaaggagcaagctgtggaatggtataagaaaggtattgaagaactggaaaaaggaatagctgttatagttacaggacaaggtgaacagtgtgaaagagctagacgccttcaagctaaaatgatgactaatttggttatggccaaggaccgcttacaacttctagaaagtggagctgttccaaaaagaaaagaccccttaacacacactagtaattcactgcctcgttcaaaaacagttatgaaaactggatctgcaggcctttcaggccaccatagagcacctagttacagtggtttatccatggtttctggagtgaaacagggatctggtcctgctcctaccactcataagggtactccgaaaacaaataggacaaataaaccttctacccctacaactgctactcgtaagaaaaaagacttgaagaattttaggaatgtggacagcaaccttgctaaccttataatgaatgaaattgtggacaatggaacagctgttaaatttgatgatatagctggtcaagacttggcaaaacaagcattgcaagaaattgttattcttccttctctgaggcctgagttgttcacagggcttagagctcctgccagagggctgttactctttggtccacctgggaatgggaagacaatgctggctaaagcagtagctgcagaatcgaatgcaaccttctttaatataagtgctgcaagtttaacttcaaaatacgtgggagaaggagagaaattggtgagggctctttttgctgtggctcgagaacttcaaccttctataatttttatagatgaagttgatagccttttgtgtgaaagaagagaaggggagcacgatgctagtagacgcctaaaaactgaatttctaatagaatttgatggtgtacagtctgctggagatgacagagtacttgtaatgggtgcaactaataggccacaagagcttgatgaggctgttctcaggcgtttcatcaaacgggtatatgtgtctttaccaaatgaggagacaagactacttttgcttaaaaatctgttatgtaaacaaggaagtccattgacccaaaaagaactagcacaacttgctagaatgactgatggatactcaggaagtgacctaacagctttggcaaaagatgcagcactgggtcctatccgagaactaaaaccagaacaggtgaagaatatgtctgccagtgagatgagaaatattcgattatctgacttcactgaatccttgaaaaaaataaaacgcagcgtcagccctcaaactttagaagcgtacatacgttggaacaaggactttggagataccactgtttaaggaaatacctttgtaaacctgcagaacattttacttaaaagaggaaacacaagatcttcaatgaacgtcatcggctacagaaacagcctaagtttacaggactttttagagtcttacatatttgtgcaccaaacttgaagatgaaccagaaaacagacttaaacaaaatatacaatgcaaatgtaattttttgttgtttaaggccttgccttgatggtcacagttatcccaatggacactaagttagagcacaacaaaacctgattctggtcttctttaccaatataatcataatgtaaataataatttgtatattgtgttgcagatgaaagtattccaggaacagtgaatggtagaagacacaagaacatttgtttgtttgtcttctgatgttttttcttaaaatagtaatttctcctacttttcttttctactgttgtcttaactacaggtgattggaatgccaaacactcttaagtttattttcttttttcgttttataaattcagtgtgccaaatgaaacttttttcctaagtaactgtaataggaaaaagtttattttgagagtttcttcttcataaatctacagacattaaacaattgttgtgttctttttaccttttatttttctattaccttgctaccaaacagtttagatagcaatataatagcaaaaaagcaaatatggtaaaatagagaaggtttgaaggtttgagttactctgtcatataacatgtagatcagtcttcatgtgacctgcagtatttttttttctaatgtatttgtcagaaatctgttgtagactgttaacttcttcctgatggaatttattttctgcaagaattattctgatatttaagagagccaattttaactgctgtgaaaatgtttccagtgcaagagaagggaaatactaggaactaagacatttctaatttattgcttattactttcttaattttacaggataattataagcaagtggaactaccatcttttattcttaataattattaatcccttcaatgaaactttaaaaaaactgaatttttatacatggcatacatttttctagttccttctgcttgctttattaactcaaaagttctagttctagtctgttgatctgccttttgttctcccaaaatgtacagtaattccatttgtttgtataaatatgcctggattttcattataaaaatgtcattgtagggagtagagactcatatcatggccttttaaatattgtaataaaggcaaatagatatttgcccttagtttactggttaaaagtttgtttacagaacttttctctggtgcttaaatgatgctatgtaaaatgtcatgagtggaaagaatatttgtagtagtaacaagaatttttcatttaggaaagatttcttaggttttgaaagaatacattaaaataaaaaacttgcccctactaggtaagaactttataatgaagacatacattcttcttaattttactcttgctcttgttaaagatttgtttgaatatagaagatgcatgatttctgggtttttttttttttttgagacagagtttcgctcttgttgcccaggctggagtgcaatggcgcaatctcgactcaccacaacctccgcctcccaggttcaagcaattctcctgcctcagcctcccgagtagctgggattacaggcatgcgccactaccccagctaattttgtatttttagtagagatggggtttctccatgttggtcaggctggtcttgaactcctgacctcaggtgatccgcctgcctcggcctcccaaagtgctgggattacaggcataagccactgcgcccagccagaagatgcatgatttcttaggatcatatgctgtttgtagccataaggtaaatcatgtctcttccaatcatgactttggaactccctgaataataaaaatgagagttgagataaataggggaaaaaaaatttttttcaagccagagctatgcatatgttaggtgatgggtagtatccctttaaggtctcaaacattacaacatcaattatgaaatactgataacgaaaggtagtaatgaaatatatatgatgaaaagaattgagaagttctaaattaagacatttcagttaagctcataaaatttcattgttttcatttaaaagattaacgttattgatacttggataactggctaatcatattaaaggactatgtggttccagctcaacttttaatatattgtctcctttaaaactatcatggttataattctattgggaaagacttttagataacaaagatttcaaatgttaaaagagataaaagtcaggttaatactatcttaaacactgagtcagaaaatcattactgtatagaagttgctttcctgatcaagtctgaacttcagctagtgctagagaactattttctatgacttaactctaaccaagttttattttaagctgtttctttgatagaagggccatgaaaatagagtaatgatatagtaggagataagggattggtttggtctttttcaataaagatagaagttgctgaagttttctgaattaataatgacttagattgtgaccttttagattcggtgttgagctctgtgttgtattacttcctaaaagataatgcttaaacattaagcattagtgtgctcttcatgttaatatggcagagttttgtaaactaaattaaaacttactgatatattggactttgagccaagggaaagaatgagtactatctttccagatatcttaagggtaaaagcttattctaagacagtctgtccattgagaatattagatttctgacttgcaaatatgtttgtactccagaagaattagaggaaaagcagatactagaattctaatttaattacatatacagccgtctttgtttatagtgtagaattctttatattttgtacaaaaactaattcttttggtaaaatgaaccatttacagttcggttttggactctgagtcaaaggattttcctttaaatgcttgtctcaattttagtctggtcttttgtacttttcttcagaagaaatgaattaaagggtacagttgcataaagtgggtttttatcctaatgtattggaaataaatgataaacttt

SEQ ID NO: 185258 - DNA, 5212 bp, Homo sapiens
  Payload ID: 16479
  Gene Symbol: SPAST
  Gene Name: spastin
  Uniprot ID: Q9UBP0
  ENST ID: ENST00000615843
  CDS Start-End: 222-2072
ggcccgagccaccgactgcaggaggagaaggggttgtgctcctggccgaggaaggagaaaggggcggggccggcgggcagcgtgcggcagtgcggagctcctgagaccggcgggcacacgggggtctgtggcccccgccgtagcagtggctgccgccgtcgcttggttcccgtcggtctgcgggaggcgggttatggcggcggcggcagtgagagctgtgaatgaattctccgggtggacgagggaagaagaaaggctccggcggcgccagcaacccggtgcctcccaggcctccgcccccttgcctggcccccgcccctcccgccgccgggccggcccctccgcccgagtcgccgcataagcggaacctgtactatttctcctacccgctgtttgtaggcttcgcgctgctgcgtttggtcgccttccacctggggctcctcttcgtgtggctctgccagcgcttctcccgcgccctcatggcagccaagaggagctccggggccgcgccagcacctgcctcggcctcggccccggcgccggtgccgggcggcgaggccgagcgcgtccgagtcttccacaaacaggccttcgagtacatctccattgccctgcgcatcgatgaggatgagaaagcaggacagaaggagcaagctgtggaatggtataagaaaggtattgaagaactggaaaaaggaatagctgttatagttacaggacaaggtgaacagtgtgaaagagctagacgccttcaagctaaaatgatgactaatttggttatggccaaggaccgcttacaacttctagagaagatgcaaccagttttgccattttccaagtcacaaacggacgtctataatgacagtactaacttggcatgccgcaatggacatctccagtcagaaagtggagctgttccaaaaagaaaagaccccttaacacacactagtaattcactgcctcgttcaaaaacagttatgaaaactggatctgcaggcctttcaggccaccatagagcacctagttacagtggtttatccatggtttctggagtgaaacagggatctggtcctgctcctaccactcataagggtactccgaaaacaaataggacaaataaaccttctacccctacaactgctactcgtaagaaaaaagacttgaagaattttaggaatgtggacagcaaccttgctaaccttataatgaatgaaattgtggacaatggaacagctgttaaatttgatgatatagctggtcaagacttggcaaaacaagcattgcaagaaattgttattcttccttctctgaggcctgagttgttcacagggcttagagctcctgccagagggctgttactctttggtccacctgggaatgggaagacaatgctggctaaagcagtagctgcagaatcgaatgcaaccttctttaatataagtgctgcaagtttaacttcaaaatacgtgggagaaggagagaaattggtgagggctctttttgctgtggctcgagaacttcaaccttctataatttttatagatgaagttgatagccttttgtgtgaaagaagagaaggggagcacgatgctagtagacgcctaaaaactgaatttctaatagaatttgatggtgtacagtctgctggagatgacagagtacttgtaatgggtgcaactaataggccacaagagcttgatgaggctgttctcaggcgtttcatcaaacgggtatatgtgtctttaccaaatgaggagacaagactacttttgcttaaaaatctgttatgtaaacaaggaagtccattgacccaaaaagaactagcacaacttgctagaatgactgatggatactcaggaagtgacctaacagctttggcaaaagatgcagcactgggtcctatccgagaactaaaaccagaacaggtgaagaatatgtctgccagtgagatgagaaatattcgattatctgacttcactgaatccttgaaaaaaataaaacgcagcgtcagccctcaaactttagaagcgtacatacgttggaacaaggactttggagataccactgtttaaggaaatacctttgtaaacctgcagaacattttacttaaaagaggaaacacaagatcttcaatgaacgtcatcggctacagaaacagcctaagtttacaggactttttagagtcttacatatttgtgcaccaaacttgaagatgaaccagaaaacagacttaaacaaaatatacaatgcaaatgtaattttttgttgtttaaggccttgccttgatggtcacagttatcccaatggacactaagttagagcacaacaaaacctgattctggtcttctttaccaatataatcataatgtaaataataatttgtatattgtgttgcagatgaaagtattccaggaacagtgaatggtagaagacacaagaacatttgtttgtttgtcttctgatgttttttcttaaaatagtaatttctcctacttttcttttctactgttgtcttaactacaggtgattggaatgccaaacactcttaagtttattttcttttttcgttttataaattcagtgtgccaaatgaaacttttttcctaagtaactgtaataggaaaaagtttattttgagagtttcttcttcataaatctacagacattaaacaattgttgtgttctttttaccttttatttttctattaccttgctaccaaacagtttagatagcaatataatagcaaaaaagcaaatatggtaaaatagagaaggtttgaaggtttgagttactctgtcatataacatgtagatcagtcttcatgtgacctgcagtatttttttttctaatgtatttgtcagaaatctgttgtagactgttaacttcttcctgatggaatttattttctgcaagaattattctgatatttaagagagccaattttaactgctgtgaaaatgtttccagtgcaagagaagggaaatactaggaactaagacatttctaatttattgcttattactttcttaattttacaggataattataagcaagtggaactaccatcttttattcttaataattattaatcccttcaatgaaactttaaaaaaactgaatttttatacatggcatacatttttctagttccttctgcttgctttattaactcaaaagttctagttctagtctgttgatctgccttttgttctcccaaaatgtacagtaattccatttgtttgtataaatatgcctggattttcattataaaaatgtcattgtagggagtagagactcatatcatggccttttaaatattgtaataaaggcaaatagatatttgcccttagtttactggttaaaagtttgtttacagaacttttctctggtgcttaaatgatgctatgtaaaatgtcatgagtggaaagaatatttgtagtagtaacaagaatttttcatttaggaaagatttcttaggttttgaaagaatacattaaaataaaaaacttgcccctactaggtaagaactttataatgaagacatacattcttcttaattttactcttgctcttgttaaagatttgtttgaatatagaagatgcatgatttctgggtttttttttttttttgagacagagtttcgctcttgttgcccaggctggagtgcaatggcgcaatctcgactcaccacaacctccgcctcccaggttcaagcaattctcctgcctcagcctcccgagtagctgggattacaggcatgcgccactaccccagctaattttgtatttttagtagagatggggtttctccatgttggtcaggctggtcttgaactcctgacctcaggtgatccgcctgcctcggcctcccaaagtgctgggattacaggcataagccactgcgcccagccagaagatgcatgatttcttaggatcatatgctgtttgtagccataaggtaaatcatgtctcttccaatcatgactttggaactccctgaataataaaaatgagagttgagataaataggggaaaaaaaatttttttcaagccagagctatgcatatgttaggtgatgggtagtatccctttaaggtctcaaacattacaacatcaattatgaaatactgataacgaaaggtagtaatgaaatatatatgatgaaaagaattgagaagttctaaattaagacatttcagttaagctcataaaatttcattgttttcatttaaaagattaacgttattgatacttggataactggctaatcatattaaaggactatgtggttccagctcaacttttaatatattgtctcctttaaaactatcatggttataattctattgggaaagacttttagataacaaagatttcaaatgttaaaagagataaaagtcaggttaatactatcttaaacactgagtcagaaaatcattactgtatagaagttgctttcctgatcaagtctgaacttcagctagtgctagagaactattttctatgacttaactctaaccaagttttattttaagctgtttctttgatagaagggccatgaaaatagagtaatgatatagtaggagataagggattggtttggtctttttcaataaagatagaagttgctgaagttttctgaattaataatgacttagattgtgaccttttagattcggtgttgagctctgtgttgtattacttcctaaaagataatgcttaaacattaagcattagtgtgctcttcatgttaatatggcagagttttgtaaactaaattaaaacttactgatatattggactttgagccaagggaaagaatgagtactatctttccagatatcttaagggtaaaagcttattctaagacagtctgtccattgagaatattagatttctgacttgcaaatatgtttgtactccagaagaattagaggaaaagcagatactagaattctaatttaattacatatacagccgtctttgtttatagtgtagaattctttatattttgtacaaaaactaattcttttggtaaaatgaaccatttacagttcggttttggactctgagtcaaaggattttcctttaaatgcttgtctcaattttagtctggtcttttgtacttttcttcagaagaaatgaattaaagggtacagttgcataaagtgggtttttatcctaatgtattggaaataaatgataaacttt

SEQ ID NO: 185259 - DNA, 1715 bp, Homo sapiens
  Payload ID: 16479
  Gene Symbol: SPAST
  Gene Name: spastin
  Uniprot ID: Q9UBP0
  ENST ID: ENST00000621856
  CDS Start-End: 123-1715
ataagcggaacctgtactatttctcctacccgctgtttgtaggcttcgcgctgctgcgtttggtcgccttccacctggggctcctcttcgtgtggctctgccagcgcttctcccgcgccctcatggcagccaagaggagctccggggccgcgccagcacctgcctcggcctcggccccggcgccggtgccgggcggcgaggccgagcgcgtccgagtcttccacaaacaggccttcgagtacatctccattgccctgcgcatcgatgaggatgagaaagcaggacagaaggagcaagctgtggaatggtataagaaaggtattgaagaactggaaaaaggaatagctgttatagttacaggacaaggtgaacagtgtgaaagagctagacgccttcaagctaaaatgatgactaatttggttatggccaaggaccgcttacaacttctagagaagatgcaaccagttttgccattttccaagtcacaaacggacgtctataatgacagtactaacttggcatgccgcaatggacatctccagtcagaaagtggagctgttccaaaaagaaaagaccccttaacacacactagtaattcactgcctcgttcaaaaacagttatgaaaactggatctgcaggcctttcaggccaccatagagcacctagttacagtggtttatccatggtttctggagtgaaacagggatctggtcctgctcctaccactcataagggtactccgaaaacaaataggacaaataaaccttctacccctacaactgctactcgtaagaaaaaagacttgaagaattttaggaatgtggacagcaaccttgctaaccttataatgaatgaaattgtggacaatggaacagctgttaaatttgatgatatagctggtcaagacttggcaaaacaagcattgcaagaaattgttattcttccttctctgaggcctgagttgttcacagggcttagagctcctgccagagggctgttactctttggtccacctgggaatgggaagacaatgctggctaaagcagtagctgcagaatcgaatgcaaccttctttaatataagtgctgcaagtttaacttcaaaatacgtgggagaaggagagaaattggtgagggctctttttgctgtggctcgagaacttcaaccttctataatttttatagatgaagttgatagccttttgtgtgaaagaagagaaggggagcacgatgctagtagacgcctaaaaactgaatttctaatagaatttgatggtgtacagtctgctggagatgacagagtacttgtaatgggtgcaactaataggccacaagagcttgatgaggctgttctcaggcgtttcatcaaacgggtatatgtgtctttaccaaatgaggagacaagactacttttgcttaaaaatctgttatgtaaacaaggaagtccattgacccaaaaagaactagcacaacttgctagaatgactgatggatactcaggaagtgacctaacagctttggcaaaagatgcagcactgggtcctatccgagaactaaaaccagaacaggtgaagaatatgtctgccagtgagatgagaaatattcgattatctgacttcactgaatccttgaaaaaaataaaacgcagcgtcagccctcaaactttagaagcgtacatacgttggaacaaggactttggagataccactgtttaa

SEQ ID NO: 185260 - DNA, 4256 bp, Homo sapiens
  Payload ID: 16480
  Gene Symbol: SPATA31A1
  Gene Name: SPATA31 subfamily A, member 1
  ENST ID: ENST00000377647
  CDS Start-End: 21-4106
agtccctagtccccacggggatgcccagagctcagttgcttgaaagcaacgcgcctattcacatggagaatcttccctttcctttaaaattacttagtgcctcatcgctaaacgcccccagttccacaccatgggtgttggatatcttcctcactttggtgtttgccctggggttcttcttcctattactcccctacttatcttacttccgttgtgatgacccaccctcaccatcgcctgggaagagaaagtgtccagtagggcggaggcggaggcccagaggcaggatgaaaaaccacagtctgagagctggtagagagtgcccgagaggcctgcaggagacttcggacctgctttcacaactgcagagcctcctggggccacaccttgacaaaggtgactttggtcagctctccggtccagaccccccaggtgaagtgggcgaaagagcacctgatggagcctcccagtcctctcatgagcctatggaagatgctgctcccattctctccccgttagcttccccggatcctcaagccaagcatcctcaggatctggcctccaccccatcaccaggcccaatgaccacctcagtctcctccctaagtgcctcccagccaccagaaccttcccttcccctagaacacccctcacccgagccacctgcacttttccctcacccaccacacacccctgatcctctggcctgctctccgcctcctccaaaaggcttcactgctcctcccctgcgggactccacactgataactccatctcactgtgactcagtggcacttccactgggcaccgtccctcaaagcttgtctccacatgaggatttggtggcttctgtcccagccatctcaggccttggtggctcaaacagtcatgtttctgcctcctcccggtggcaggagactgccagaacctcgtgcgcctttaactcatcagtccagcaagatcatctttcccgccacccaccagagacctaccagatggaagctggtagcctgtttttgctcagctctgatggccagaatgccgtggggatacaagtcacagaaacagccaaggtcaacatttgggaagaaaaagaaaatgttggatcatttacagatcgaatgaccccagaaaagcacttaaattctttgcggaatttggctaaatcattggatgctgagcaggacaccacaaacccaaaacccttctggaacatgggagagaactcgaaacagctgcccggacctcagaagctctcagatcctaggctctggcaggaaagtttttggaagaattatagccagcttttctggggcctcccctctctgcacagcgagtccctggtggctaacgcctgggtaactgacaggtcttatactttacagtctcctcctttcttgttcaatgaaatgtccaatgtctgcccaattcaaagggagactacaatgtccccactgcttttccaggcccagcccccgtcccatctggggcccgagtgccaaccctttatttcatccacaccccaattccggcccacacctatggctcaggccgaggctcaggcccatcttcaatcttctttcccagtcctatctcctgcttttccatccctgattaagaacactggagtagcttgccctgcatcgcagaataaagtgcaagctctctccctacctgaaactcagcaccctgaatggcctttgttgaggagacaactagaaggtaggttggctttaccctctagggtccaaaaatctcaggacgtctttagtgtctccactcctaaccttccccaggaaagtttgacatccattctgcctgagaactttccagtcagtcctgaactccggagacaactggagcaacacataaaaaagtggatcatccaacactggggcaacctgggaaggatccaagagtctctggatctgatgcagcttcgggacgaatcaccagggacaagtcaggccaagggcaaacccagtccctggcagtcctccatgtccacaggtgaaagcagcaaggaggcacagaaggtgaagttccagctagagagggacccgtgcccacatctggggcaaattctgggtgagaccccacaaaatctatccagggacatgaaaagcttcccacggaaggttctgggggtgacttctgaggagtcggaaaggaacttgaggaagcccttgaggagtgactcgggaagtgatttattaagatgcacagagaggactcatatagaaaacatcctgaaagcccacatgggcaggaacttgggccagaccaacgagggcttgatccccgtgcgtgtgcgtcgatcctggcttgctgtcaaccaggctcttcccgtgtccaacacccatgtgaaaaccagcaatctagcagccccgaaaagtgggaaagcctgtgtgaacacagcccaggtgctttccttcctcgagccgtgtactcagcaggggttgggagcccatattgtgaggttttgggccaaacacaggtggggtctacccctcagggtcctcaagcccattcagtgctttaaactggaaaaggtttcatccttgtcccttacacagcttgctggtccctcctcagccacctgtgaatctggggctggctcagaagttgaggtggacatgttccttagaaagccaccaatggcaagtctgagaaagcaggtgctgaccaaagcatctgatcacatgccagagagtcttctggcctcctcacctgcatggaagcagttccagagggcaccgcgaggaatcccatcttggaatgatcatgggcccttgaagcctcctccagctggacaggagggcaggtggccatctaagcccctcacgtacagcctcacaggcagcacccagcagagcaggagcttaggagcccaatcttcaaaggctggagagacaagggaggcagtgccacaatgcagagtccccttggaaacctgtatgctggcaaacctccaagccacaagtgaggatatgcatggtttcgaggctccagggaccagcaaaagctctctacaccctagagtgtctgtctcccaagatccaagaaagctgtgtcttatggaggaggttgttaatgaatttgagcctggaatggccacaaagtcagagacccagcctcaagtttgtgccgctgttgtgctccttccagatgggcaagcatctgttgtgccccacgcttcagagaatttggtttctcaagtgccccagggccatctccagagcatgcctgctgggaacatgcgggcttcccaggagctacatgaccttatggcagccagaaggagcaaactggtgcacgaggagcccagaaacccaaactgtcaaggctcatgcaagaaccaaaggccaatgtttccccctattcacaagagtgagaagtctaggaagcccaacttagaaaaacatgaagaaaggcttgaaggattgaggactcctcaacttaccccagtcaggaaaacagaagacacccatcaggatgaaggcgtccagctactgccatcaaagaaacagcctccttcagtaagccactttggaggaaacatcaagcaattttttcagtggattttttcaaagaaaaaaagcaagccagcaccagtcactgctgagagccaaaaaacagtgaaaaacagatcatgtgtgtacagcagcagtgctgaagctcagggtctcatgacggcagttggacaaatgctggacgagaaaatgtcactttgccatgcgcgccatgcctcgaaggtaaatcagcacaaacagaagtttcaagccccagtctgtgggtttccctgcaaccacaggcacctcttctactcagaacacggcagaatactgagctatgcagccagcagtcaacaagccactctcaagagccagggttgtcccaacagagacaggcaaatcagaaatcaacagcccttgaaaagtgtgcggtgcaacaatgagcaatggggcctgcgacatccccaaatcttgcaccccaagaaagctgtatccccagtcagtccccttcagcactggccgaagacatccggtgcctctagccaccatcaccactgtccaaggcactgtcttctttgggaaggtatctgatttggtcagtcacaaattcttttttagccttccctggagaaaaagaagtccccaagaaaaaattcactctatgtagagaaaaaatattttctctcatgttagtacatgcagaacatttaatataccacaatatatatggttttttattca

SEQ ID NO: 185261 - DNA, 4256 bp, Homo sapiens
  Payload ID: 16481
  Gene Symbol: SPATA31A3
  Gene Name: SPATA31 subfamily A, member 3
  Uniprot ID: Q5VYP0
  ENST ID: ENST00000428649
  CDS Start-End: 63-4106
agtccctagtccccacggggatgcccagagctcagttgcttgaaagcaacgcgcctattcacatggagaatcttccctttcctttaaaattacttagtgcctcatcgctaaacgcccccagttccacaccatgggtgttggatatcttcctcactttggtgtttgccctggggttcttcttcctattactcccctacttatcttacttccgttgtgatgacccaccctcaccatcgcctgggaagagaaagtgtccagtagggcggaggcggaggcccagaggcaggatgaaaaaccacagtctgagagctggtagagagtgccggagaggcctggaggagacttcggacctgctttcacaactgcagagcctcctggggccacaccttgacaaaggtgactttggtcagctctccggtccagaccccccaggtgaggtgggcgaaagagcacctgatggagcctcccagtcctctcatgagcctatggaagatgctgctcccattctctccctgttagcttccccggatcctcaagccaagcatcctcaggatctggcctccaccccatcaccaggcccaatgaccacctcagtctcctccctaagtgcctcccagccaccagaaccttcccttcccctagaacacccctcacccgagccacctgcacttttccctcacccaccacacacccctgatcctctggcctgctctctgcctcctccaaaaggcttcactgctcctcccctgcgggactccacactgataactccatctcactgtgactcagtggcacttccactgggcaccgtccctcaaagcttgtctccacatgaggatttggtggcttctgtcccagccatctcaggccttggtggctcaaacagtcatgtttctgcctcctcccggtggcaggagactgccagaacctcgtgcgcctttaactcatcagtccagcaagatcatctttcccgccacccaccagagacctgtcagatggaagctggtagcctgtttttgctcagctctgatggccagaatgtcgtggggatacaagtcacagaaacagccaaggtcaacatttgggaagaaaaagaaaatgttggatcatttacaaatcgaatgaccccagaaaagcacttaaattctttgcggaatttggctaaatcattggatgctgagcaggacaccacaaacccaaaacccttctggaacatgggagagaactcgaaacagctgcccggacctcagaagctctcagatcctaggctctggcaggaaagtttttggaagaattatagccagcttttctggggcctcccctctctgcacagcgagtccctggtggctaacgcctgggtaactgacaggtcttatactttacagtctcctcctttcttgttcaatgaaatgtccaatgtctgcccaattcaaagggagactacaatgtccccactgcttttccaggcccagcccctgtcccatctggggcccgagtgccaaccctttatttcatccacaccccaattccggcccacacctatggctcaggccgaggctcaggcccatcttcaatcttctttcccagtcctatctcctgcttttccatccctgattcagaacactggagtagcttgccctgcatcgcagaataaagtgcaagctctctccctacctgaaactcagcaccctgaatggcctttgttgaggagacaactagaaggtaggttggctttaccctctagggtccaaaaatctcaggacgtctttagtgtctccactcctaaccttccccaggaaagtttgacatccattctgcctgagaactttccagtcagtcctgaactccggagacaactggagcaacacataaaaaagtggatcatccaacactggggcaacctgggaaggatccaagagtctctggatctgatgcagcttcaggacgaatcaccagggacaagtcaggccaagggcaaacccagtccctggcagtcctccatgtccacaggtgaaagcagcaaggaggcacagaaggtgaagttccagctagagagggacccgtgcccacatctggggcaaattctgggtgagaccccacaaaatctatccagggatatgaaaagcttcccacggaaggttctgggggtgacttctgaggagttggaaaggaacttgaggaagcccttgaggagtgactcgggaagtgatttattaagatgcacagagaggactcatatagaaaacatcctgaaagcccacatgggcaggaacttgggccagaccaacgagggcttgatccccgtgcgtgtgcgtcgatcctggcttgctgtcaaccaggctcttcccgtgtccaacacccatgtgaaaaccagcaatctagcagccccgaaaagtgggaaagcctgtgtgaacacagcccaggtgctttccttcctcgagccgtgtactcagcaggggttgggagcccatattgtgaggttttgggccaaacacaggtggggtctacccctcagggtcctcaagcccattcagtgctttaaactggaaaaggtttcatccttgtcccttacacagcttgctggtccctcctcagccacctgtgaatctggggctggctcagaagttgaggtggacatgttccttagaaagccaccaatggcaagtctgagaaagcaggtgctgaccaaagcatctgatcacatgccagagagtcttctggcctcctcacctgcatggaagcagttccagagggcaccgcgaggaatcccatcttggaatgatcatgaacccttgaagcctcctccagctggacaggagggcaggtggccatctaagcccctcacgtacagcctcacaggcagcacccagcagagcaggagcttaggagcccaatcttcaaaggctggagagacaagggaggcagtgccacaatgcagagtccccttggaaacctgtatgctggcaaacctccaagccacaagtgaggatgtgcatggtttcgaggctccagggaccagcaaaagctctctacaccctagagtgtctgtctcccaagatccaagaaagctgtgtcttatggaggaggttgttagtgaatttgagcctggaatggccacaaagtcagagacccagcctcaagtttgtgccgctgttgtgctccttccagatgggcaagcatctgttgtgccccacgcttcagagaatttggtttctcaagtgccccagggccatctccagagcatgcctactgggaacatgcgggcttcccaggagctacatgacctcatggcagccagaaggagcaaactggtgcacgaggagcccagaaaaccaaactgtcaaggctcatgcaagagccaaaggccaatgtttccccctattcacaagagtgagaagtttaggaagcccaacttagaaaaacatgaagaaaggcttgaaggattgaggactcctcaacttaccccagtcaggaaaacagaagacacccatcaggatgaaggcgtccagctactgccatcaaagaaacagcctccttcagtaagcccctttggagaaaacatcaagcaaatttttcagtggattttttcaaagaaaaaaagcaagccagcaccagtcactgctgagagccaaaaaacagtaaaaaacagatcatgtgtgtacagcagcagtgctgaagctcagggtctcatgacggcagttggacaaatgctggacgagaaaatgtcactttgccatgcgcgccatgcctcgaaggtaaatcagcacaaacagaagtttcaagccccagtctgtgggtttccctgcaaccacaggcacctcttctactcagaacacggcagaatactgagctatgcagccagcagtcaacaagccactctcaagagccagggttgtcccaacagagacagacaaatcagaaatcaacagcccttgaaaagtgtgcggtgcaacaatgagcaatggggcctgcgacatccccaaatcttgcaccccaagaaagctgtatccccagtcagtccccctcagcactggccgaagacatccggtgcctctagccaccatcaccactgtccaaggcactgtcttctttgggaaggtatctgatttggtcagtcacaaattcttttttagccttccctggagaaaaacaagtccccaagaaaaaattcactctatgtagagaaaaaatattttctctcatgttagtacatgcagaacatttaatattccacaatatatatggttttttattca

SEQ ID NO: 185262 - DNA, 4256 bp, Homo sapiens
  Payload ID: 16482
  Gene Symbol: SPATA31A5
  Gene Name: SPATA31 subfamily A, member 5
  Uniprot ID: Q5VU36
  ENST ID: ENST00000437823
  CDS Start-End: 63-4106
agtccctagtccccacggggatgcccagagctcagttgcttgaaagcaacgcgcctattcacatggagaatcttccctttcctttaaaattacttagtgcctcatcgctaaacgcccccagttccacaccatgggtgttggatatcttcctcactttggtgtttgccctggggttcttcttcctattactcccctacttatcttacttccgttgtgatgacccaccctcaccatcgcctgggaagagaaagtgtccagtagggcggaggcggaggcccagaggcaggatgaaaaaccacagtctgagagctggtagagagtgccggagaggcctggaggagacttcggacctgctttcacaactgcagagcctcctggggccacaccttgacaaaggtgactttggtcagctctccggtccagaccccccaggtgaggtgggcgaaagagcacctgatggagcctcccagtcctctcatgagcctatggaagatgctgctcccattctctccccgttagcttccccggatcctcaagccaagcatcctcaggatctggcctccaccccatcaccaggcccaatgaccacctcagtctcctccctaagtgcctcccagccaccagaaccttcccttcccctagaacacccctcacccgagccacctgcacttttccctcacccaccacacacccctgatcctctggcctgctctctgcctcctccaaaaggcttcactgctcctcccctgcgggactccacactgataactccatctcactgtgactcagtggcatttccactgggcaccgtccctcaaagcttgtctccacatgaggatttggtggcttctgtcccagccatctcaggccttggtggctcaaacagtcatgtttctgcctcctcccggtggcaggagactgccagaacctcgtgcgcctttaactcatcagtccagcaagatcatctttcccgccacccaccagagacctgtcagatggaagctggtagcctgtttttgctcagctctgatggccagaatgtcgtggggatacaagtcacagaaacagccaaggtcaacatttgggaagaaaaagaaaatgttggatcatttacaaatcgaatgaccccagaaaagcacttaaattctttgcggaatttggctaaatcattggatgctgagcaggacaccacaaacccaaaacccttctggaacatgggagagaactcgaaacagctgcccggacctcagaagctctcagatcctaggctctggcaggaaagtttttggaagaattatagccagcttttctggggcctcccctctctgcacagcgagtccctggtggctaacgcctgggtaactgacaggtcttatactttacagtctcctcctttcttgttcaatgaaatgtccaatgtctgcccaattcaaagggagactacaatgtccccactgcttttccaggcccagcccctgtcccatctggggcccgagtgccaaccctttatttcatccacaccccaattccggcccacacctatggctcaggccgaggctcaggcccatcttcaatcttctttcccagtcctatctcctgcttttccatccctgattcagaacactggagtagcttgccctgcatcgcagaataaagtgcaagctctctccctacctgaaactcagcaccctgaatggcctttgttgaggagacaactagaaggtaggttggctttaccctctagggtccaaaaatctcaggacgtctttagtgtctccactcctaaccttccccaggaaagtttgacatccattctgcctgagaactttccagtcagtcctgaactccggagacaactggagcaacacataaaaaagtggatcatccaacactggggcaacctgggaaggatccaagagtctctggatctgatgcagcttcgggatgaatcaccagggacaagtcaggccaagggcaaacccagtccctggcagtcctccatgtccacaggtgaaggcagcaaggaggcacagaaggtgaagttccagctagagagggacccgtgcccacatctggggcaaattctgggtgagaccccacaaaatctatccagggatatgaaaagcttcccacggaaggttctgggggtgacttctgaggagttggaaaggaacttgaggaagcccttgaggagtgactcgggaagtgatttattaagatgcacagagaggactcatatagaaaacatcctgaaagcccacatgggcaggaacttgggccagaccaacgagggcttgatccccgtgtgtgtgcgtcgatcctggcttgctgtcaaccaggctcttcccgtgtccaacacccatgtgaaaaccagcaatctagcagccccgaaaagtgggaaagcctgtgtgaacacagcccaggtgctttccttcctcgagccgtgtactcagcaggggttgggagcccatattgtgaggttttgggccaaacacaggtggggtctacccctcagggtcctcaagcccattcagtgctttaaactggaaaaggtttcatccttgtcccttacacagcttgctggtccctcctcagccacctgtgaatctggggctggctcagaagttgaggtggacatgttccttagaaagccaccaatggcaagtctgagaaagcaggtgctgaccaaagcatctgatcacatgccagagagtcttctggcctcctcacctgcatggaagcagttccagagggcaccgcgaggaatcccatcttggaatgatcatgaacccttgaagcctcctccagctggacaggagggcaggtggccatctaagcccctcacgtacagcctcacaggcagcatccagcagagcaggagcttaggagcccaatcttcaaaggctggagagacaagggaggcagtgccacaatgcagagtccccttggaaacctgtatgctggcaaacctccaagccacaagtgaggatgtgcatggtttcgaggctccagggaccagcaaaagctctctacaccctagagtgtctgtctcccaagatccaagaaagctgtgtcttatggaggaggttgttaatgaatttgagcctggaatggccacaaagtcagagacccagcctcaagtttgtgccgctgttgtgctccttccagatgggcaagcatctgttgtgccccacgcttcagagaatttggtttctcaagtgccccagggccatctccagagcatgcctactgggaacatgcgggcttcccaggagctacatgacctcatggcagccagaaggagcaaactggtgcacgaggagcccagaaacccaaactgtcaaggctcatgcaagagccaaaggccaatgtttccccctattcacaagagtgagaagtctaggaaacccaacttagaaaaacatgaagaaaggcttgaaggattgaggactcctcaacttaccccagtcaggaaaacagaagacacccatcaggatgaaggcgtccagctactgccatcaaagaaacagcctccttcagtaagcccctttggagaaaacatcaagcaaatttttcagtggattttttcaaagaaaaaaagcaagccagcaccagtcactgctgagagccaaaaaacagtaaaaaacagatcacgtgtgtacagcagcagtgctgaagctcagggtctcatgacggcagttggacaaatgctggacgagaaaatgtcactttgccatgcgcgccatgcctcgaaggtaaatcagcacaaacagaagtttcaagccccagtctgtgggtttccctgcaaccacaggcacctcttctactcagaacacggcagaatactgagctatgcagccagcagtcaacaagccactctcaagagccagggttgtcccaacagagacagacaaatcagaaatcaacagcccttgaaaagtgtgcggtgcaacaatgagcaatggggcctgcgacatccccaaatcttgcaccccaagaaagctgtatccccagtcagtccccctcagcactggccgaagacatccggtgcctctagccaccatcaccactgtccaaggcactgtcttctttgggaaggtatctgatttggtcagtcacaaattcttttttagccttccctggagaaaaacaagtccccaagaaaaaattcactctatgtagagaaaaaatattttctctcatgttagtacatgcagaacatttaatattccacaatatatatggttttttattca

SEQ ID NO: 185263 - DNA, 4209 bp, Homo sapiens
  Payload ID: 16483
  Gene Symbol: SPATA31A6
  Gene Name: SPATA31 subfamily A, member 6
  Uniprot ID: Q5VVP1
  ENST ID: ENST00000332857
  CDS Start-End: 30-4061
agttgcttgaaagcaacgtgcctattcacatggagaatcttccctttcctttaaaattacttagtgcctcatcgctaaacgcccccagctccacaccatgggtgttggatatcttcctcaccttggtgtttgccctggggttcttcttcctattactcccctacttatcttacttccattgtgatgacccaccctcaccatcgcctgggaagagaaagtgtccagtagggcggaggcggaggcccagaggcaggatgaaaaaccacagtctgagagctggtagagagtgcccgagaggcctggaggagacttcggaccttctttcacaactgcagagcctcctggggccacaccttgacaaaggtgactttggtcagctctccggtccagaccccccaggtgaggtgggcgaaagagcacctgatggagcctcccagtcctctcatgagcctatggaagatgctgctcccattctctccccgttagcttccccggatcctcaagccaagcatcctcaggatctggcctccaccccatcaccaggcccaatgaccacctcagtctcctccctaagtgcctcccagccaccagaaccttcccttcccctagaacacccctcacccgagccacctgcacttttccctcacccaccacacacccctgatcctctggcctgctctccgcctcctccaaaaggcttcactgctcctcccctgcgggactccacactgataactccatctcactgtgactcagtggcacttccactgggcaccgtccctcaaagcttgtctccacatgaggatttggtggcttctgtcccagccatctcaggccttggtggctcaaacagtcatgtttctgcctcctcccggtggcaggagactgccagaacctcgtgcgcctttaactcatcagtccagcaagatcctctttcccgccacccaccagagacctgtcagatggaagctggtagcctgtttttgctcagctctgatggccagaatgtcgtggggatacaagtcacagaaacagccaaggtcaacatttgggaagaaaaagaaaatgttggatcatttacaaatcaaatgaccccagaaaagcacttaaattctttggggaatttggctaaatcattggatgctgagcaggacaccacaaacccaaaacccttctggaacatgggagagaactcgaaacagctgcccggacctcagaagtgctcagatcctaggctcttgcaggaaagtttttggaagaattatagccagcttttctggggcctcccctctctgcacagcgagtccctggtggctaacgcctgggtaactgacaggtcttatactttacagtctcctcctttcttgttcaatgaaatgtccaatgtctgcccaattcaaagggagactacaatgtccccactgcttttccaggcccagcccctgtcccaccgccaaccctttatttcatccacaccccaattcctgcccacacctatggctcaggccgaggctcaggcccatcttcagtcttctttcccagtcctatctcctgcttttccatccctgattaagaacactggagtagcttgccctgcatcgcagaataaagtgcaagctctctccctacctgaaactcagcaccctgaatggcctttgttgaggaaacaactagaaggtaggttggctttaccctctagggtccaaaaatctcaggacgtctttagtgtctccactcctaaccttccccaggaaagtttgacatccattctgcctgagaactttccagtcagtcctgaactccggagacaactggagcaacacataaaaaagtggatcatccaacactggggcaacctgggaaggatccaagagtctctggatctgatgcagcttcgggacgaatcaccagggacaagtcaggccaagggcaaacccagtccctggcagtcctccacgtccacaggtgaaagcagcaaggaggcacagaaggtgaagttccagctagagagggacctgtgcccacatctggggcaaattctgggtgagaccccacaaaatctatccagggacatgaaaagcttcccacggaaggttctgggggtgacttctgaggagtcggaaaggaacttgaggaagcccttgaggagtgactcgggaagtgatttattaagatgcacagagaggactcatatagaaaacatcctgaaagcccacatgggcaggaacttgggccagaccaacgagggcttgatccccgtgcgtgtgcgtcgatcctggcttgctgtcaaccaggctcttcccgtgtccaacacccatgtgaaaaccagcaatctagcagccccgaaaagtgggaaagcctgtgtgaacacagcccaggtgctttccttcctcgagccgtgtactcagcaggggttgggagcccatattgtgaggttttgggccaaacacaggtggggtctacccctcagggtcctcaagcccattcagtgctttaaactggaaaaggtttcatccttgtcccttacgcagcttgctggtccctcctcagccacctgtgaatctggggctggctcagaagttgaggtggacatgttccttagaaagccaccaatggcaagtctgagaaagcaggtgctgaccaaagcatctgatcacatgccagagagtcttctggcctcctcacctgcatggaagcagttccagagggcaccgcgaggaatcccatcttggaatgatcatgggcccttgaagcctcctccagctggacaggagggcaggtggccatctaagcccctcacgtacagcctcacaggcagcacccagcagagcaggagcttaggagcccaatcttcaaaggctggagagacaagggaggcagtgccacaatgcagagtccccttggaaacctgtatgctggcaaacctccaagccacaagtgaggatgtgcatggtttcgaggctccagggaccagcaaaagctctctacaccctagagtgtctgtctcccaagatccaagaaagctgtgtcttatggaggaggttgttagtgaatttgagcctggaatggccacaaagtcagagacccagcctcaagtttgtgccgctgttgtgctccttccagatgggcaagcatctgttgtgccccacgcttcagagaatttggtttctcaagtgccccagggccatctccagagcatgcctactgggaacatgcgggcttcccaggagctacatgacctcatggcagccagaaggagcaaactggtgcaagaggagcccagaaacccaaactgtcaaggctcatgcaagagccaaaggccaatgtttccccctattcacaagagtgagaagtctaggaagcccaacttagaaaaacatgaagaaaggcttgaaggattgaggactcctcaacttaccccagtcaggaaaacagaagacacccatcaggatgaaggcgtccagctactgccatcaaagaaacagcctccttcagtaagccactttggagaaaacatcaagcaattttttcagtggattttttcaaagaaaaaaagcaagccagcaccagtcactgctgagagccaaaaaacagtaaaaaacagatcatgtgtgtacagcagcagtgctgaagctcagggtctcatgacggcagttggacaaatgctggacaagaaaatgtcactttgccatgcgcaccatgcctcgaaggtaaatcagcacaaacagaagtttcaagccccagtctgtgggtttccctgcaaccacaggcacctcttctactcagaacatggcagaatactgagctatgcagccagcagtcaacaagccactctcaagagccagggttgtcccaacagagacaggcaaatcagaaatcaacagcccttgaaaagtgtgcggtgcaacaatgagcaatggggcctgcgacatccccaaatcttgcaccccaagaaagctgtatccccagtcagtccccctcagcactggccgaagacatccggtgcctctagccaccatcaccactgtccaaggcactgtcttctttgggaaggtatctgatttggtcagtcacaaattcttttttagccttccctggagaaaaacaagtccccaagaaaaaattcactctatgtagagaaaaaatattttctctcatgttagtaaatgcagaacatttaatattccacaatatatatggttttttatt

SEQ ID NO: 185264 - DNA, 4256 bp, Homo sapiens
  Payload ID: 16484
  Gene Symbol: SPATA31A7
  Gene Name: SPATA31 subfamily A, member 7
  Uniprot ID: Q8IWB4
  ENST ID: ENST00000619167
  CDS Start-End: 63-4106
agtccctagtccccacggggatgcccagagctcagttgcttgaaagcaacgcgcctattcacatggagaatcttccctttcctttaaaattacttagtgcctcatcgctaaacgcccccagttccacaccatgggtgttggatatcttcctcactttggtgtttgccctggggttcttcttcctattactcccctacttatcttacttccgttgtgatgacccaccctcaccatcgcctgggaagagaaagtgtccagtagggcggaggcggaggcccagaggcaggatgaaaaaccacagtctgagagctggtagagagtgcccgagaggcctggaggagacttcggacctgctttcacaactgcagagcctcctggggccacaccttgacaaaggtgactttggtcagctctccggtccagaccccccaggtgaggtgggtgaaagagcacctgatggagcctcccagtcctctcatgagcctatggaagatgctgctcccattctctccccgttagcttccccggatcctcaagccaagcatcctcaggatctggcctccaccccatcaccaggcccaatgaccacctcagtctcctccctaagtgcctcccagccaccagaaccttcccttcccctagaacacccctcacccgagccacctgcacttttccctcacccaccacacacccctgatcctctggcctgctctctgcctcctccaaaaggcttcactgctcctcccctgcgggactccacactgataactccatctcactgtgactcagtggcatttccactgggcaccgtccctcaaagcttgtctccacatgaggatttggtggcttctgtcccagccatctcaggccttggtggctcaaacagtcatgtttctgcctcctcccggtggcaggagactgccagaacctcgtgcgcctttaactcatcagtccagcaagatcatctttcccgccacccaccagagacctgtcagatggaagctggtagcctgtttttgctcagctctgatggccagaatgtcgtggggatacaagtcacagaaacagccaaggtcaacatttgggaagaaaaagaaaatgttggatcatttacaaatcgaatgaccccagaaaagcacttaaattatttgcggaatttggctaaatcattggatgctgagcaggacaccacaaacccaaaacccttctggaacatgggagagaactcgaaacagctgcccggacctcagaagctctcagatcctaggctctggcaggaaagtttttggaagaattatagccagcttttctggggcctcccctctctgcacagcgagtccctggtggctaacgcctgggtaactgacaggtcttatactttacagtctcctcctttcttgttcaatgaaatgtccaatgtctgcccaattcaaagggagactacaatgtccccactgcttttccaggcccagcccctgtcccatctggggcccgagtgccaaccctttatttcatccacaccccaattccggcccacacctatggctcaggccgaggctcaggcccatcttcaatcttctttcccagtcctatctcctgcttttccatccctgattcagaacactggagtagcttgccctgcatcgcagaataaagtgcaagctctctccctacctgaaactcagcaccctgaatggcctttgttgaggagacaactagaaggtaggttggctttaccctctagggtccaaaaatctcaggacgtctttagtgtctccactcctaaccttccccaggaaagtttgacatccattctgcctgagaactttccagtcagtcctgaactccggagacaactggagcaacacataaaaaagtggatcatccaacactggggcaacctgggaaggatccaagagtctctggatctgatgcagcttcgggatgaatcaccagggacaagtcaggccaagggcaaacccagtccctggcagtcctccatgtccacaggtgaaagcagcaaggaggcacagaaggtgaagttccagctagagagggacccgtgcccacatctggggcaaattctgggtgagaccccacaaaatctatccagggatatgaaaagcttcccacggaaggttctgggggtgacttctgaggagttggaaaggaacttgaggaagcccttgaggagtgactcgggaagtgatttattaagatgcacagagaggactcatatagaaaacatcctgaaagcccacatgggcaggaacttgggccagaccaacgagggcttgatccccgtgtgtgtgcgtcgatcctggcttgctgtcaaccaggctcttcccgtgtccaacacccatgtgaaaaccagcaatctagcagccccgaaaagtgggaaagcctgtgtgaacacagcccaggtgctttccttcctcgagccgtgtactcagcaggggttgggagcccatattgtgaggttttgggccaaacacaggtggggtctacccctcagggtcctcaagcccattcagtgctttaaactggaaaaggtttcatccttgtcccttacacagcttgctggtccctcctcagccacctgtgaatctggggctggctcagaagttgaggtggacatgttccttagaaagccaccaatggcaagtctgagaaagcaggtgctgaccaaagcatctgatcacatgccagagagtcttctggcctcctcacctgcatggaagcagttccagagggcaccgcgaggaatcccatcttggaatgatcatgaacccttgaagcctcctccagctggacaggagggcaggtggccatctaagcccctcacgtacagcctcacaggcagcatccagcagagcaggagcttaggagcccaatcttcaaaggctggagagacaagggaggcagtgccacaatgcagagtccccttggaaacctgtatgctggcaaacctccaagccacaagtgaggatgtgcatggtttcgaggctccagggaccagcaaaagctctctacaccctagagtgtctgtctcccaagatccaagaaagctgtgtcttatggaggaggttgttaatgaatttgagcctggaatggccacaaagtcagagacccagcctcaagtttgtgccgctgttgtgctccttccagatgggcaagcatctgttgtgccccacgcttcagagaatttggtttctcaagtgccccagggccatctccagagcatgcctactgggaacatgcgggcttcccaggagctacatgacctcatggcagccagaaggagcaaactggtgcacgaggagcccagaaacccaaactgtcaaggctcatgcaagagccaaaggccaatgtttccccctattcacaagagtgagaagtctaggaaacccaacttagaaaaacatgaagaaaggcttgaaggattgaggactcctcaacttaccccagtcaggaaaacagaagacacccatcaggatgaaggcgtccagctactgccatcaaagaaacagcctccttcagtaagcccctttggagaaaacatcaagcaaatttttcagtggattttttcaaagaaaaaaagcaagccagcaccagtcactgctgagagccaaaaaacagtaaaaaacagatcacgtgtgtacagcagcagtgctgaagctcagggtctcatgacggcagttggacaaatgctggacgagaaaatgtcactttgccatgcgcgccatgcctcgaaggtaaatcagcacaaacagaagtttcaagccccagtctgtgggtttccctgcaaccacaggcacctcttctactcagaacacggcagaatactgagctatgcagccagcagtcaacaagccactctcaagagccagggttgtcccaacagagacagacaaatcagaaatcaacagcccttgaaaagtgtgcggtgcaacaatgagcaatggggcctgcgacatccccaaatcttgcaccccaagaaagctgtatccccagtcagtccccctcagcactggccgaagacatccggtgcctctagccaccatcaccactgtccaaggcactgtcttctttgggaaggtatctgatttggtcagtcacaaattcttttttagccttccctggagaaaaacaagtccccaagaaaaaattcactctatgtagagaaaaaatattttctctcatgttagtacatgcagaacatttaatattccacaatatatatggttttttattca

SEQ ID NO: 185265 - DNA, 4833 bp, Homo sapiens
  Payload ID: 16485
  Gene Symbol: SPATA31D1
  Gene Name: SPATA31 subfamily D, member 1
  Uniprot ID: Q6ZQQ2
  ENST ID: ENST00000344803
  CDS Start-End: 48-4778
ggcaccctcagtgctcagttgcttcaggcagctgagctattcagaccatggagaatatcctctgttttctgaacagctatactgagacagggctgagccctgactcacattggttggatatcgaccccaacttcatctgcttgagtgggttggggttgtttatactgtacttgttctacgtggtattgaccctgtattcgtcacccaccgaaaaaaataatgacatccaaaagcatcagggcagagccaagaggagaaggaaaggtgggacattcaaaggtttcccagactggaaaagtttccagagagaagaggaagaggaaaggaagctgctttctcttctgaaaagctttggacctcctgtttcctgcagtcctcggggccagcatcatgataccaaccactttcgtcgactgttatgcccagaccccgtctgtcgggtgtgtaagagagcaactgctgatatccagcaactgctgtcttgggagtccctgaaagatgctgctccctctgtgtcccctttggcttcttcggcttctgcgactgagtcatcgttcactctggcttccaccccctcagcaacccctccagaagacctaatactgtcccctcggcctaaggcctctccaccaccccccttaattctctcacctgacctgatcaccaccttagctgacttattttcaccctcaccactgagggaccctctgccaccacagcctgtttctcccttggattccaagttccccatagaccattccccaccccaacagcttccctttccccttctcccaccacatcacattgagagagtggagtccagcctccaacctgaagccagtttgtctctgaacaccatcttttcatttggctccaccctatgccaagatatttcgcaggccatgaatcccattgattcttgtgctcgtcatcacggaccaccaatcccatctgctttaccaccggaagattgcactgtgactcagtctaaatcaagtctcaccatcttgaagacttttccggaaatgttatctctaggtggctctggtgggtcatccacctctgccccaacaatcaaaggcattgaccattcacaccttgcatcttcagaattcacctggtggcagcctcatgccaaggactctttttcctctaattttgtgccatctgatttcatggaggagcttcttacccttcattcttctgaggcctttttaggggggcactctgtggccaacctcatagagcctgttaacatctcatttctcagccatgacattctggcactcctggagagacaagtcaaaaaaaggggtgatttcctgatgtggaaagaaaatggaaagaaaccaggatcattcccaaaacaacttaggccaaactaccaactaaattcctcacggaatatgttaacctcaattgctgttaagcatgacttggcagaatcctttcctttttgggccagtaaaggcaaactagaatggcagcacatccatcagcagcctccacactctaaatgctttgaagaccatttagagcaaaaatatgtccagctcttctggggtctcccatctttgcacagcgagtctctgcatcctactgttcttgtccaacgtggccattcctccatgtttgtattcttcaatggcattacaaatacatctatatcccatgaatccccagtacttccccctccccaacctctgtccttgcctagtacccaaccactacccttgcctcaaaccctgccccaaggtcagtccccacatctcactcaggtgaagtccctggctcaacctcaatctccattccgagccctactacctagtcctctattcctgattaggatctgtggagtgtgttttcatagaccccagaacgaggcacggtctcttttgccatctgaaattaaccatctggagtggaacgtgttgcagaaagtgcaggaaagtttgtggggcttaccctctgtggttcaaaaatcccaggaagacttttgtcctccagctcccaatcctgaattggtcagaaagtccttcaaggtccatgttccgatctccatcattcctggagattttccactcagctctgaggtaaggaagaaactagagcaacacattcgaaggaggctcatccagcgcagatggggcctgccccgcagaatccatgagtctctgtcattgctacgtcctcagagcaaaatttcagagctatctgtgtcagagagaattcatggaccgttaaatatctctttggttgagggtcagaggtgcaatgttctaaagaagtccgcatcaagcttccctagaagcttccacgagaggagctcaaatatgctttccatggagaatgtggggaattatcagggatacagccaggagactgtcccaaaagatcacctgttgcatggtccggagacttcttcagacaaggatctgaggtctaactctgagagagacctagaaactcatatgatgcatctgtcagggaatgactcaggggtgagactaggtcagaaacaacttgaaaatgccctgacagtacgtttgagcaagaaatttgaggaaatcaatgagggtcgaatgcctgggactgtgcatagttcatggcactcagtcaagcagacaatgtctcttcctgagaaatcccacagccaaattaaacatcgaaatctggtaacattggtgagtgaggaccactgcgttgatacttcccaggaaatttccttccttagttccaacaaacaaaagatgttggaagcccatattaaaactttccgtatgaggatgctgtggggccttcccctcaaggtccttgaatccatagaaatcttcaaatcgaaagcggacctttccacttccttttcccatttcgaccttccctcctcagccaccttcatctctcagggagattccaaagatggggtctctaagtcccgtagtcgaagcacttttcaaggagaaaagttgggaacaacaagctcagtccccatccttgatcgtcctcaccctgtctcctcacctgtcgtccaagaagggcaggggaccctgagaagacaattttctgatactgaccatgaccttatagagacagattccaaagacggggcctccacatcccttagaagaggtactacagattttcaaagcgaaaaattagattcaacaagctcattccccatcctcggtcattcttaccttgtcacttcacctgtcaaccaagaaaagcaggggaccctgagaagagaattctctgatactgacaatgatcttacagaaagtgtccggacaacagaggatggcagacagacttttctgcccccgccacacagcatcgtagacgaagtcagtcagaaacagactgtactggccagtagatgcagcgcagagctgcccataatgcaagctggagctggctgtgagtcatgggataagagaaagagttcctttcataatgtagacaggcttcagggcagtagaaagacctttcctgtcaccaatgctcttcaatcacaaactaggaacaacttgacaaccagcaagtcaggaagctgctcactgacaaatgtgaaagcaagcacttccaatgaaactgaaattttcccaccaagaatatcagttcctcaagatcctaaatcatcataccttaaaaatcagatgttgagccagttaaagttggtccagaggaagcatagccaacctcagagccatttcactgacatgtcttttgccttagataacttgagttccaaggacttactgactaattcccagggcatctcgagtggggacatgggaacttcccaggtggtgcatgtccacttggaggacagcggaatccgtgtggcacagaagcaggagcccagggtccctacctgtgtcttacagaagtgtcaagttacgaatttcccaccagctgtaaacagagtgagtcctgtgagacccaaaggaggagagcttgatggaggggatgcagggctggggacatcccaacgcaggagaaagagcctccctgttcataacaagacatcaggggaggtgcttgggagcaaatcttccccaaccttgaaaacacagcctcctcctgaaaaccttttcagaaaatggatgaagacctctttgcagtggtttaataaacccagcatatcatatgaagaacaagaaagttcctgggaaaagggtagctccctgtcatcatgtgtgcagaatattggtcgagttataagagctgcctttactgggactactgaagctcagaaaattaggaaagacactagggagttcctagaagagaagctggggcataggcatgggatagatatcacctgtccccaagagcccctttccttcccagtggggcttgggaaagctcagcacaacccagaagtgcatgtcagagcagagcctgtccagggctgtccctgcaactacagggctccctcctgcaaagtgacacgtaccaaatcttgcagccaacaagctatctttgttggccagaattatcctacaaggattagacagatcatagacaaggacagacagccccagaaagttgaggcatttaaggggaagatactgtgtcaaagccatccccaatccatgccccacaggaagcctgtgccacatccaaaccccacttgccggcgtcaggtcagcctggtgtgtccagccgtcccaaccagtgctaaaagccctgtgtttagtgatgtgcctttcctaactggacagaaaatgcttccaaagcatttacagggaggaaaatttccccccacaaaataattcactccttgttgagaatcttgattctccccaataaatgttccaataagaagga

SEQ ID NO: 185266 - DNA, 4785 bp, Homo sapiens
  Payload ID: 16486
  Gene Symbol: SPATA31D3
  Gene Name: SPATA31 subfamily D, member 3
  Uniprot ID: P0C874
  ENST ID: ENST00000445385
  CDS Start-End: 1-2754
atggagaatatcctctgttttctgaacagctatactgagacagggctgagccctgactcacattgtttggatattgacctcaacttcatctgcttgagtgggttggggttgtttatactgtacttgttctacatggtattgaccctgtattcatcacccaccgaaaaaaataatgacacccaaaagcatcagggcagagccaggaggaaaagaaaaagcgtgacatttaaagaccggaaaagtttgcagaaggaagcagaagaggaaagaaagctacattcttttctgaaaagctttggacctcctgtttcctgcagtcccctgggccagcatcatgataccaccctctttcgtcgactgttatgcccagaccctgtctgtcgggtgtgtaacagagcaactgctgatatccagcgactgctgtcttgggagtccctgaaagatgctgctccctctgtgtcccctttggcttcttcagcttctggggctgagtcatcgttcactctggcttccaccccctcagcaaccactccagaagacctaatattgtcctctcggcctaagccctctccaccaccccccttaattctctcacctgacctgatcaccaccttagctgacttattttcaccctcaccactgagggaccctctgccaccacagcctgtttctcccttggattccaagttccccatagaccattccccaccccaacagcttccctttccccttctcccaccacatcacattgagagagtggagcccagcctccaacctgaggccagtttgtctctgaacaccatcttttcatttggctccaccctatgccaagatatttcccaggccgtgaatcgcactgattcatgtgctcgtcatcatggaccaccaaccccatctgctttaccaccggaagattgcactgtgactcagtctaaatcaaatctcaccgtcttgaagacttttccggaaatgttatctctaggtggctctggtgggtcatccacctctgccccaacaacgaaaggcattgaccattcatgccctgcatcttcagaattctcctggtggcagcctcatgccaaggactctttttcctctaattttgtgccatctgatttcatggaggagcttcttacccttcattcttctgaggcctctttaggggggcactctgtggccaacatcatacagcctgttaacatctcttttctcagccatgacattccggcactcctggagagacaagtcaaaagaaggggtgatttcctgatgtggaaagaaaatggaaagaaaccaggatcattcccaacacaacttaggccaaactaccaactaaattcctcacggaatatgttaacctcaactgctgttaagcatgacttagcagaatcctttcctttttgggccagtaaaggcaaactagagtggcagcacatccatcagcagcccccatattctaagtgttttgaggaccatttagagcaaaaatatgtccagctcttctggggtctcccatctttgcacagcgagtctctgcatcctactgtttttgtccaacatggccgttcctccatgtttgtattcttcaatggcattacaaatacatctatgtcccatgaatccccagtacttccccctccccaacctctgttcttgcctagtacccaacctctacccttgcctcaaaccctgccccgaggtcagtccctacatctcactcaggtgaagtccctggctcaacctcaatctccattcccagccctaccacctagtcctctattcctgattagggtgtgtggcgtgtgttttcatagaccccagaatgaggcacggtctcttatgccatctgaaattaatcatctggagtggaacgtgttgcagaaagtgcaggaaagtgtgtggggtttaccctctgtggttcaaaaatcccaggaagacttttgtcctccagctcccaatcctgtattggtcagaaagtccttcaaggtccatgttcccatctccatcattcctggagattttccactcagctctgaggtaaggaagaaactagagcaacacattcgaaagaggctcatccagcgcagatggggcctgccccgcagaatccatgagtctctgtcattgctacgtcctcagaacaaaatttcagagctatctgtgtcagagagcattcatggtccattaaatatctctttggttgagggtcagaggtgcaatgttctaaagaagtccgcatcaagcttccctagaagcttccacgagaggagctcaaatatgctttccatggagaatgtggggaattatcagggatgcagccaggagactgccccaaaaaaccatctcttgcatgatccggagacatcttcagaggaggatctgaggtctaactctgagagagacctaggaactcatatgatgcatctgtcagggaatgattcaggggtgagactaggtcagaaacaacttgaaaatgccctgacagtacatttgagcaagaaatttgaggaaatcaatgagggtcgaatgcctgggactgtgcatagttcatggcactcagtcaagcagacaatatgtcttcctgagaaatcccacagccaaattaaacatcgaaatttggcagcattggtgagtgaggaccaccgcgttgatacctcccaggagatgtccttccttagttccaacaaacaaaagatgttggaagcccatattaaatctttccatatgaagcccatattaaatctttccatatgaggatgctgtggggccttccccgcaagatccgtgaacccacagaaatcttcaaatcagaagaggatatttccaattccttttcccatttctaccttccctcctcagccagctttatttctcagggagattccaaagatggggtctctaagtcttgtagacgaagcacttttcaaggagaaaagttgggaacaacaagctcagtccctgtccttaatcatcctcagcctgtctcctcacctattggcaaagaagggcaggggaccctgagaagacaattttctgatactgaccatgaccttatagagacagatgccaaagatggtgcctccacgccccttagaagaggcactacatattttcaaggagaaaaattagaaacaacaagctcattctccatcttgggtcatcctcacctcgtcacctcacctgttgatcaagaaaagcaggggaccctcagaagagaattcgctgatactgacgaggatcttacagaaagtgtctggacaactgaggatggcagacagacttttctgccccccacacacagcatcatagacgaagtcagtcagaaacagactgtacttgccagtagatgcagtgcagagctgcccatactgcaagctggagttggccgtgattcaagggataagagagagagtgccagtaataatgttaacaggcttcagggcagtagaaagacctttcctgtcaccaatgggtcgaaggagatgttcaaggaagaggagatctgtactcttcaatcacaaactaggaacaacttgacaaccagcaagtcaggaagctgcttagtgacaaacgtgaaaagaagcacttctcatgaaactgaaattttcccaccaagaatatcagttcctcaaactcctaaatcatcatatcttaaaaatcagatgttgagccagttaaagttggtccagaggaagcatagccaacctcagagccatttcactggcatgtctcttgccttagataacttgagttccaaggacttactgactcatgcccagggcatctcgaatcaggacttgggaacttcccaggtgctgcatgtccacttggaggtcagaggaatccgtgtggcacagcagcaggagcccagggtccctacgcatgtcttacagaaatgccaagttaagaatttttcaccagctacaaagagagtgagccctctaagacctaatggaggagagcttggtggaggggatgcagggctggggacatcccaactcagaagaaagagccatgctattcataacaagacatcaagggagtcgcttgggagcaaatcttccccaaccttgaaaacacagcctcctcctgaaaaccttttcggaacattgatgaagacctttttgcagcagtctaataaacccatcataacatatggaaaacaagaaagttcctaggaaaagggtagctccttgtcatcatctgtgcagaatagaggtcgagttaaaagtagagctgtctttactgggactattgaagctcagaaaattaggaaagacactggggagttcatagaagagaagctggggcatagacattgaatagatatcacctgtccccaggagcccctttcctccccagtgcagcttgggaaatctcagaatgtgccagaactgcaggtcagagcagagcctgtccagggctatccctgcaactacatggctccctcctgcaaagtgacatgtaccaaatcttgcagccaacaagctatctttgtcggccagaattatcctgcaatgattagacagatcatagacaaggacagatagccccaggaagttggacatttaaggggaagatattgtgtcaaaggcatccccaatccatgccccacaggaagcctgtgccacagccaaaccccacttgcagtgtgaagtcaacctggtgcctccggtcatcctgaccagtgctaaaaacactgtgttcagtgatgtgcctttactaactggacagaaaatacttccaaagcatttgcagggaggaaaatttccccccaaaaaataa

SEQ ID NO: 185267 - DNA, 4920 bp, Homo sapiens
  Payload ID: 16486
  Gene Symbol: SPATA31D3
  Gene Name: SPATA31 subfamily D, member 3
  Uniprot ID: P0C874
  ENST ID: ENST00000334208
  CDS Start-End: 87-2840
acgctctgtgatgcaggcctgtgcttacagttaagcctgggcaccctcagtgctcagttgcttcaggcagctgagctattcagaccatggagaatatcctctgttttctgaacagctatactgagacagggctgagccctgactcacattgtttggatattgacctcaacttcatctgcttgagtgggttggggttgtttatactgtacttgttctacatggtattgaccctgtattcatcacccaccgaaaaaaataatgacacccaaaagcatcagggcagagccaggaggaaaagaaaaagcgtgacatttaaagaccggaaaagtttgcagaaggaagcagaagaggaaagaaagctacattcttttctgaaaagctttggacctcctgtttcctgcagtcccctgggccagcatcatgataccaccctctttcgtcgactgttatgcccagaccctgtctgtcgggtgtgtaacagagcaactgctgatatccagcgactgctgtcttgggagtccctgaaagatgctgctccctctgtgtcccctttggcttcttcagcttctggggctgagtcatcgttcactctggcttccaccccctcagcaaccactccagaagacctaatattgtcctctcggcctaagccctctccaccaccccccttaattctctcacctgacctgatcaccaccttagctgacttattttcaccctcaccactgagggaccctctgccaccacagcctgtttctcccttggattccaagttccccatagaccattccccaccccaacagcttccctttccccttctcccaccacatcacattgagagagtggagcccagcctccaacctgaggccagtttgtctctgaacaccatcttttcatttggctccaccctatgccaagatatttcccaggccgtgaatcgcactgattcatgtgctcgtcatcatggaccaccaaccccatctgctttaccaccggaagattgcactgtgactcagtctaaatcaaatctcaccgtcttgaagacttttccggaaatgttatctctaggtggctctggtgggtcatccacctctgccccaacaacgaaaggcattgaccattcatgccctgcatcttcagaattctcctggtggcagcctcatgccaaggactctttttcctctaattttgtgccatctgatttcatggaggagcttcttacccttcattcttctgaggcctctttaggggggcactctgtggccaacatcatacagcctgttaacatctcttttctcagccatgacattccggcactcctggagagacaagtcaaaagaaggggtgatttcctgatgtggaaagaaaatggaaagaaaccaggatcattcccaacacaacttaggccaaactaccaactaaattcctcacggaatatgttaacctcaactgctgttaagcatgacttagcagaatcctttcctttttgggccagtaaaggcaaactagagtggcagcacatccatcagcagcccccatattctaagtgttttgaggaccatttagagcaaaaatatgtccagctcttctggggtctcccatctttgcacagcgagtctctgcatcctactgtttttgtccaacatggccgttcctccatgtttgtattcttcaatggcattacaaatacatctatgtcccatgaatccccagtacttccccctccccaacctctgttcttgcctagtacccaacctctacccttgcctcaaaccctgccccgaggtcagtccctacatctcactcaggtgaagtccctggctcaacctcaatctccattcccagccctaccacctagtcctctattcctgattagggtgtgtggcgtgtgttttcatagaccccagaatgaggcacggtctcttatgccatctgaaattaatcatctggagtggaacgtgttgcagaaagtgcaggaaagtgtgtggggtttaccctctgtggttcaaaaatcccaggaagacttttgtcctccagctcccaatcctgtattggtcagaaagtccttcaaggtccatgttcccatctccatcattcctggagattttccactcagctctgaggtaaggaagaaactagagcaacacattcgaaagaggctcatccagcgcagatggggcctgccccgcagaatccatgagtctctgtcattgctacgtcctcagaacaaaatttcagagctatctgtgtcagagagcattcatggtccattaaatatctctttggttgagggtcagaggtgcaatgttctaaagaagtccgcatcaagcttccctagaagcttccacgagaggagctcaaatatgctttccatggagaatgtggggaattatcagggatgcagccaggagactgccccaaaaaaccatctcttgcatgatccggagacatcttcagaggaggatctgaggtctaactctgagagagacctaggaactcatatgatgcatctgtcagggaatgattcaggggtgagactaggtcagaaacaacttgaaaatgccctgacagtacatttgagcaagaaatttgaggaaatcaatgagggtcgaatgcctgggactgtgcatagttcatggcactcagtcaagcagacaatatgtcttcctgagaaatcccacagccaaattaaacatcgaaatttggcagcattggtgagtgaggaccaccgcgttgatacctcccaggagatgtccttccttagttccaacaaacaaaagatgttggaagcccatattaaatctttccatatgaagcccatattaaatctttccatatgaggatgctgtggggccttccccgcaagatccgtgaacccacagaaatcttcaaatcagaagaggatatttccaattccttttcccatttctaccttccctcctcagccagctttatttctcagggagattccaaagatggggtctctaagtcttgtagacgaagcacttttcaaggagaaaagttgggaacaacaagctcagtccctgtccttaatcatcctcagcctgtctcctcacctattggcaaagaagggcaggggaccctgagaagacaattttctgatactgaccatgaccttatagagacagatgccaaagatggtgcctccacgccccttagaagaggcactacatattttcaaggagaaaaattagaaacaacaagctcattctccatcttgggtcatcctcacctcgtcacctcacctgttgatcaagaaaagcaggggaccctcagaagagaattcgctgatactgacgaggatcttacagaaagtgtctggacaactgaggatggcagacagacttttctgccccccacacacagcatcatagacgaagtcagtcagaaacagactgtacttgccagtagatgcagtgcagagctgcccatactgcaagctggagttggccgtgattcaagggataagagagagagtgccagtaataatgttaacaggcttcagggcagtagaaagacctttcctgtcaccaatgggtcgaaggagatgttcaaggaagaggagatctgtactcttcaatcacaaactaggaacaacttgacaaccagcaagtcaggaagctgcttagtgacaaacgtgaaaagaagcacttctcatgaaactgaaattttcccaccaagaatatcagttcctcaaactcctaaatcatcatatcttaaaaatcagatgttgagccagttaaagttggtccagaggaagcatagccaacctcagagccatttcactggcatgtctcttgccttagataacttgagttccaaggacttactgactcatgcccagggcatctcgaatcaggacttgggaacttcccaggtgctgcatgtccacttggaggtcagaggaatccgtgtggcacagcagcaggagcccagggtccctacgcatgtcttacagaaatgccaagttaagaatttttcaccagctacaaagagagtgagccctctaagacctaatggaggagagcttggtggaggggatgcagggctggggacatcccaactcaggagaaagagcctccctgttcataacaagacatcaggggaggtgcttgggagcaaatcttccccaaccttgaaaacacagcctcctcctgaaaaccttttcagaaaatggatgaagacctctttgcagtggtttaataaacccagcatatcatatgaagaacaagaaagttcctgggaaaagggtagctccctgtcatcatgtgtgcagaatattggtcgagttataagagctgcctttactgggactactgaagctcagaaaattaggaaagacactagggagttcctagaagagaagctggggcataggcatgggatagatatcacctgtccccaagagcccctttccttcccagtggggcttgggaaagctcagcacaacccagaagtgcatgtcagagcagagcctgtccagggctgtccctgcaactacagggctccctcctgcaaagtgacacgtaccaaatcttgcagccaacaagctatctttgttggccagaattatcctacaaggattagacagatcatagacaaggacagacagccccagaaagttgaggcatttaaggggaagatactgtgtcaaagccatccccaatccatgccccacaggaagcctgtgccacatccaaaccccacttgccggcgtcaggtcagcctggtgtgtccagccgtcccaaccagtgctaaaagccctgtgtttagtgatgtgcctttcctaactggacagaaaatgcttccaaagcatttacagggaggaaaatttccccccacaaaataattcactccttgttgagaatcttgattctccccaataaatgttccaataag

SEQ ID NO: 185268 - DNA, 4787 bp, Homo sapiens
  Payload ID: 16487
  Gene Symbol: SPATA31D4
  Gene Name: SPATA31 subfamily D, member 4
  ENST ID: ENST00000419782
  CDS Start-End: 1-2754
atggagaatatcctctgttttctgaacagctatactgagacagggctgagccctgactcacattgtttggatattgacctcaacttcatctgcttgagtgggttggggttgtttatactgtacttgttctacatggtattgaccctgtattcatcacccaccgaaaaaaataatgacacccaaaagcatcagggcagagccaggaggaaaagaaaaagcgtgacatttaaagaccggaaaagtttgcagaaggaagcagaagaggaaagaaagctacattcttttctgaaaagctttggacctcctgtttcctgcagtcccctgggccagcatcatgataccaccctctttcgtcgactgttatgcccagaccctgtctgtcgggtgtgtaacagagcaactgctgatatccagcgactgctgtcttgggagtccctgaaagatgctgctccctctgtgtcccctttggcttcttcagcttctggggctgagtcatcgttcactctggcttccaccccctcagcaaccactccagaagacctaatattgtcctctcggcctaagccctctccaccaccccccttaattctctcacctgacctgatcaccaccttagctgacttattttcaccctcaccactgagggaccctctgccaccacagcctgtttctcccttggattccaagttccccatagaccattccccaccccaacagcttccctttccccttctcccaccacatcacattgagagagtggagcccagcctccaacctgaggccagtttgtctctgaacaccatcttttcatttggctccaccctatgccaagatatttcccaggccgtgaatcgcactgattcatgtgctcgtcatcatggaccaccaaccccatctgctttaccaccggaagattgcactgtgactcagtctaaatcaaatctcaccgtcttgaagacttttccggaaatgttatctctaggtggctctggtgggtcatccacctctgccccaacaacgaaaggcattgaccattcatgccctgcatcttcagaattctcctggtggcagcctcatgccaaggactctttttcctctaattttgtgccatctgatttcatggaggagcttcttacccttcattcttctgaggcctctttaggggggcactctgtggccaacatcatacagcctgttaacatctcttttctcagccatgacattccggcactcctggagagacaagtcaaaagaaggggtgatttcctgatgtggaaagaaaatggaaagaaaccaggatcattcccaacacaacttaggccaaactaccaactaaattcctcacggaatatgttaacctcaactgctgttaagcatgacttagcagaatcctttcctttttgggccagtaaaggcaaactagagtggcagcacatccatcagcagcccccatattctaagtgttttgaggaccatttagagcaaaaatatgtccagctcttctggggtctcccatctttgcacagcgagtctctgcatcctactgtttttgtccaacatggccgttcctccatgtttgtattcttcaatggcattacaaatacatctatgtcccatgaatccccagtacttccccctccccaacctctgttcttgcctagtacccaacctctacccttgcctcaaaccctgccccgaggtcagtccctacatctcactcaggtgaagtccctggctcaacctcaatctccattcccagccctaccacctagtcctctattcctgattagggtgtgtggcgtgtgttttcatagaccccagaatgaggcacggtctcttatgccatctgaaattaatcatctggagtggaacgtgttgcagaaagtgcaggaaagtgtgtggggtttaccctctgtggttcaaaaatcccaggaagacttttgtcctccagctcccaatcctgtattggtcagaaagtccttcaaggtccatgttcccatctccatcattcctggagattttccactcagctctgaggtaaggaagaaactagagcaacacattcgaaagaggctcatccagcgcagatggggcctgccccgcagaatccatgagtctctgtcattgctacgtcctcagaacaaaatttcagagctatctgtgtcagagagcattcatggtccattaaatatctctttggttgagggtcagaggtgcaatgttctaaagaagtccgcatcaagcttccctagaagcttccacgagaggagctcaaatatgctttccatggagaatgtggggaattatcagggatgcagccaggagactgccccaaaaaaccatctcttgcatgatccggagacatcttcagacgaggatctgaggtctaactctgagagagacctaggaactcatatgatgcatctgtcagggaatgattcaggggtgagactaggtcagaaacaacttgaaaatgccctgacagtacatttgagcaagaaatttgaggaaatcaatgagggtcgaatgcctgggactgtgcatagttcatggcactcagtcaagcagacaatatgtcttcctgagaaatcccacagccaaattaaacatcgaaatttggcagcattggtgagtgaggaccacggcgttgatacctcccaggagatgtccttccttagttccaacaaacaaaagatgttggaagcccatattaaatctttccatatgaagcccatattaaatctttccatatgaggatgctgtggggccttccccgcaagatccgtgaacccatagaaatcttcaaatcagaagaggatatttccaattccttttcccatttctaccttccctcctcagccagctttatttctcagggagattccaaagatggggtctctaagtctcatagacgaagcacttttcaaggagaaaagttgggaacaacaagctcagtccctgtccttaatcatcctcagcctgtctcctcacctattggcaaagaagggcaggggaccctgagaagacaattttctgatactgaccatgaccttatagagacagatgccaaagatggtgcctccacgccccttagaagaggcactacatattttcaaggagaaaaattagaaacaacaagctcattctccatcttgggtcatcctcacctcgtcacctcacctgttgatcaagaaaagcaggggaccctcagaagagaattcgctgatactgacgaggatcttacagaaagtgtctggacaactgaggatggcagacagacttttctgccccccacacacagcatcatagacgaagtcagtcagaaacagactgtacttgccagtagatgcagtgcagagctgcccatactgcaagctggagttggccgtgattcaagggataagagagagagtgccagtaataatgttaacaggcttcagggcagtagaaagacctttcctgtcaccaatgggtcgaaggagatgttcaaggaagaggagatctgtactcttcaatcacaaactaggaacaacttgacaaccagcaagtcaggaagctgcttagtgacaaacgtgaaaagaagcacttctcatgaaactgaaattttcccaccaagaatatcagttcctcaaactcctaaatcatcatatcttaaaaatcagatgttgagccagttaaagttggtccagaggaagcatagccaacctcagagccatttcactggcatgtctcttgccttagataacttgagttccaaggacttactgactcatgcccagggcatctcgaatcaggacttgggaacttcccaggtgctgcatgtccacttggaggtcagaggaatccgtgtggcacagcagcaggagcacagggtccctacgcatgtcttacagaaatgccaagttaagaatttttcaccagctacaaagagagtgagccctttaagacccaatggaggagagcttggtggaggggatgcagggttggggacatcccaactcactagaaagagcctccctgttcataacaaggcatcaggagaggtgcctgggagcaaatcttccccaaccttgaaaacacagcctccttctgaaaaccttttcagaaaatggatgcagaccttattgcagtggtttaataaacctagcataatgtgtgaagaacaagaaagttcttgggaaaagggtagctccctgtcatcatctgtgcagaatagaagtcgagttacaagtagagctgcttttactggtgctactgaagctcagaaaattaggaaagacactggggagttcctagaagaaaagctggggcatagccatgggatagatatcacctgtccctaagaacccttttccttcccagtggagcttgggaaagctcagcacaacccagaagtgcaggtcagagcagagcccttccagggctatccccgcaactacacagctccctcccgcaaagtgacatgtaccaaatcttgcagccaacaagctatctttgttggacagaattatcctacaaggattagacagatcatagacaaggacagacagccccaggaagttgaggcatttaaggggaagatattgtatcaaaggcatccccaatccatgccccacagggatcctgtgccacatctaaaccccacttgtcagcgtcaagtcaccctggtgtgtccagctgtcccaattagtggcaaaagcactgtgttcagtgatgtgcctttactaactggacacaaaatgcattggaagtatttgcagggaggcaaatctccccccacaaaataa

SEQ ID NO: 185269 - DNA, 4478 bp, Homo sapiens
  Payload ID: 16488
  Gene Symbol: SPATA31E1
  Gene Name: SPATA31 subfamily E, member 1
  Uniprot ID: Q6ZUB1
  ENST ID: ENST00000325643
  CDS Start-End: 67-4404
gatacaagcctgggccccagtccctagtcccaaaggggatgcccagagctcagttgcttgaaggcgatgggaaatctcgtcatccctctagggaagggcagggcaggcagggttgagagtgggcagaggattccacccccagctcccagaccatctgtggagtgcacaggagacgacattgcacttcagatggagaaaatgctctttcctctgaagagccctagtgccacatggctgagccctagctccactccctggatgatggatttcatcctcaccagtgtgtgtggcctagtgctcctcttcctattgctcctctacgtccacagtgacccaccctcacccccgcccgggaggaagaggagcagcagggagcctcaaagggagagaagcgggaggtccaggagcaggaagatctcagctctgaaagcttgcagaatcctcctgagggagctggaggagactcgggacctgaactaccttctggaaagccacctgaggaagctcgctggcgaaggcagctcccacctgcccttaggtggagaccccctgggggacgtgtgtaaaccagtgcctgctaaggcccaccagccgcatgggaaatgcatgcaagatccgtctcctgccagcttgtccccaccagctcccccagctcctctggcctccaccctgtcaccaggcccgatgaccttctcagagccttttggaccacactcaaccctgagtgcctccgggccaccagagcccttgcttcccctaaaatgccctgcaacccagccacatgtggtttttcctccttcaccacagccgcatggtcccctggcctcctctccacctccacccgactccagcctggctggacttcagtgtggctccacaacatgccccgtcccccagagctcccctctacacaaccaggtgctgcctcctccaaccagggtgatctctggcctggggtgctccagcgatcccatctgggacctctattgctggagggaggctgccaccacctggggcctctccacctactcacatggcaaatcccagccacggcatcttcccgaccacacctcagaggcttccttctggggagaccccacacccaagcacatggaggtaggtggctgcacattcatccaccctgacgtgcagaagctgctggagaccctcatcgccaagagagcactgatgaagatgtggcaggagaaagaaagaaaacgggccgaccacccgcacatgacatcactggggaaggagtgggacatcacgaccctaaatcccttctggaacgtgtcaacccagccacagcagctgccccgtcctcagcaagtctctgatgccacaaccgtggggaaccacttacagcagaaacgcagccagcttttctgggacctcccctctctcaatagcgagtccctggcgaccacagtctgggtttctaggaacccttcctcacagaatgcacactctgtaccactggataaagcctccacttctcttccaggtgaacctgaggttgaggcatcctcacagctttcccaggcaccgccccagccccaccacatggcccagccccaacatttcactccagcctggccccagtcccagcccccacctttggctgagatccagacccaggcccacctctcaccccctgtcccaagcctggggtgctcttctccaccccagattaggggctgtggggcatcttaccctacatcccaggagaggacacagtctgtcatccccactggaaaggagtatcttgaatggcccttgaagaagcgaccaaagtggaagagggttttgccctctctcctcaaaaagtctcaggctgttctgagccagcccactgcccaccttccccaagagaggccggcctcctggagccccaagtcagcccccatccttcccggggttgtcaccagccctgagctcccagagcactggtggcaaggaaggaatgccatccaccaggagcagtcctgtggccctcccagcagattgcaggcatctggggacctgctacagcctgatggggaattcccagggaggccccagagtcaggcagaagacacgcagcaggccctcttgccctcccagccttctgactttgcagggaagggcaggaaggatgtgcagaagaccgggttcaggagctccggaaggttctctgacaaggggtgcttagggtccaaactagggccggacccaagccgggatcaaggctcaggaaggacctcagtgaaggctctggacgaagacaaggaggcagaaggtgacttacggaggtcctggaagtaccaatcagtaagttccacacccagggacccagacaaggagcatctggaaaacaagctgcaaatccatctggccaggaaggtaggggagatcaaagagggctggatccccatgcctgtgcgtcgctcctggctcatggccaaatgtgctgttcccaagtctgacacccacaggaaacctgggaagctggcatcctggaggggtgggaaagcccacgtgaacacctcccaggagctttccttcctccatccctgcacccagcagatactggaagtacatcttgtaaggttctgtgtgaggcacagctggggtacagacctccagtccctggagcccataaatgtctggtcaggtgaggctcaggccccgcccttcccacaatccacctttaccccctgggcctcctgggtatctcgggttgaatctgtacccaaggttcccattttcctgggaaaacgtcctcagaatggtccaggagacaacagaacaacaagcaagtcagtcccgaccgtgagtggccctctcgctgccccaccgcctgagcaggagggagtccagaggcccccgagagggtcccagtcagctgatacccatgggcgatcagaggcctttccgactggacacaagggcagggggtgttctcagcccccaacatgcagccttgtgggcagaacctggcagagcaggactgtcctggaatccgggaaacccaaacccagactagaggggagtatgggttcagaaatggctgggaacgaggcatggcttgagagtgagagcatgtccccaggagacccctgtagtagcagagccctgcaagtgctcagcatagggtcccagtgggcaagggctgaagatgccctgcaggcactgaaagtgggggagaagcccccaacttgggaagtcaccttgggagccagtgtgagggcaagttcgggaagtgttcaggaggatctgaggagcacaggggctctggggaccactggtaacccctcagcgtcttcagtctgtgttgctcaggatccagagcagctgcacctgaaagcgcaggtggtcagtgagattgcgctcatagtgcaggtggactcagaggagcagctgccaggccgtgccccgggcatcctcctccaggacggcgccacaggcctgtgccttccaggccgccacatggacatgctcactgccgcagacaggctgcccactcaagcccctctgtccacctcccagagtgtgtctggtaagaacatgacagcttcccaggggccatgtgccctcctatggaagggaggggacagtccagggcagcaggagcctgggagcccaaaagcaaaggccccacagaagagtcagaagacgctgggctgtgcggacaagggcgaggcccacaggaggcccagaacaggggagcagggacacaggtccaagggacccaggacctctgaagccagtgggaggagccaccctgcccaagccagggaaataggagacaaacaagaaaggaaatacaaccagcttcagctggagaagggacagacaccaccagaaagccacttccagagaaagatcagtcaccatccacagggtctacaccccaggaaaggaggcacacggtgggaagatgtcctgcagaaaggcaagcctggggcagatgctttccagagctgggggtctggcccaccaaggcagtttatggactgcatggctgacaaagcctggaccatcagcagagttgtgggacaaatcctggtggacaaactggggcttcagtggggacgaggtccctcagaggtcaatcgccacaaaggtgacttccgcgcccaggagaatgtgccttcctgctgccacaggggtcactgccaccaagaacgtagcagagagatgagagctctggcctgcagccctaaagccacccccaagggccaccactgtcctgtcaaaaacaggggcatcagagacagagacagcagttgggccccacctcccagggagcctgtgtccccagctggtccccaccaccacaggccaagaatggcaagcacctcgggcggcccccatccacagctgcaggaactgatgtctgcacagaggtgtcttgcctcctgaactagaccagtcttcttgcatgtctcctgggggagacagggggttctactcaaataaaactgatgcctacacaa

SEQ ID NO: 185270 - DNA, 840 bp, Homo sapiens
  Payload ID: 16489
  Gene Symbol: SPC24
  Gene Name: SPC24, NDC80 kinetochore complex component
  ENST ID: ENST00000423327
  CDS Start-End: 32-436
aaatttgcgcgggttggagcctggcgtagtcatggccgccttccgcgacatagaggaggtgagccaggggctgctcagcctgctgggcgccaaccgcgcggaggcgcagcagcgacggctgctggggcgccacgagcaggtggtggagcggctgctggaaacgcaagacggtgccgagaagcagctgcgagggctgcagacaaggggcatgtttcttgccagtggaggcaagtggaaccaccttctctctgctctccttggggaaggacagaccctagggagcctgcttctctccaccctgcagagatcctcaccatggagaaggaagtggcccagagccttctcaatgcgaaggagcaggtgcaccagggaggcgtggagctgcagcagctggaagctgggcttcaggaggctggggaggaggacacccgtctgaaggccagcctccttcagctcaccagagagctggaagagctcaaggagattgaggcggatctggagcgacaggagaaggaggtcgacgaggacacgacagtcacaatcccctcggccgtgtacgtggctcaactttaccaccaagttagtaaaattgagtgggattatgagtgtgagccagggatggtcaaaggcatccatcatggccccagtgtggcccagcccatccacctggacagcacccagctctccaggaaattcatcagcgactacctctggagtctggtggacaccgagtggtagccaggagcctcgtggctgcgtcttgcacccagcgggcatctgccgtggtcagatccatttcaaatgaaatgtggggacatagatcttttttttttttttttt

SEQ ID NO: 185271 - DNA, 2315 bp, Homo sapiens
  Payload ID: 16489
  Gene Symbol: SPC24
  Gene Name: SPC24, NDC80 kinetochore complex component
  Uniprot ID: Q8NBT2
  ENST ID: ENST00000592540
  CDS Start-End: 33-626
caaatttgcgcgggttggagcctggcgtagtcatggccgccttccgcgacatagaggaggtgagccaggggctgctcagcctgctgggcgccaaccgcgcggaggcgcagcagcgacggctgctggggcgccacgagcaggtggtggagcggctgctggaaacgcaagacggtgccgagaagcagctgcgagagatcctcaccatggagaaggaagtggcccagagccttctcaatgcgaaggagcaggtgcaccagggaggcgtggagctgcagcagctggaagctgggcttcaggaggctggggaggaggacacccgtctgaaggccagcctccttcagctcaccagagagctggaagagctcaaggagattgaggcggatctggagcgacaggagaaggaggtcgacgaggacacgacagtcacaatcccctcggccgtgtacgtggctcaactttaccaccaagttagtaaaattgagtgggattatgagtgtgagccagggatggtcaaaggcatccatcatggccccagtgtggcccagcccatccacctggacagcacccagctctccaggaaattcatcagcgactacctctggagtctggtggacaccgagtggtagccaggagcctcgtggctgcgtcttgcacccagcgggcatctgccgtggtcagatccatttcaaatgaaatgtggggacatagatctttttttttttttttttgagacagagtttcactcttgttgtccagtctggagtgcaatggcacaatctcagctcacagcaacctctgcctcctgggttcaagcgattctcctgcctcagcctccaaagtagctgggattacaggcatgcgccaccacacccagctaattttttgtatttggtagagatggagtttcaccatggtggtcaggctggtcttgaactcctgacctcaggtgatccacccgcccgccttggcctcccaaagtgctaggattccaggcgtgagccatcgtgcccagctagacgtcttccttttttttttttttttgagacggagtctcactctgtcgcccaggctggagtgcagtggtgcgatctcagctcactgcaagctccgcctcctcccgggttcacgccattctcctgcctcagcctcctgagtagctgggactacaggcacctgccaccatgcgcagctaattttttgtatttttagtagagacggggtttcaccatgttagacaggatggtctccatctcctgagtttgtgatctgcccgccttggcctcccaaagtgctgggattacaggtgtgagtcaccgcgcctggccttttttttttttttttttactggatttctttttctcctgattttcggcctcagctcctagagtggcctcagctaggtaaccaacgggagtcgacttatctatgccaggcctgcagtttcacatctgtgacgggatgggacaaatgacaccgtggtattcgatgacagctcccaggtacttcaaggttggcccttactcattcagggggtatgtttgagtgccacggtgtgcccagactctgctaggcaccagagagacaagatacgagtgacatggttctcctcccactgctgacggaggaattaacacaaaagcagacaacactctagaactggagagaggtccagattgcgacaggagccacaccagagtgtgcaggcttcatggaggacagaagcgacttttgtgccgggacttaaaaagataaggaggccaggtgtggtggctcatgcctgcaatcccagcactgtagaaggcagaggccggcagatcacttgagcccaggagttggagaccagactggggaacatggcaagaccccatctctacaaaaaaattaaaaaatttggcctggtgtggtggctcatgcctgtgatcctagcactttgggagttaaaatacaacacttcccagctgcccttatagttaaggtctggccagtgaaatgtatgtggaaatgttacatgacacttctagaaggattcttaaaagacaaatacaccctttcttcccccttcctatttcctggaatgtgggtgtgatggctggagccctggcagccatactgccacgtgtacagacgagtgccgtcctttagggatgacaggagcctggttccctgatgatggcagagccagatatcagcacaaacttatttaaatgggagagagaaggggagaaccaatctcaacttctaccttgtgtaagctgctggttttgggggttttctatgacagataccaaaataaaccctaactgaacatgtactcc

SEQ ID NO: 185272 - DNA, 699 bp, Homo sapiens
  Payload ID: 16489
  Gene Symbol: SPC24
  Gene Name: SPC24, NDC80 kinetochore complex component
  ENST ID: ENST00000585486
  CDS Start-End: 1-506
ccttccgcgacatagaggaggtgagccaggggctgctcagcctgctgggcgccaaccgcgcggaggcgcagcagcgacggctgctggggcgccacgagcaggtggtggagcggctgctggaaacgcaagacggtgccgagaagcagctgcgagagatcctcaccatggagaaggaagtggcccagagccttctcaatgcgaaggagcaggtgcaccagggaggcgtggagctgcagcagctggaagctgggcttcaggaggctggggaggaggacacccgtctgaaggccagcctccttcagctcaccagagagctggaagagctcaaggagattgaggcggatctggagcgacaggagaaggaggtcgacgaggacacgacagtcacaatcccctcggccgtgtacgtggctcaactttaccaccaagttagtaaaattgagtgggattatgagtgtgagccagggatggtcaaaggcagtatcctttttggggagccattttaacccttgtgcactgtaggtagggacataaaatggtgcatagcaggaccctgtaaaaattagccgggtgtggtggcgtgcatctgttgtcccagctacctgggaggctgaggtgggaggatcacttgaggccaggagtttgagaccagcctgggtatcagtgagaccccacgtctataataaatatagtaaagta

SEQ ID NO: 185273 - DNA, 833 bp, Homo sapiens
  Payload ID: 16489
  Gene Symbol: SPC24
  Gene Name: SPC24, NDC80 kinetochore complex component
  ENST ID: ENST00000592967
  CDS Start-End: 1-517
ccgcgacatagaggaggtgagccaggggctgctcagcctgctgggcgccaaccgcgcggaggcgcagcagcgacggctgctggggcgccacgagcaggtggtggagcggctgctggaaacgcaagacggtgccgagaagcagctgcgagagatcctcaccatggagaaggaagtggcccagagccttctcaatgcgaaggagcaggtgcaccagggaggcgtggagctgcagcagctggaagctgggcttcaggaggctggggaggaggacacccgtctgaaggccagcctccttcagctcaccagagagctggaagagctcaaggagattgaggcggatctggagcgacaggagaaggaggtcgacgaggacacgacagtcacaatcccctcggccgtgtacgtggctcaactttaccaccaactcctagagtggcctcagctaggtaaccaacgggagtcgacttatctatgccaggcctgcagtttcacatctgtgacgggatgggacaaatgacaccgtggtattcgatgacagctcccaggtacttcaaggttggcccttactcattcagggggtatgtttgagtgccacggtgtgcccagactctgctaggcaccagagagacaagatacgagtgacatggttctcctcccactgctgacggaggaattaacacaaaagcagacaacactctagaactggagagaggtccagattgcgacaggagccacaccagagtgtgcaggcttcatggaggacagaagcgacttttgtgccgggacttaaaaagataaggaggccaggtgtggtggctcatgcctgcaatccc

SEQ ID NO: 185274 - DNA, 832 bp, Homo sapiens
  Payload ID: 16489
  Gene Symbol: SPC24
  Gene Name: SPC24, NDC80 kinetochore complex component
  ENST ID: ENST00000591396
  CDS Start-End: 1-516
cgcgacatagaggaggtgagccaggggctgctcagcctgctgggcgccaaccgcgcggaggcgcagcagcgacggctgctggggcgccacgagcaggtggtggagcggctgctggaaacgcaagacggtgccgagaagcagctgcgagagatcctcaccatggagaaggaagtggcccagagccttctcaatgcgaaggagcaggtgcaccagggaggcgtggagctgcagcagctggaagctgggcttcaggaggctggggaggaggacacccgtctgaaggccagcctccttcagctcaccagagagctggaagagctcaaggagattgaggcggatctggagcgacaggagaaggaggtcgacgaggacacgacagtcacaatcccctcggccgtgtacgtggctcaactttaccaccaagttagtaaaattgagtgggattatgagtgtgagccagggatggtcaaaggcaggggtatgtttgagtgccacggtgtgcccagactctgctaggcaccagagagacaagatacgagtgacatggttctcctcccactgctgacggaggaattaacacaaaagcagacaacactctagaactggagagaggtccagattgcgacaggagccacaccagagtgtgcaggcttcatggaggacagaagcgacttttgtgccgggacttaaaaagataaggaggccaggtgtggtggctcatgcctgcaatcccagcactgtagaaggcagaggccggcagatcacttgagcccaggagttggagaccagactggggaacatggcaagaccccatctctacaaaaaaattaaa

SEQ ID NO: 185275 - DNA, 378 bp, Homo sapiens
  Payload ID: 16489
  Gene Symbol: SPC24
  Gene Name: SPC24, NDC80 kinetochore complex component
  ENST ID: ENST00000586708
  CDS Start-End: 1-378
gacatagaggaggtgagccaggggctgctcagcctgctgggcgccaaccgcgcggaggcgcagcagcgacggctgctggggcgccacgagcaggtggtggagcggctgctggaaacgcaagacggtgccgagaagcagctgcgaggtacgtggctcaactttaccaccaagttagtaaaattgagtgggattatgagtgtgagccagggatggtcaaaggcatccatcatggccccagtgtggcccagcccatccacctggacagcacccagctctccaggaaattcatcagcgactacctctggagtctggtggacaccgagtggtagccaggagcctcgtggctgcgtcttgcacccagcgggcatctgccgtggt

SEQ ID NO: 185276 - DNA, 633 bp, Homo sapiens
  Payload ID: 16489
  Gene Symbol: SPC24
  Gene Name: SPC24, NDC80 kinetochore complex component
  ENST ID: ENST00000585567
  CDS Start-End: 7-633
gtagtcatggccgccttccgcgacatagaggaggtgagccaggggctgctcagcctgctgggcgccaaccgcgcggaggcgcagcagcgacggctgctggggcgccacgagcaggtggtggagcggctgctggaaacgcaagacggtgccgagaagcagctgcgagagatcctcaccatggagaaggaagtggcccagagccttctcaatgcgaaggagcaggtgcaccagggaggcgtggagctgcagcagctggaagctgggcttcaggaggctggggaggaggacacccgtctgaaggccagcctccttcagctcaccagagagctggaagagctcaaggagattgaggcggatctggagcgacaggagaaggaggtcgacgaggacacgacagtcacaatcccctcggccgtgtacgtggctcaactttaccaccaagtgatccgcccaccttggcctcccaaagtgctggactcaagagatcttcccacctcagcctccaagtatctgggactacaggtgtgcgccatcgcatccggctggattgtgtcacggtggagagaaactcaaaacttcctggagagaaatggaggtgtcatcctggtccccccgggcctgtttctcttatcc

SEQ ID NO: 185277 - DNA, 1354 bp, Homo sapiens
  Payload ID: 16490
  Gene Symbol: SPC25
  Gene Name: SPC25, NDC80 kinetochore complex component
  Uniprot ID: Q9HBM1
  ENST ID: ENST00000282074
  CDS Start-End: 143-817
aagtgcactaggtttgaaatcggaaagttggcggggctgcgggagctgagcctagagtccggctgttggctagagtgggcgcggatctggtgtggggaaggcggcgggactcaggcctgcctgcgaagcattgtcctacataatggtagaggacgaactggcacttttcgataaaagcataaatgaattttggaataaattcaaaagtacggacacctcctgtcagatggcgggactaagagatacctacaaggattccatcaaagcatttgcagaaaagctgtctgtgaaattaaaggaagaagaacgaatggttgagatgtttctggaatatcaaaatcagatcagcaggcaaaataagctcattcaagaaaaaaaggataacttgttaaaattgattgctgaagtaaaaggcaaaaagcaggaattggaagtactgactgcaaatatccaggatcttaaggaagaatattctaggaagaaggaaactatttctactgctaataaagcgaatgcagagaggttgaaaaggctgcagaaatctgcagacttgtataaagatcgacttggactagaaattcgaaaaatttatggtgagaaattgcagtttattttcactaatattgaccctaagaatcctgagagcccatttatgttttccttacatctcaatgaagcaagggactatgaagtgtcagatagtgcccctcatcttgagggcctagcagaatttcaagagaatgtaaggaagaccaacaatttttcagcttttcttgccaatgttcggaaagcttttactgccacggtttataattaacatacaaatagtgtatataaaaacggtttatttttcttctctattacatatctctttttttcttgtttttattattattatactttaagttttagggtacatgtgcacaatgtgcaggtttgttacatatgtatacatgtgccatattggtgtgctgcacccattaactcgtcatttcattaggtatatctcctaatgctatccctcccccctcccccaacccacaacagtccccgttgtgtgatgttccccttcctgtgtccatgtgttctcattgttcaattcccacctaggagtgagaatatgtggtgtttggttttttgtcctttcgatagtttgctgagaatgatggtttccagcttcatccatgttcctacaaaggacatgaactcatccttttttatggctgcatagtattccatggtgtatatgtgccacattttcttaatccagtctatcattgttggacatttgggttggttccaagtctttgctattgtgaatagtgccgaaataaacatacgtgtgcatgtgtct

SEQ ID NO: 185278 - DNA, 596 bp, Homo sapiens
  Payload ID: 16490
  Gene Symbol: SPC25
  Gene Name: SPC25, NDC80 kinetochore complex component
  ENST ID: ENST00000451987
  CDS Start-End: 251-596
agacaaagcctgaatcctggaaaaagccaactctttgaacaggaattagagtgtgatcggctcagttgacgtacagggaaacctttatttgaagccgataaatgacttgtcgtgggcgagcccttcgggtgctattaatactttcgggtcacagcggagactctggctgttgttcagaaaagaactacgaatcccagaatgccctgttcccccattttcccctcgagaatccaaggcattgtcctacataatggtagaggacgaactggcacttttcgataaaagcataaatgaattttggaataaattcaaaagtacggacacctcctgtcagatggcgggactaagagatacctacaaggattccatcaaagcatttgcagaaaagctgtctgtgaaattaaaggaagaagaacgaatggttgagatgtttctggaatatcaaaatcagatcagcaggcaaaataagctcattcaagaaaaaaaggataacttgttaaaattgattgctgaagtaaaaggcaaaaagcaggaattggaagtactgactgcaaatatccaggatcttaaggaagaatattctaggaagaaggaaa

SEQ ID NO: 185279 - DNA, 596 bp, Homo sapiens; identical to SEQ ID NO: 185278
  Payload ID: 16490
  Gene Symbol: SPC25
  Gene Name: SPC25, NDC80 kinetochore complex component
  ENST ID: ENST00000612416
  CDS Start-End: 251-596

SEQ ID NO: 185280 - DNA, 675 bp, Homo sapiens
  Payload ID: 16490
  Gene Symbol: SPC25
  Gene Name: SPC25, NDC80 kinetochore complex component
  Uniprot ID: Q9HBM1
  ENST ID: ENST00000611144
  CDS Start-End: 1-675
atggtagaggacgaactggcacttttcgataaaagcataaatgaattttggaataaattcaaaagtacggacacctcctgtcagatggcgggactaagagatacctacaaggattccatcaaagcatttgcagaaaagctgtctgtgaaattaaaggaagaagaacgaatggttgagatgtttctggaatatcaaaatcagatcagcaggcaaaataagctcattcaagaaaaaaaggataacttgttaaaattgattgctgaagtaaaaggcaaaaagcaggaattggaagtactgactgcaaatatccaggatcttaaggaagaatattctaggaagaaggaaactatttctactgctaataaagcgaatgcagagaggttgaaaaggctgcagaaatctgcagacttgtataaagatcgacttggactagaaattcgaaaaatttatggtgagaaattgcagtttattttcactaatattgaccctaagaatcctgagagcccatttatgttttccttacatctcaatgaagcaagggactatgaagtgtcagatagtgcccctcatcttgagggcctagcagaatttcaagagaatgtaaggaagaccaacaatttttcagcttttcttgccaatgttcggaaagcttttactgccacggtttataattaa

SEQ ID NO: 185281 - DNA, 1344 bp, Homo sapiens
  Payload ID: 16490
  Gene Symbol: SPC25
  Gene Name: SPC25, NDC80 kinetochore complex component
  Uniprot ID: Q9HBM1
  ENST ID: ENST00000616584
  CDS Start-End: 132-806
gtttgaaatcggaaagttggcggggctgcgggagctgagcctagagtccggctgttggctagagtgggcgcggatctggtgtggggaaggcggcgggactcaggcctgcctgcgaagcattgtcctacataatggtagaggacgaactggcacttttcgataaaagcataaatgaattttggaataaattcaaaagtacggacacctcctgtcagatggcgggactaagagatacctacaaggattccatcaaagcatttgcagaaaagctgtctgtgaaattaaaggaagaagaacgaatggttgagatgtttctggaatatcaaaatcagatcagcaggcaaaataagctcattcaagaaaaaaaggataacttgttaaaattgattgctgaagtaaaaggcaaaaagcaggaattggaagtactgactgcaaatatccaggatcttaaggaagaatattctaggaagaaggaaactatttctactgctaataaagcgaatgcagagaggttgaaaaggctgcagaaatctgcagacttgtataaagatcgacttggactagaaattcgaaaaatttatggtgagaaattgcagtttattttcactaatattgaccctaagaatcctgagagcccatttatgttttccttacatctcaatgaagcaagggactatgaagtgtcagatagtgcccctcatcttgagggcctagcagaatttcaagagaatgtaaggaagaccaacaatttttcagcttttcttgccaatgttcggaaagcttttactgccacggtttataattaacatacaaatagtgtatataaaaacggtttatttttcttctctattacatatctcttttttttcttgtttttattattattatactttaagttttagggtacatgtgcacaatgtgcaggtttgttacatatgtatacatgtgccatattggtgtgctgcacccattaactcgtcatttcattaggtatatctcctaatgctatccctccccgctcccccaacccacaacagtccccgttgtgtgatgttccccttcctgtgtccatgtgttctcattgttcaattcccacctaggagtgagaatatgtggtgtttggttttttgtcctttcgatagtttgctgagaatgatggtttccagcttcatccatgttcctacaaaggacatgaactcatccttttttatggctgcatagtattccatggtgtatatgtgccacattttcttaatccagtctatcattgttggacatttgggttggttccaagtctttgctattgtgaatagtgccgaaataaacatacgtgtgcatgtgtct

SEQ ID NO: 185282 - DNA, 6204 bp, Homo sapiens
  Payload ID: 16491
  Gene Symbol: SPECC1L-ADORA2A
  Gene Name: SPECC1L-ADORA2A readthrough (NMD candidate)
  ENST ID: ENST00000358654
  CDS Start-End: 228-2963
ctcaacgggtctcggctgagccaccgggtgagctcaccgcccagcccaaaccaggagattgcgagggagcgatgcggtgcagcgcgtgttcttggggaagatcccgactaagccattttccagtggcacctcttccatcatgagttcctgaggcagtccgatggggctactttattccagaacaatcacaatttgcttgtaaatgcatcacgaagaggcagcccagaatgaagaaagcaagcaggagtgttggctcagtgcctaaagtgtctgcaataagtaaaacgcaaacagcagaaaaaattaaacctgaaaacagctcttcagcatctacgggaggcaaacttgtaaaacctggaacagcagcatcattgtcaaagaccaagagcagtgatgaccttttagctggaatggccggaggggtaacggtgactaatggtgttaaaggaaagaaaagcacctgcccatctgcagcaccttcagcatctgcccctgccatgaccaccgtggagaacaaatccaagattagcacaggcacagcttcttcaaccaagcggagcacttctacaggtaataaagaatccagttctactagagaaagattacgtgaacgtacccgattaaaccagagcaaaaaactaccttctgcaggtcagggagctaatgacatggcattggccaaacgttcccgcagtcgaactgctacagaatgtgacgttcgtatgagcaagtctaagtcagacaatcagatcagtgacagagctgctttggaggccaaagtgaaggatcttctcacgctggcaaaaaccaaagacgtagaaattttacatttgagaaatgaactgcgagacatgcgtgcccagctgggcattaatgaggatcattctgagggtgatgaaaaatctgagaaggaaactattatggctcaccagccgactgatgtggagtccactttattgcagttgcaggaacagaatactgccatccgtgaagaactcaaccagctgaaaaatgaaaacagaatgttaaaggacaggttgaatgcattgggcttttccctagagcagaggttagacaattctgaaaaactgtttggctatcagtccctgagcccagaaatcacccctggtaaccagagcgatggaggaggaactctgacttcttcagtggaaggctctgcccctggctcagtggaggatctcttgagtcaggatgaaaatacactaatggaccatcagcacagtaactccatggacaatttagacagtgagtgcagtgaggtctaccagcccctcacatcgagcgatgatgcgctggatgcaccatcctcctcagagtcggaaggcatccccagcatagagcgctcccggaaggggagcagcgggaatgccagtgaagtgtccgtggcttgcctgactgaacggatacaccagatggaagagaaccaacacagtacaagtgaggaactccaggcaaccctgcaagagctagctgatttacagcagattacccaggaactgaatagtgaaaacgaaaggcttggagaagagaaggttattctgatggagtctttatgtcagcagagcgataagttggaacactttagtcgacagattgaatacttccgctctcttctagatgagcatcacatttcttatgtcatagatgaagatgtaaaaagtgggcgctatatggaattagagcaacgttacatggacctcgctgagaatgcccgttttgaacgggagcagcttcttggtgtccagcagcatttaagcaatactttgaaaatggcagaacaagacaataaggaagctcaagaaatgataggggcactcaaagaacgcagtcaccatatggagcgaattattgagtctgagcagaaaggaaaagcagccttggcagccacgttagaggaatacaaagccacagtggccagtgaccagatagagatgaatcgcctgaaggctcagctggagaatgaaaagcagaaagtggcagagctgtattctatccataactctggagacaaatctgatattcaggacctcctggagagtgtcaggctggacaaagaaaaagcagagactttggctagtagcttgcaggaagatctggctcatacccgaaatgatgccaatcgattacaggatgccattgctaaggtagaggatgaataccgagccttccaagaagaagctaagaaacaaattgaagatttgaatatgacgttagaaaaattaagatcagacctggatgaaaaagaaacagaaaggagtgacatgaaagaaaccatctttgaacttgaagatgaagtagaacaacatcgtgctgtgaaacttcatgacaacctcattatttctgatctagagaatacagttaaaaaactccaggaccaaaagcacgacatggaaagagaaataaagacactccacagaagacttcgggaagaatctgcggaatggcggcagtttcaggctgatctccagactgcagtagtcattgcaaatgacattaaatctgaagcccaagaggagattggtgatctaaagcgccggttacatgaggctcaagaaaaaaatgagaaactcacaaaagaattggaggaaataaagtcacgcaagcaagaggaggagcgaggccgggtatacaattacatgaatgccgttgagagagatttggcagccttaaggcagggaatgggactgagtagaaggtcctcgacttcctcagagccaactcctacagtaaaaaccctcatcaagtcctttgacagtgcatctcaagtaccaaaccctgctgcagctgcaattcctcgaacgcccctgagcccaagtcctatgaaaacccctcctgcagcagctgtgtcccctatgcagatggagtctagttctgtcgcccacgctggaatgcagtggcgtgaccttggctcactgcaacctctgcctcctgggttcaagtgattctcctgcctcagccccctgagtagctgggactacagagacattccataagtggaccaatctcaacatccaaacccctgacagccctgtcagataagagaccaaactatggggaaatccctgttcaagagcatctgttaagaacatcttcagccagccggcctgcttccctgccaagagtgcctgcgatggaaagtgccaagaccctctcagtgtctcgacgaagtagtgaagaagtgaaacgggacatttctgcacaggagggagcgtcgccagcctctctgatggctatgggaaccacgtctccacagctttccctgtcctcttctccaacggcatctgtgactcccaccacccgaagccgaataagagaagaaaggaaagaccctctctcagcattggccagagaatatggaggatcaaagaggaacgccttgctgaagtggtgtcagaagaaaacagaaggctatcagaatattgacattacaaacttcagcagcagctggaatgatgggctggccttctgtgccctcctgcatacatatctccctgcccacattccatatcaagaactgaacagccaggataagagaaggaacttcatgctggctttccaggcagctgaaagtgtcggcatcaaatccacactggacattaatgaaatggtacggactgaacgacccgactggcagaacgtgatgctgtatgtgacggcgatctacaagtactttgagacctgagcatgccgggaggagccgccccaatagcgggggtacccctccacagcgaccgagcgacaccgacgccattagctacgcacccctgtaaagcttccagcaactctgggctgccccacagcgtgtgcctcaggaaccctgaagctgggctgagccatgatgctgctgccagaacccctgcagagggcctggtttcaggagactcagagtcctctgtgaaaaagcccttggagagcgccccagcagggctgcacttggctcctgtgaggaaggggctcaggggtctgggcccctccgcctgggccgggctgggagccaggcgggcggctgggctgcagcaatggaccgtgagctggcccagcccgcgtccgtgctgagcctgcctgtcgtctgtggccatgcccatcatgggctcctcggtgtacatcacggtggagctggccattgctgtgctggccatcctgggcaatgtgctggtgtgctgggccgtgtggctcaacagcaacctgcagaacgtcaccaactactttgtggtgtcactggcggcggccgacatcgcagtgggtgtgctcgccatcccctttgccatcaccatcagcaccgggttctgcgctgcctgccacggctgcctcttcattgcctgcttcgtcctggtcctcacgcagagctccatcttcagtctcctggccatcgccattgaccgctacattgccatccgcatcccgctccggtacaatggcttggtgaccggcacgagggctaagggcatcattgccatctgctgggtgctgtcgtttgccatcggcctgactcccatgctaggttggaacaactgcggtcagccaaaggagggcaagaaccactcccagggctgcggggagggccaagtggcctgtctctttgaggatgtggtccccatgaactacatggtgtacttcaacttctttgcctgtgtgctggtgcccctgctgctcatgctgggtgtctatttgcggatcttcctggcggcgcgacgacagctgaagcagatggagagccagcctctgccgggggagcgggcacggtccacactgcagaaggaggtccatgctgccaagtcactggccatcattgtggggctctttgccctctgctggctgcccctacacatcatcaactgcttcactttcttctgccccgactgcagccacgcccctctctggctcatgtacctggccatcgtcctctcccacaccaattcggttgtgaatcccttcatctacgcctaccgtatccgcgagttccgccagaccttccgcaagatcattcgcagccacgtcctgaggcagcaagaacctttcaaggcagctggcaccagtgcccgggtcttggcagctcatggcagtgacggagagcaggtcagcctccgtctcaacggccacccgccaggagtgtgggccaacggcagtgctccccaccctgagcggaggcccaatggctatgccctggggctggtgagtggagggagtgcccaagagtcccaggggaacacgggcctcccagacgtggagctccttagccatgagctcaagggagtgtgcccagagccccctggcctagatgaccccctggcccaggatggagcaggagtgtcctgatgattcatggagtttgccccttcctaagggaaggagatctttatctttctggttggcttgaccagtcacgttgggagaagagagagagtgccaggagaccctgagggcagccggttcctactttggactgagagaagggagccccaggctggagcagcatgaggcccagcaagaagggcttgggttctgaggaagcagatgtttcatgctgtgaggccttgcaccaggtgggggccacagcaccagcagcatctttgctgggcagggcccagccctccactgcagaagcatctggaagcaccaccttgtctccacagagcagcttgggcacagcagactggcctggccctgagactggggagtggctccaacagcctcctgccacccacacaccactctccctagactctcctagggttcaggagctgctgggcccagaggtgacatttgacttttttccaggaaaaatgtaagtgtgaggaaaccctttttattttattacctttcactctctggctgctgggtctgccgtcggtcctgctgctaacctggcaccagagcctctgcccggggagcctcaggcagtcctctcctgctgtcacagctgccatccacttctcagtcccagggccatctcttggagtgacaaagctgggatcaaggacagggagttgtaacagagcagtgccagagcatgggcccaggtcccaggggagaggttggggctggcaggccactggcatgtgctgagtagcgcagagctacccagtgagaggccttgtctaactgcctttccttctaaagggaatgtttttttctgagataaaataaaaacgagccacatcgtgttttaagcttgtccaaatg

SEQ ID NO: 185283 - DNA, 2736 bp, Homo sapiens
  Payload ID: 16491
  Gene Symbol: SPECC1L-ADORA2A
  Gene Name: SPECC1L-ADORA2A readthrough (NMD candidate)
  Uniprot ID: P29274
  ENST ID: ENST00000610595
  CDS Start-End: 631-1869
gagggcgtgggaggagggaggtgaggcagctccctccgagtggaagctcacagtcagctgcagcgccgcccctgccctgactgcagctgactggcaggggcacctggaggcagcgggttcgggcgcagtatgagagggcttaccctctgcggcagtgggagacaggaccaggcagctccccacatccttccacatccgagctccaggggtctctggcttgtcctttcacagggcggctggtgtcccttaggaaaaaaacagaccacatctgatccttggccctgagtccagagtgggaggcaccgtgacaacaatgcgcagagcagggaatgcagggagccatggatagtgctggggtgcctcaggaaccctgaagctgggctgagccatgatgctgctgccagaacccctgcagagggcctggtttcaggagactcagagtcctctgtgaaaaagcccttggagagcgccccagcagggctgcacttggctcctgtgaggaaggggctcaggggtctgggcccctccgcctgggccgggctgggagccaggcgggcggctgggctgcagcaatggaccgtgagctggcccagcccgcgtccgtgctgagcctgcctgtcgtctgtggccatgcccatcatgggctcctcggtgtacatcacggtggagctggccattgctgtgctggccatcctgggcaatgtgctggtgtgctgggccgtgtggctcaacagcaacctgcagaacgtcaccaactactttgtggtgtcactggcggcggccgacatcgcagtgggtgtgctcgccatcccctttgccatcaccatcagcaccgggttctgcgctgcctgccacggctgcctcttcattgcctgcttcgtcctggtcctcacgcagagctccatcttcagtctcctggccatcgccattgaccgctacattgccatccgcatcccgctccggtacaatggcttggtgaccggcacgagggctaagggcatcattgccatctgctgggtgctgtcgtttgccatcggcctgactcccatgctaggttggaacaactgcggtcagccaaaggagggcaagaaccactcccagggctgcggggagggccaagtggcctgtctctttgaggatgtggtccccatgaactacatggtgtacttcaacttctttgcctgtgtgctggtgcccctgctgctcatgctgggtgtctatttgcggatcttcctggcggcgcgacgacagctgaagcagatggagagccagcctctgccgggggagcgggcacggtccacactgcagaaggaggtccatgctgccaagtcactggccatcattgtggggctctttgccctctgctggctgcccctacacatcatcaactgcttcactttcttctgccccgactgcagccacgcccctctctggctcatgtacctggccatcgtcctctcccacaccaattcggttgtgaatcccttcatctacgcctaccgtatccgcgagttccgccagaccttccgcaagatcattcgcagccacgtcctgaggcagcaagaacctttcaaggcagctggcaccagtgcccgggtcttggcagctcatggcagtgacggagagcaggtcagcctccgtctcaacggccacccgccaggagtgtgggccaacggcagtgctccccaccctgagcggaggcccaatggctatgccctggggctggtgagtggagggagtgcccaagagtcccaggggaacacgggcctcccagacgtggagctccttagccatgagctcaagggagtgtgcccagagccccctggcctagatgaccccctggcccaggatggagcaggagtgtcctgatgattcatggagtttgccccttcctaagggaaggagatctttatctttctggttggcttgaccagtcacgttgggagaagagagagagtgccaggagaccctgagggcagccggttcctactttggactgagagaagggagccccaggctggagcagcatgaggcccagcaagaagggcttgggttctgaggaagcagatgtttcatgctgtgaggccttgcaccaggtgggggccacagcaccagcagcatctttgctgggcagggcccagccctccactgcagaagcatctggaagcaccaccttgtctccacagagcagcttgggcacagcagactggcctggccctgagactggggagtggctccaacagcctcctgccacccacacaccactctccctagactctcctagggttcaggagctgctgggcccagaggtgacatttgacttttttccaggaaaaatgtaagtgtgaggaaaccctttttattttattacctttcactctctggctgctgggtctgccgtcggtcctgctgctaacctggcaccagagcctctgcccggggagcctcaggcagtcctctcctgctgtcacagctgccatccacttctcagtcccagggccatctcttggagtgacaaagctgggatcaaggacagggagttgtaacagagcagtgccagagcatgggcccaggtcccaggggagaggttggggctggcaggccactggcatgtgctgagtagcgcagagctacccagtgagaggccttgtctaactgcctttccttctaaagggaatgtttttttctgagataaaataaaaacgagccacatcgtgttttaagcttgtccaaatg

SEQ ID NO: 185284 - DNA, 2630 bp, Homo sapiens
  Payload ID: 16491
  Gene Symbol: SPECC1L-ADORA2A
  Gene Name: SPECC1L-ADORA2A readthrough (NMD candidate)
  Uniprot ID: P29274
  ENST ID: ENST00000618076
  CDS Start-End: 525-1763
gagggcgtgggaggagggaggtgaggcagctccctccgagtggaagctcacagtcagctgcagcgccgcccctgccctgactgcagctgactggcaggggcacctggaggcagcgggttcgggcgcagtatgagagggcttaccctctgcggcagtgggagacaggaccaggcagctccccacatccttccacatccgagctccaggggtctctggcttgtcctttcacagggcggctggtgtcccttaggtgcctcaggaaccctgaagctgggctgagccatgatgctgctgccagaacccctgcagagggcctggtttcaggagactcagagtcctctgtgaaaaagcccttggagagcgccccagcagggctgcacttggctcctgtgaggaaggggctcaggggtctgggcccctccgcctgggccgggctgggagccaggcgggcggctgggctgcagcaatggaccgtgagctggcccagcccgcgtccgtgctgagcctgcctgtcgtctgtggccatgcccatcatgggctcctcggtgtacatcacggtggagctggccattgctgtgctggccatcctgggcaatgtgctggtgtgctgggccgtgtggctcaacagcaacctgcagaacgtcaccaactactttgtggtgtcactggcggcggccgacatcgcagtgggtgtgctcgccatcccctttgccatcaccatcagcaccgggttctgcgctgcctgccacggctgcctcttcattgcctgcttcgtcctggtcctcacgcagagctccatcttcagtctcctggccatcgccattgaccgctacattgccatccgcatcccgctccggtacaatggcttggtgaccggcacgagggctaagggcatcattgccatctgctgggtgctgtcgtttgccatcggcctgactcccatgctaggttggaacaactgcggtcagccaaaggagggcaagaaccactcccagggctgcggggagggccaagtggcctgtctctttgaggatgtggtccccatgaactacatggtgtacttcaacttctttgcctgtgtgctggtgcccctgctgctcatgctgggtgtctatttgcggatcttcctggcggcgcgacgacagctgaagcagatggagagccagcctctgccgggggagcgggcacggtccacactgcagaaggaggtccatgctgccaagtcactggccatcattgtggggctctttgccctctgctggctgcccctacacatcatcaactgcttcactttcttctgccccgactgcagccacgcccctctctggctcatgtacctggccatcgtcctctcccacaccaattcggttgtgaatcccttcatctacgcctaccgtatccgcgagttccgccagaccttccgcaagatcattcgcagccacgtcctgaggcagcaagaacctttcaaggcagctggcaccagtgcccgggtcttggcagctcatggcagtgacggagagcaggtcagcctccgtctcaacggccacccgccaggagtgtgggccaacggcagtgctccccaccctgagcggaggcccaatggctatgccctggggctggtgagtggagggagtgcccaagagtcccaggggaacacgggcctcccagacgtggagctccttagccatgagctcaagggagtgtgcccagagccccctggcctagatgaccccctggcccaggatggagcaggagtgtcctgatgattcatggagtttgccccttcctaagggaaggagatctttatctttctggttggcttgaccagtcacgttgggagaagagagagagtgccaggagaccctgagggcagccggttcctactttggactgagagaagggagccccaggctggagcagcatgaggcccagcaagaagggcttgggttctgaggaagcagatgtttcatgctgtgaggccttgcaccaggtgggggccacagcaccagcagcatctttgctgggcagggcccagccctccactgcagaagcatctggaagcaccaccttgtctccacagagcagcttgggcacagcagactggcctggccctgagactggggagtggctccaacagcctcctgccacccacacaccactctccctagactctcctagggttcaggagctgctgggcccagaggtgacatttgacttttttccaggaaaaatgtaagtgtgaggaaaccctttttattttattacctttcactctctggctgctgggtctgccgtcggtcctgctgctaacctggcaccagagcctctgcccggggagcctcaggcagtcctctcctgctgtcacagctgccatccacttctcagtcccagggccatctcttggagtgacaaagctgggatcaaggacagggagttgtaacagagcagtgccagagcatgggcccaggtcccaggggagaggttggggctggcaggccactggcatgtgctgagtagcgcagagctacccagtgagaggccttgtctaactgcctttccttctaaagggaatgtttttttctgagataaaataaaaacgagccacatcgtgttttaagcttgtccaaatg

SEQ ID NO: 185285 - DNA, 2412 bp, Homo sapiens
  Payload ID: 16491
  Gene Symbol: SPECC1L-ADORA2A
  Gene Name: SPECC1L-ADORA2A readthrough (NMD candidate)
  Uniprot ID: P29274
  ENST ID: ENST00000611543
  CDS Start-End: 307-1545
gactcccaggcccgaggactcctggaagggaggtgcctcaggaaccctgaagctgggctgagccatgatgctgctgccagaacccctgcagagggcctggtttcaggagactcagagtcctctgtgaaaaagcccttggagagcgccccagcagggctgcacttggctcctgtgaggaaggggctcaggggtctgggcccctccgcctgggccgggctgggagccaggcgggcggctgggctgcagcaatggaccgtgagctggcccagcccgcgtccgtgctgagcctgcctgtcgtctgtggccatgcccatcatgggctcctcggtgtacatcacggtggagctggccattgctgtgctggccatcctgggcaatgtgctggtgtgctgggccgtgtggctcaacagcaacctgcagaacgtcaccaactactttgtggtgtcactggcggcggccgacatcgcagtgggtgtgctcgccatcccctttgccatcaccatcagcaccgggttctgcgctgcctgccacggctgcctcttcattgcctgcttcgtcctggtcctcacgcagagctccatcttcagtctcctggccatcgccattgaccgctacattgccatccgcatcccgctccggtacaatggcttggtgaccggcacgagggctaagggcatcattgccatctgctgggtgctgtcgtttgccatcggcctgactcccatgctaggttggaacaactgcggtcagccaaaggagggcaagaaccactcccagggctgcggggagggccaagtggcctgtctctttgaggatgtggtccccatgaactacatggtgtacttcaacttctttgcctgtgtgctggtgcccctgctgctcatgctgggtgtctatttgcggatcttcctggcggcgcgacgacagctgaagcagatggagagccagcctctgccgggggagcgggcacggtccacactgcagaaggaggtccatgctgccaagtcactggccatcattgtggggctctttgccctctgctggctgcccctacacatcatcaactgcttcactttcttctgccccgactgcagccacgcccctctctggctcatgtacctggccatcgtcctctcccacaccaattcggttgtgaatcccttcatctacgcctaccgtatccgcgagttccgccagaccttccgcaagatcattcgcagccacgtcctgaggcagcaagaacctttcaaggcagctggcaccagtgcccgggtcttggcagctcatggcagtgacggagagcaggtcagcctccgtctcaacggccacccgccaggagtgtgggccaacggcagtgctccccaccctgagcggaggcccaatggctatgccctggggctggtgagtggagggagtgcccaagagtcccaggggaacacgggcctcccagacgtggagctccttagccatgagctcaagggagtgtgcccagagccccctggcctagatgaccccctggcccaggatggagcaggagtgtcctgatgattcatggagtttgccccttcctaagggaaggagatctttatctttctggttggcttgaccagtcacgttgggagaagagagagagtgccaggagaccctgagggcagccggttcctactttggactgagagaagggagccccaggctggagcagcatgaggcccagcaagaagggcttgggttctgaggaagcagatgtttcatgctgtgaggccttgcaccaggtgggggccacagcaccagcagcatctttgctgggcagggcccagccctccactgcagaagcatctggaagcaccaccttgtctccacagagcagcttgggcacagcagactggcctggccctgagactggggagtggctccaacagcctcctgccacccacacaccactctccctagactctcctagggttcaggagctgctgggcccagaggtgacatttgacttttttccaggaaaaatgtaagtgtgaggaaaccctttttattttattacctttcactctctggctgctgggtctgccgtcggtcctgctgctaacctggcaccagagcctctgcccggggagcctcaggcagtcctctcctgctgtcacagctgccatccacttctcagtcccagggccatctcttggagtgacaaagctgggatcaaggacagggagttgtaacagagcagtgccagagcatgggcccaggtcccaggggagaggttggggctggcaggccactggcatgtgctgagtagcgcagagctacccagtgagaggccttgtctaactgcctttccttctaaagggaatgtttttttctgagataaaataaaaacgagccacatcgtgttttaagcttgtccaaatg

SEQ ID NO: 185286 - DNA, 2965 bp, Homo sapiens
  Payload ID: 16492
  Gene Symbol: SPOP
  Gene Name: speckle-type POZ protein
  Uniprot ID: O43791
  ENST ID: ENST00000347630
  CDS Start-End: 349-1473
ggggaggaggccgcgcggggtggggtctggcggtacgcgctggctgcgtcgacgtgctgacgccatgacgccccggctggtgtgtgtcggtgtgtatgtgtgtgtgtgagtgtgcgcgctccgagtgtgtgtgtatttgtgtatcggcggtcccgcaggtcccggatgttgcggacagtatgaggcaagcgcagggggacggggaccagcagctgtcgccgccgctctcagagatttcctgttagacaagacaaattagagttttcctactgacttaacttgggtgaagagggaacagaaatctttgccccctgactttggaaatctcgtttaaccttcaaactggcgatgtcaagggttccaagtcctccacctccggcagaaatgtcgagtggccccgtagctgagagttggtgctacacacagatcaaggtagtgaaattctcctacatgtggaccatcaataactttagcttttgccgggaggaaatgggtgaagtcattaaaagttctacattttcatcaggagcaaatgataaactgaaatggtgtttgcgagtaaaccccaaagggttagatgaagaaagcaaagattacctgtcactttacctgttactggtcagctgtccaaagagtgaagttcgggcaaaattcaaattctccatcctgaatgccaagggagaagaaaccaaagctatggagagtcaacgggcatataggtttgtgcaaggcaaagactggggattcaagaaattcatccgtagagattttcttttggatgaggccaacgggcttctccctgatgacaagcttaccctcttctgcgaggtgagtgttgtgcaagattctgtcaacatttctggccagaataccatgaacatggtaaaggttcctgagtgccggctggcagatgagttaggaggactgtgggagaattcccggttcacagactgctgcttgtgtgttgccggccaggaattccaggctcacaaggctatcttagcagctcgttctccggtttttagtgccatgtttgaacatgaaatggaggagagcaaaaagaatcgagttgaaatcaatgatgtggagcctgaagtttttaaggaaatgatgtgcttcatttacacggggaaggctccaaacctcgacaaaatggctgatgatttgctggcagctgctgacaagtatgccctggagcgcttaaaggtcatgtgtgaggatgccctctgcagtaacctgtccgtggagaacgctgcagaaattctcatcctggccgacctccacagtgcagatcagttgaaaactcaggcagtggatttcatcaactatcatgcttcggatgtcttggagacctctgggtggaagtcaatggtggtgtcacatccccacttggtggctgaggcataccgctctctggcttcagcacagtgcccttttctgggacccccacgcaaacgcctgaagcaatcctaagatcctgcttgttgtaagactccgtttaatttccagaagcagcagccactgttgctgccactgaccaccaggtagacagcgcaatctgtggagcttttactctgttgtgaggggaagagactgcattgtggccccagacttttaaaacagcactaaataacttgggggaaacggggggagggaaaatgaaatgaaaaccctgttgctgcgtcactgtgttccctttggcctggctgagtttgatactgtggggattcagtttaggcgctggcccgaggatatcccagcggtggtacttcggagacacctgtctgcatctgactgagcagaacaaatcgtcaggtgcctggagcaaaaaggaaaaaaaaaaaagaaaggacattgagttttaacagaagggaaaaggaaagaagaaaagatttttgcagaatttctcaaaaatcagtttgtggattccagtagtatttatattgagagaaacaaattttagtccttctaactgtgctaaaacttggatatttgtgaaaactccttaccaccatacaagcatcagaagagctctcttgttgttagcacttattgtttgcaagaacagaatacatccttttatccttttatgaaaaatgacaagtgaaggcaaaaggggaaggttatttgatctggaagatgagtgttctgatgtggtggcttttgcaaaaatctttattggtgttgaaaactggaaaaaataactcatccagaattcatattgtcttgacaagaactatggttctctgtttttagatattgtggaaaatgtttttgggcatttttctctgattttatttcttctcccccacccctttttctaaaaaacaaacaaaaaaaaaaacacacaaaacaaaaacagaacaaaagaagagagaaggaaattttatcaattaaaaatgctgtgtgataaaatcccagcccagattgctcagctgtttgtacctgacttgccgcctgcataggagccagttctgttccttctgactagcccctcttcctccaggggagaacttccaaatgttaatttttttttttttgaaaatataaataattactattttgtactgtgtggtatctctggtcttttgtttcactcacctgccttgtctcttgggtctgagtcccttgcttaagggattttgaagtcctagttttcagcttgcagagattatgtctgaaatgcctaatgagtcgcagggatttgttgagactccgtaatctcaagttctctttgtgagctatcagcatctgccagtctcttgtcctccctgagtatctcacagtccatatcctgatgagggatcaggcccctacctctgccaaggcaagtaatggtagtgggcttttaaactgccccccgtatgttttaagacctaatccccacctcccttcttctaactaaatataaaaagatccaggggacataaatgtggagattaaataaagggaaattattgtctct

SEQ ID NO: 185287 - DNA, 2985 bp, Homo sapiens
  Payload ID: 16492
  Gene Symbol: SPOP
  Gene Name: speckle-type POZ protein
  Uniprot ID: O43791
  ENST ID: ENST00000393328
  CDS Start-End: 367-1491
gtgctgacgccatgacgccccggctggtgtgtgtcggtgtgtatgtgtgtgtgtgagtgtgcgcgctccgagtgtgtgtgtatttgtgtatcggcggtcccgcaggtcccggatgttgcggacagtatgaggcaagcgcagggggacggggaccagcagctgtcgccgccgctctcagatcgagtcttgctctgtcacccaggctggagtgcagtggcgcgatctcagctcactgccacctttgcctcctgggttcaagcgattcttctgcctcagcctcccgagtagctgggattacagggtgaagagggaacagaaatctttgccccctgactttggaaatctcgtttaaccttcaaactggcgatgtcaagggttccaagtcctccacctccggcagaaatgtcgagtggccccgtagctgagagttggtgctacacacagatcaaggtagtgaaattctcctacatgtggaccatcaataactttagcttttgccgggaggaaatgggtgaagtcattaaaagttctacattttcatcaggagcaaatgataaactgaaatggtgtttgcgagtaaaccccaaagggttagatgaagaaagcaaagattacctgtcactttacctgttactggtcagctgtccaaagagtgaagttcgggcaaaattcaaattctccatcctgaatgccaagggagaagaaaccaaagctatggagagtcaacgggcatataggtttgtgcaaggcaaagactggggattcaagaaattcatccgtagagattttcttttggatgaggccaacgggcttctccctgatgacaagcttaccctcttctgcgaggtgagtgttgtgcaagattctgtcaacatttctggccagaataccatgaacatggtaaaggttcctgagtgccggctggcagatgagttaggaggactgtgggagaattcccggttcacagactgctgcttgtgtgttgccggccaggaattccaggctcacaaggctatcttagcagctcgttctccggtttttagtgccatgtttgaacatgaaatggaggagagcaaaaagaatcgagttgaaatcaatgatgtggagcctgaagtttttaaggaaatgatgtgcttcatttacacggggaaggctccaaacctcgacaaaatggctgatgatttgctggcagctgctgacaagtatgccctggagcgcttaaaggtcatgtgtgaggatgccctctgcagtaacctgtccgtggagaacgctgcagaaattctcatcctggccgacctccacagtgcagatcagttgaaaactcaggcagtggatttcatcaactatcatgcttcggatgtcttggagacctctgggtggaagtcaatggtggtgtcacatccccacttggtggctgaggcataccgctctctggcttcagcacagtgcccttttctgggacccccacgcaaacgcctgaagcaatcctaagatcctgcttgttgtaagactccgtttaatttccagaagcagcagccactgttgctgccactgaccaccaggtagacagcgcaatctgtggagcttttactctgttgtgaggggaagagactgcattgtggccccagacttttaaaacagcactaaataacttgggggaaacggggggagggaaaatgaaatgaaaaccctgttgctgcgtcactgtgttccctttggcctggctgagtttgatactgtggggattcagtttaggcgctggcccgaggatatcccagcggtggtacttcggagacacctgtctgcatctgactgagcagaacaaatcgtcaggtgcctggagcaaaaaggaaaaaaaaaaaagaaaggacattgagttttaacagaagggaaaaggaaagaagaaaagatttttgcagaatttctcaaaaatcagtttgtggattccagtagtatttatattgagagaaacaaattttagtccttctaactgtgctaaaacttggatatttgtgaaaactccttaccaccatacaagcatcagaagagctctcttgttgttagcacttattgtttgcaagaacagaatacatccttttatccttttatgaaaaatgacaagtgaaggcaaaaggggaaggttatttgatctggaagatgagtgttctgatgtggtggcttttgcaaaaatctttattggtgttgaaaactggaaaaaataactcatccagaattcatattgtcttgacaagaactatggttctctgtttttagatattgtggaaaatgtttttgggcatttttctctgattttatttcttctcccccacccctttttctaaaaaacaaacaaaaaaaaaaacacacaaaacaaaaacagaacaaaagaagagagaaggaaattttatcaattaaaaatgctgtgtgataaaatcccagcccagattgctcagctgtttgtacctgacttgccgcctgcataggagccagttctgttccttctgactagcccctcttcctccaggggagaacttccaaatgttaatttttttttttttgaaaatataaataattactattttgtactgtgtggtatctctggtcttttgtttcactcacctgccttgtctcttgggtctgagtcccttgcttaagggattttgaagtcctagttttcagcttgcagagattatgtctgaaatgcctaatgagtcgcagggatttgttgagactccgtaatctcaagttctctttgtgagctatcagcatctgccagtctcttgtcctccctgagtatctcacagtccatatcctgatgagggatcaggcccctacctctgccaaggcaagtaatggtagtgggcttttaaactgccccccgtatgttttaagacctaatccccacctcccttcttctaactaaatataaaaagatccaggggacataaatgtggagattaaataaagggaaattattgtctctaa

SEQ ID NO: 185288 - DNA, 1932 bp, Homo sapiens
  Payload ID: 16492
  Gene Symbol: SPOP
  Gene Name: speckle-type POZ protein
  Uniprot ID: O43791
  ENST ID: ENST00000503676
  CDS Start-End: 633-1757
atatagcttaaagcatttaactggaaaggaccttggaaatccttttaaaggaggatgggggtggaaatgcacaggttgcttctctctctctctctctttttttttttttttgagacggtcacccaggctgtagtgcagtggcgtgatctcggctcactgtggcctccacctcccaagtagctgggattacaggcttgcgccatcatgcagggctaatttttgtatttttagtagagacgaggtttcatcatgttggccaggctggtctggaactcctgacctcaagtgatctgcccaccttggcctcccaaagtgctgggattaaaggcatgagccaccacgcctggcctaggttgttcctctactgtgaatcttgaggttatggtttccactagactatagtgctcaactatagtggcctattttaagtggccttataattcctaaccaaagtgacttgtgaaacagaggaccctggataaatttaaatgttataaagatgataaaatgtacagagatttcctgttagacaagacaaattagagttttcctactgacttaacttgggtgaagagggaacagaaatctttgccccctgactttggaaatctcgtttaaccttcaaactggcgatgtcaagggttccaagtcctccacctccggcagaaatgtcgagtggccccgtagctgagagttggtgctacacacagatcaaggtagtgaaattctcctacatgtggaccatcaataactttagcttttgccgggaggaaatgggtgaagtcattaaaagttctacattttcatcaggagcaaatgataaactgaaatggtgtttgcgagtaaaccccaaagggttagatgaagaaagcaaagattacctgtcactttacctgttactggtcagctgtccaaagagtgaagttcgggcaaaattcaaattctccatcctgaatgccaagggagaagaaaccaaagctatggagagtcaacgggcatataggtttgtgcaaggcaaagactggggattcaagaaattcatccgtagagattttcttttggatgaggccaacgggcttctccctgatgacaagcttaccctcttctgcgaggtgagtgttgtgcaagattctgtcaacatttctggccagaataccatgaacatggtaaaggttcctgagtgccggctggcagatgagttaggaggactgtgggagaattcccggttcacagactgctgcttgtgtgttgccggccaggaattccaggctcacaaggctatcttagcagctcgttctccggtttttagtgccatgtttgaacatgaaatggaggagagcaaaaagaatcgagttgaaatcaatgatgtggagcctgaagtttttaaggaaatgatgtgcttcatttacacggggaaggctccaaacctcgacaaaatggctgatgatttgctggcagctgctgacaagtatgccctggagcgcttaaaggtcatgtgtgaggatgccctctgcagtaacctgtccgtggagaacgctgcagaaattctcatcctggccgacctccacagtgcagatcagttgaaaactcaggcagtggatttcatcaactatcatgcttcggatgtcttggagacctctgggtggaagtcaatggtggtgtcacatccccacttggtggctgaggcataccgctctctggcttcagcacagtgcccttttctgggacccccacgcaaacgcctgaagcaatcctaagatcctgcttgttgtaagactccgtttaatttccagaagcagcagccactgttgctgccactgaccaccaggtagacagcgcaatctgtggagcttttactctgttgtgaggggaagagactgcattgtggccccagacttttaaaacagcactaaataacttgggggaaacggg

SEQ ID NO: 185289 - DNA, 984 bp, Homo sapiens
  Payload ID: 16492
  Gene Symbol: SPOP
  Gene Name: speckle-type POZ protein
  ENST ID: ENST00000505581
  CDS Start-End: 271-984
ggtgtgtgtcggtgtgtatgtgtgtgtgtgagtgtgcgcgctccgagtgtgtgtgtatttgtgtatcggcggtcccgcaggtcccggatgttgcggacagtatgaggcaagcgcagggggacggggaccagcagctgtcgccgccgctctcagagatttcctgttagacaagacaaattagagttttcctactgacttaacttgggtgaagagggaacagaaatctttgccccctgactttggaaatctcgtttaaccttcaaactggcgatgtcaagggttccaagtcctccacctccggcagaaatgtcgagtggccccgtagctgagagttggtgctacacacagatcaaggtagtgaaattctcctacatgtggaccatcaataactttagcttttgccgggaggaaatgggtgaagtcattaaaagttctacattttcatcaggagcaaatgataaactgaaatggtgtttgcgagtaaaccccaaagggttagatgaagaaagcaaagattacctgtcactttacctgttactggtcagctgtccaaagagtgaagttcgggcaaaattcaaattctccatcctgaatgccaagggagaagaaaccaaagctatggagagtcaacgggcatataggtttgtgcaaggcaaagactggggattcaagaaattcatccgtagagattttcttttggatgaggccaacgggcttctccctgatgacaagcttaccctcttctgcgaggtgagtgttgtgcaagattctgtcaacatttctggccagaataccatgaacatggtaaaggttcctgagtgccggctggcagatgagttaggaggactgtgggagaattcccggttcacagactgctgcttgtgtgttgccggccaggaattccaggctcacaaggctatcttagcagctcgttctccggtttttagtgccatgtttgaacatgaaatggaggagagcaaaaag

SEQ ID NO: 185290 - DNA, 534 bp, Homo sapiens
  Payload ID: 16492
  Gene Symbol: SPOP
  Gene Name: speckle-type POZ protein
  ENST ID: ENST00000504212
  CDS Start-End: 190-324
cccggatgttgcggacagtatgaggcaagcgcagggggacggggaccagcagctgtcgccgccgctctcaggctctgggaaccacccttctactttctgtctctaggaatttcactactctagggtgaagagggaacagaaatctttgccccctgactttggaaatctcgtttaaccttcaaactggcgatgtcaagggttccaagtcctccacctccggcagaaatgtcgagtggccccgtagctgagagttggtgctacacacagtgttctcagcagctgaaaaaagttataaaagctattggtcagtgtgagatttcttaaaatgtggatgaggaacataagatcaaggtagtgaaattctcctacatgtggaccatcaataactttagcttttgccgggaggaaatgggtgaagtcattaaaagttctacattttcatcaggagcaaatgataaactgaaatggtgtttgcgagtaaaccccaaagggttagatgaagaaagcaaagattacctgtcactttacctgtta

SEQ ID NO: 185291 - DNA, 450 bp, Homo sapiens
  Payload ID: 16492
  Gene Symbol: SPOP
  Gene Name: speckle-type POZ protein
  ENST ID: ENST00000451526
  CDS Start-End: 355-450
gctccgagtgtgtgtgtatttgtgtatcggcggtcccgcaggtcccggatgttgcggacagtatgaggcaagcgcagggggacggggaccagcagctgtcgccgccgctctcagatcgagtcttgctctgtcacccaggctggagtgcagtggcgcgatctcagctcactgccacctttgcctcctgggttcaagcgattcttctgcctcagcctcccgagtagctgggattacaggctctgggaaccacccttctactttctgtctctaggaatttcactactctagggtgaagagggaacagaaatctttgccccctgactttggaaatctcgtttaaccttcaaactggcgatgtcaagggttccaagtcctccacctccggcagaaatgtcgagtggccccgtagctgagagttggtgctacacacagatcaaggtagtgaaattc

SEQ ID NO: 185292 - DNA, 779 bp, Homo sapiens
  Payload ID: 16492
  Gene Symbol: SPOP
  Gene Name: speckle-type POZ protein
  ENST ID: ENST00000509869
  CDS Start-End: 1-217
aaagagtgaagttcgggcaaaattcaaattctccatcctgaatgccaagggagaagaaaccaaagctatggagagtcaacgggcatataggtttgtgcaaggcaaagactggggattcaagaaattcatccgtagagattttcttttggatgaggccaacgggcttctccctgatgacaagcttaccctcttctgcgagattcttatcaagagttgaggcctatggtttgtcttgctggagtaattgtgaaataagaagaaggaactacaggtcattaactttgcctctgggcttatgactgcgtttaagggatgacttgcatcttgaaggttaaaagaaatctgggtcattaaggatgttcctaagctgtctttctcatcttactgttaggaacagcaagagtggggagctaattctcaaggtgagtgttgtgcaagattctgtcaacatttctggccagaataccatgaacatggtaaaggttcctgagtgccggctggcagatgagttaggaggactgtgggagaattcccggttcacagactgctgcttgtgtgttgccggccaggaattccaggctcacaaggctatcttagcagctcgttctccggtttttagtgccatgtttgaacatgaaatggaggagagcaaaaagaatcgagttgaaatcaatgatgtggagcctgaagtttttaaggaaatgatgtgcttcatttacacggggaaggctccaaacctcgacaaaatggctgatgatttgctggcagctgctgacaag

SEQ ID NO: 185293 - DNA, 873 bp, Homo sapiens
  Payload ID: 16492
  Gene Symbol: SPOP
  Gene Name: speckle-type POZ protein
  ENST ID: ENST00000514121
  CDS Start-End: 459-873
atgacgccccggctggtgtgtgtcggtgtgtatgtgtgtgtgtgagtgtgcgcgctccgagtgtgtgtgtatttgtgtatcggcggtcccgcaggtcccggatgttgcggacagtatgaggcaagcgcagggggacggggaccagcagctgtcgccgccgctctcagatcgagtcttgctctgtcacccaggctggagtgcagtggcgcgatctcagctcactgccacctttgcctcctgggttcaagcgattcttctgcctcagcctcccgagtagctgggattacaggctctgggaaccacccttctactttctgtctctaggaatttcactactctagagatttcctgttagacaagacaaattagagttttcctactgacttaacttgggtgaagagggaacagaaatctttgccccctgactttggaaatctcgtttaaccttcaaactggcgatgtcaagggttccaagtcctccacctccggcagaaatgtcgagtggccccgtagctgagagttggtgctacacacagatcaaggtagtgaaattctcctacatgtggaccatcaataactttagcttttgccgggaggaaatgggtgaagtcattaaaagttctacattttcatcaggagcaaatgataaactgaaatggtgtttgcgagtaaaccccaaagggttagatgaagaaagcaaagattacctgtcactttacctgttactggtcagctgtccaaagagtgaagttcgggcaaaattcaaattctccatcctgaatgccaagggagaagaaaccaaagctatggagagtcaacgggcatataggtttgtgcaaggcaaagactggggattcaagaaattcatccgta

SEQ ID NO: 185294 - DNA, 773 bp, Homo sapiens
  Payload ID: 16492
  Gene Symbol: SPOP
  Gene Name: speckle-type POZ protein
  ENST ID: ENST00000510476
  CDS Start-End: 574-773
taaagcatttaactggaaaggaccttggaaatccttttaaaggaggatgggggtggaaatgcacaggttgcttctctctctctctctctttttttttttttttgagacggtcacccaggctgtagtgcagtggcgtgatctcggctcactgtggcctccacctcccaagtagctgggattacaggcttgcgccatcatgcagggctaatttttgtatttttagtagagacgaggtttcatcatgttggccaggctggtctggaactcctgacctcaagtgatctgcccaccttggcctcccaaagtgctgggattaaaggcatgagccaccacgcctggcctaggttgttcctctactgtgaatcttgaggttatggtttccactagactatagtgctcaactatagtggcctattttaagtggccttataattcctaaccaaagtgacttgtgaaacagaggaccctggataaatttaaatgttataaagatgataaaatgtacagggtgaagagggaacagaaatctttgccccctgactttggaaatctcgtttaaccttcaaactggcgatgtcaagggttccaagtcctccacctccggcagaaatgtcgagtggccccgtagctgagagttggtgctacacacagatcaaggtagtgaaattctcctacatgtggaccatcaataactttagcttttgccgggaggaaatgggtgaagtcattaaaagttctacattttcatcaggagcaaatgataaactgaaatg

SEQ ID NO: 185295 - DNA, 918 bp, Homo sapiens
  Payload ID: 16492
  Gene Symbol: SPOP
  Gene Name: speckle-type POZ protein
  ENST ID: ENST00000506399
  CDS Start-End: 241-375
tgacgccatgacgccccggctggtgtgtgtcggtgtgtatgtgtgtgtgtgagtgtgcgcgctccgagtgtgtgtgtatttgtgtatcggcggtcccgcaggtcccggatgttgcggacagtatgaggcaagcgcagggggacggggaccagcagctgtcgccgccgctctcagggtgaagagggaacagaaatctttgccccctgactttggaaatctcgtttaaccttcaaactggcgatgtcaagggttccaagtcctccacctccggcagaaatgtcgagtggccccgtagctgagagttggtgctacacacagtgttctcagcagctgaaaaaagttataaaagctattggtcagtgtgagatttcttaaaatgtggatgaggaacataagatcaaggtagtgaaattctcctacatgtggaccatcaataactttagcttttgccgggaggaaatgggtgaagtcattaaaagttctacattttcatcaggagcaaatgataaactgaaatggtgtttgcgagtaaaccccaaagggttagatgaagaaagcaaagattacctgtcactttacctgttactggtcagctgtccaaagagtgaagttcgggcaaaattcaaattctccatcctgaatgccaagggagaagaaaccaaagctatggagagtcaacgggcatataggtttgtgcaaggcaaagactggggattcaagaaattcatccgtagagattttcttttggatgaggccaacgggcttctccctgatgacaagcttaccctcttctgcgaggtgagtgttgtgcaagattctgtcaacatttctggccagaataccatgaacatggtaaaggttcctgagtgccggctggcagatgagttaggaggactgtgggagaattcccggttcaca

SEQ ID NO: 185296 - DNA, 1865 bp, Homo sapiens
  Payload ID: 16492
  Gene Symbol: SPOP
  Gene Name: speckle-type POZ protein
  Uniprot ID: O43791
  ENST ID: ENST00000504102
  CDS Start-End: 369-1493
aagataggcggagtcttgagggaggaggagcagggaaacccagggaggggaggggaggagaagggagtaatggggaggaggccgcgcggggtggggtctggcggtacgcgctggctgcgtcgacgtgctgacgccatgacgccccggctggtgtgtgtcggtgtgtatgtgtgtgtgtgagtgtgcgcgctccgagtgtgtgtgtatttgtgtatcggcggtcccgcaggtcccggatgttgcggacagtatgaggcaagcgcagggggacggggaccagcagctgtcgccgccgctctcagggtgaagagggaacagaaatctttgccccctgactttggaaatctcgtttaaccttcaaactggcgatgtcaagggttccaagtcctccacctccggcagaaatgtcgagtggccccgtagctgagagttggtgctacacacagatcaaggtagtgaaattctcctacatgtggaccatcaataactttagcttttgccgggaggaaatgggtgaagtcattaaaagttctacattttcatcaggagcaaatgataaactgaaatggtgtttgcgagtaaaccccaaagggttagatgaagaaagcaaagattacctgtcactttacctgttactggtcagctgtccaaagagtgaagttcgggcaaaattcaaattctccatcctgaatgccaagggagaagaaaccaaagctatggagagtcaacgggcatataggtttgtgcaaggcaaagactggggattcaagaaattcatccgtagagattttcttttggatgaggccaacgggcttctccctgatgacaagcttaccctcttctgcgaggtgagtgttgtgcaagattctgtcaacatttctggccagaataccatgaacatggtaaaggttcctgagtgccggctggcagatgagttaggaggactgtgggagaattcccggttcacagactgctgcttgtgtgttgccggccaggaattccaggctcacaaggctatcttagcagctcgttctccggtttttagtgccatgtttgaacatgaaatggaggagagcaaaaagaatcgagttgaaatcaatgatgtggagcctgaagtttttaaggaaatgatgtgcttcatttacacggggaaggctccaaacctcgacaaaatggctgatgatttgctggcagctgctgacaagtatgccctggagcgcttaaaggtcatgtgtgaggatgccctctgcagtaacctgtccgtggagaacgctgcagaaattctcatcctggccgacctccacagtgcagatcagttgaaaactcaggcagtggatttcatcaactatcatgcttcggatgtcttggagacctctgggtggaagtcaatggtggtgtcacatccccacttggtggctgaggcataccgctctctggcttcagcacagtgcccttttctgggacccccacgcaaacgcctgaagcaatcctaagatcctgcttgttgtaagactccgtttaatttccagaagcagcagccactgttgctgccactgaccaccaggtagacagcgcaatctgtggagcttttactctgttgtgaggggaagagactgcattgtggccccagacttttaaaacagcactaaataacttgggggaaacggggggagggaaaatgaaatgaaaaccctgttgctgcgtcactgtgttccctttggcctggctgagtttgatactgtggggattcagtttaggcgctggcccgaggatatcccagcggtggtacttcggagacacctgtctgcatctgactgagcagaacaaatcgtcaggtgcctggagcaaaaaggaaaaaaaaaaaa

SEQ ID NO: 185297 - DNA, 919 bp, Homo sapiens
  Payload ID: 16492
  Gene Symbol: SPOP
  Gene Name: speckle-type POZ protein
  ENST ID: ENST00000507970
  CDS Start-End: 363-919
agtgtgcgcgctccgagtgtgtgtgtatttgtgtatcggcggtcccgcaggtcccggatgttgcggacagtatgaggcaagcgcagggggacggggaccagcagctgtcgccgccgctctcagatcgagtcttgctctgtcacccaggctggagtgcagtggcgcgatctcagctcactgccacctttgcctcctgggttcaagcgattcttctgcctcagcctcccgagtagctgggattacagagatttcctgttagacaagacaaattagagttttcctactgacttaacttgggtgaagagggaacagaaatctttgccccctgactttggaaatctcgtttaaccttcaaactggcgatgtcaagggttccaagtcctccacctccggcagaaatgtcgagtggccccgtagctgagagttggtgctacacacagatcaaggtagtgaaattctcctacatgtggaccatcaataactttagcttttgccgggaggaaatgggtgaagtcattaaaagttctacattttcatcaggagcaaatgataaactgaaatggtgtttgcgagtaaaccccaaagggttagatgaagaaagcaaagattacctgtcactttacctgttactggtcagctgtccaaagagtgaagttcgggcaaaattcaaattctccatcctgaatgccaagggagaagaaaccaaagctatggagagtcaacgggcatataggtttgtgcaaggcaaagactggggattcaagaaattcatccgtagagattttcttttggatgaggccaacgggcttctccctgatgacaagcttaccctcttctgcgaggtgagtgttgtgcaagattctgtcaacatttctggccagaataccatgaacatggtaaaggttcctgagtgccggct

SEQ ID NO: 185298 - DNA, 563 bp, Homo sapiens
  Payload ID: 16492
  Gene Symbol: SPOP
  Gene Name: speckle-type POZ protein
  ENST ID: ENST00000515508
  CDS Start-End: 212-563
gtgtatcggcggtcccgcaggtcccggatgttgcggacagtatgaggcaagcgcagggggacggggaccagcagctgtcgccgccgctctcaggctctgggaaccacccttctactttctgtctctaggaatttcactactctagggtgaagagggaacagaaatctttgccccctgactttggaaatctcgtttaaccttcaaactggcgatgtcaagggttccaagtcctccacctccggcagaaatgtcgagtggccccgtagctgagagttggtgctacacacagatcaaggtagtgaaattctcctacatgtggaccatcaataactttagcttttgccgggaggaaatgggtgaagtcattaaaagttctacattttcatcaggagcaaatgataaactgaaatggtgtttgcgagtaaaccccaaagggttagatgaagaaagcaaagattacctgtcactttacctgttactggtcagctgtccaaagagtgaagttcgggcaaaattcaaattctccatcctgaatgccaagggagaagaaaccaaagctatgg

SEQ ID NO: 185299 - DNA, 1134 bp, Homo sapiens
  Payload ID: 16492
  Gene Symbol: SPOP
  Gene Name: speckle-type POZ protein
  ENST ID: ENST00000509079
  CDS Start-End: 348-1134
gtgctgacgccatgacgccccggctggtgtgtgtcggtgtgtatgtgtgtgtgtgagtgtgcgcgctccgagtgtgtgtgtatttgtgtatcggcggtcccgcaggtcccggatgttgcggacagtatgaggcaagcgcagggggacggggaccagcagctgtcgccgccgctctcaggctctgggaaccacccttctactttctgtctctaggaatttcactactctagagatttcctgttagacaagacaaattagagttttcctactgacttaacttgggtgaagagggaacagaaatctttgccccctgactttggaaatctcgtttaaccttcaaactggcgatgtcaagggttccaagtcctccacctccggcagaaatgtcgagtggccccgtagctgagagttggtgctacacacagatcaaggtagtgaaattctcctacatgtggaccatcaataactttagcttttgccgggaggaaatgggtgaagtcattaaaagttctacattttcatcaggagcaaatgataaactgaaatggtgtttgcgagtaaaccccaaagggttagatgaagaaagcaaagattacctgtcactttacctgttactggtcagctgtccaaagagtgaagttcgggcaaaattcaaattctccatcctgaatgccaagggagaagaaaccaaagctatggagagtcaacgggcatataggtttgtgcaaggcaaagactggggattcaagaaattcatccgtagagattttcttttggatgaggccaacgggcttctccctgatgacaagcttaccctcttctgcgaggtgagtgttgtgcaagattctgtcaacatttctggccagaataccatgaacatggtaaaggttcctgagtgccggctggcagatgagttaggaggactgtgggagaattcccggttcacagactgctgcttgtgtgttgccggccaggaattccaggctcacaaggctatcttagcagctcgttctccggtttttagtgccatgtttgaacatgaaatggaggagagcaaaaagaatcgagttgaaatcaatgatgtggagcctgaagtttttaaggaaatgatgtgcttcatttacacggggaagg

SEQ ID NO: 185300 - DNA, 428 bp, Homo sapiens
  Payload ID: 16492
  Gene Symbol: SPOP
  Gene Name: speckle-type POZ protein
  ENST ID: ENST00000508805
  CDS Start-End: 308-428
gtcccggatgttgcggacagtatgaggcaagcgcagggggacggggaccagcagctgtcgccgccgctctcagagatttcctgttagacaagacaaattagagttttcctactgacttaacttgaaaagttcttcaggaaggtcgggcatggtgactcatgcctgtaatcccagcactttgggaggctgaggcaggaagattgcttgagctcaggagttcgagaccatcctggtcaacatgggtgaagagggaacagaaatctttgccccctgactttggaaatctcgtttaaccttcaaactggcgatgtcaagggttccaagtcctccacctccggcagaaatgtcgagtggccccgtagctgagagttggtgctacacacagatcaaggtagtgaaattctcctacatgtggaccatcaataact

SEQ ID NO: 185301 - DNA, 6025 bp, Homo sapiens
  Payload ID: 16493
  Gene Symbol: SPOPL
  Gene Name: speckle-type POZ protein-like
  Uniprot ID: Q6IQ16
  ENST ID: ENST00000280098
  CDS Start-End: 380-1558
agtcgtaactcggaagccggagcccagacgggcccgcggcgggggggtgggggctgcgcgggggcgggagtggcggaggtggccgcccctggcggcgggtttgtttatcccggggaagaagtttaggagcgggagatagggaaggagggcgggtcggggaggagggatgcggttcggcggaggcggccgccacagggacttgccgccatcacccctgctgccaccaccgcagcctcgggctcccagggcggacacggccaccgcctcagcgggagaggagtctccaccaggactgaccgctgccgcccagcacgtccaggtaaggtactcaactgtgtggggtactacataaatcctgaaagactacaataaagtggtgatgtctcgggaacccaccccacctctacctggagatatgtctactggtcccatagcagaaagctggtgttacacacaggttaaagtagtaaaattttcctatatgtggaccattaataacttcagtttttgtcgagaggaaatgggtgaagtgttaaaaagttcaacattttcatctggcccaagtgacaaaatgaaatggtgcctgagggtaaacccaaagggattagatgatgaaagtaaagactacttgtccttatatttgcttttagtcagctgccccaaaagtgaagttcgagcaaaattcaaattttcccttctgaatgctaaaagggaagaaacaaaagcaatggaaagccaaagagcatatcgatttgtgcaagggaaggactggggttttaaaaaattcattagaagggactttttgcttgatgaagctaatggtcttttaccagatgacaagcttacattattttgtgaggtgagtgtggtccaagattcagtaaacatatcaggacatactaatacaaatactttgaaggtgcctgagtgtcgtctagcagaagatttaggtaatctctgggaaaacacaagatttacagactgcagttttttcgtgagaggacaagaatttaaagctcataaatctgtgcttgcagctcgatctccagtttttaacgccatgtttgaacatgaaatggaagaaagcaaaaagaatcgagtggaaataaatgatttagaccctgaagtttttaaagaaatgatgagattcatttacacagggagagcaccaaaccttgacaaaatggctgacaacttgttggcagctgcagacaaatatgcactggaacggctgaaggtcatgtgcgaagaagctttgtgtagtaacctctcagtagagaatgttgcagatacccttgtccttgcagatttgcacagtgcagaacagttgaaagcacaagccatagactttattaataggtgcagtgtacttcgacaacttgggtgtaaagatgggaaaaactggaacagcaaccaagcaaccgacataatggaaacatcagggtggaagtccatgattcagtctcaccctcatttagtagcagaagcctttcgagcactagcatctgcacagtgtccacagtttggcattccacgcaaacggctaaaacagtcctgaaatcttccatgaacagttgaaaaatggaattgactttcactcctccaggtccagaaggattctaatacacaaaccataagcaagagttgtttctgttattttgtccacagaacagaagctgaaaaagcatattgcttgcatttcaggtggataatttatggtttattcttcagctttaaattagactgattaattcacttcaaggccttaaattatcttcaatgacttgtcttgttcatataatactttaatttttttttattgtgccttgtcattttgaccaaggctatgcaggattgcactagctccataatgcagtaatattgataactgaagatactaagtttcaaaaggatcttccattattttgcaaaaagaaaaatgaattttatagggtttgtcctatgctatctcaaagtttaagttctctttaaaagcacttgtattggagattaccagtaatatctccaatctaagttctataaatatgggagaaccctcttaccttcaaggtaagttatggcaatacactgcttcaattctaatttatttttcatttcagggggcaaatatgcaatgagttggcctagatttttagtgacatttatgatgtttgtcttgtatgttaactgtccaacaaactgtgggtttattctaagtttacaattattgagaactgattgaggttaagatttcatgaagaaagcatgtattgtgtggaagtaatttttttttaatttatactgacctacatttatacgaagaattctgtacatgttaaaagtaaggatgaccaaatgcaaatttaatgagtgggccaattaagaaagatacatatgcacttttactgtgtaacttttgtatgctgaatggtacatatatttttttgcttttgagggaattaataaggtataattaattgtgtcttaacttttcaaagaaatttttagatggaggcaactgggatgtttgtgataatagatgagaaagacatccttgattgtagttaaattggtttggattacagatattcattattgaattgactcctattttctcacactttggaaaagacacctgaacaataaatgaatcctggatagtctactctccttcaaacaattaactgatacttgcctttgggagatgcatacaaaaggagagaacccttagactatgtcaggtcacactaggaacctcccctcactccccgtttttcttcattgtgtttcagttactgtactaacattgtggatgatactgaaattctgcataatgtgaacaggataaactatttataaactgcttttcatgggccagttctttattataaatgaattttagctttaaatgcatatacacgttcagtgtttgatagttgtgttcttaagggaggtttgttctggtgcattgtcctggagaagcagaagcagtcagtgttggggtaccacatctgacttactgtggtggtgaccagtgtgcttcttaagggcaagatttatatttgaccacaagggaaaaagtgtgtcactggaaaaaaacgcatatacctatgtttgcaaacataactattcttcagattaaaatttgtataatttgtttatttaatgtttgaattcaggacaaaagaaaaaatgaagcttgaggtgttttcaaatagaccttatttttgctatctctttgttaggtgttaactgaagcaattcgaatatgtccagattcatttggattcatatttacattgaaaaaactcaactaagcatttgttatccacaacaacctagagtttaaaaagatcgtattttcacctgtcttcattactttctatgtagtttcattctttgtcgtggtaacttaaatttgaaattggaagaatctcttgggatagaagaaagattcttacctggtgatggaacttcatacttcatcctgtgtaagagtattatgggaagtagaaattcacttccttaaatccatcgtaagattgagcctcaagtttgcaatatacaattttaaaaatacacatacatacatacatatgtatacatttccagttttaagattttgcgagggtcttataagaaaacaaaaattccctcaggctatagaattatgttgtcatatatcagaaaagtactgatgtatccatttatatccaatgcgcaccacaccggcacattgtgatttaattcaccgcttgaatctatatttctaaccacagtgacttcagtaaaaataccgtataatgaacatttcagcttcttcttacttactcgagagtttattgcaaatcttaaggattttattataaagattttttttttagtttggtagcacattttgtaccaaaaatgtcaaacactgtgctgtaagaatatccatgtttgtagaaatgtccacttttcagataatataatgcctaccattatactaacagaatcatatggtagttgatttatttttttatttattatgtatatttttggtattgtgggttcttgaggcaatgataaaaacacttaatgtattctgacatgagtgctctaatagcctccttctcctcatttttaaactgcatacattactttcaaaataggtatagatactctgtcccgccttttgagctattagcctgttcctgtttccctttgtcacctaagcaaggctttttctgagaaggtagtgaatggtttcaaatgttgcatactataagaataatcattgggtaactgttgtttagaccaacacttagaaatactatatttgtgccttttcatttttaattttaatgtgtgttgatatttggagcacaaataatgaaggtgccataatatggcttgccaatgttacctccttgaatagtcatgtgtcattgtcttgaattggtaattggagaaccttgcatgaaatatgtgatcgtgtgtgtgtgtgtgtatgcgcgtgtgtgtctgtgtgtttgtgtacatacctgtatttgcttggggcttgtgtgtggtatgttacaaagagtgaatttctggaaatagaaatcagttaaatgttgaaagttcaggttagcagaaatatttcatttaaatatgctttactttggaggacaattgattaacagaggaaatgataattttcaaaaatgtgatcaatttactgcatgatgaaatgtgaaaacagtgcctttttaggacatcaattataataaaattgttttaaaatattaacaaagatctcaaaaagttgtcatgaacattattcatttatttttaaactggatctaaataagagcttagatggccaaaattagaattaataatatacccatttaaattttgttcataaatttaaaatcttaatcagaattctttataaaatgtgggtcatagatatgacccagtgttactaaaatagaacagggattgtgaaaatccagctcaacatacttaagtatacttggcttagagccaagtatacttgaagaggtgaattattctgacttggacatgcatgctctttgatggataaaataaaaatattcaatttattcttacaaaagaaggtgggtgggtgagtgggttcgttttagtgttctcagattataaagacagctataaagacagcactttccgcacacaaagtgtattttacaaaccttttttatacaaattaatgagctctactttatttaagtgttcatggaatgatgtaaattttaggtccagttgaacaaatattgagtgcctatcatatgcaagactaactccttactaggaatgaaatcacacagtgtcttctgtttgcagtatgtgaactttatgtttgaaaagaaattattatatttaaatttttttgttgtcagagtttatcattgtatactgtaacccagtaaattttgcattcagttttaaaaaatgaagatgtaacttacctgagtctcatttttgaaaatgaaattctgcaaaaattatttaaaaattagttcttggggaaattgattttcaagattcaagtgtataaaaacttatattgaacttttcagcctcgtttttaattagctgatgttaatgataagatacataatacatgtatcttgttgctgaaaatattttttgcatttcaacacattgagttaaaataaagttgttactacttattcaagattaattggcttatcttgtgtttatttgaagaatacatactcttctttttcaggttggtatgatgctttgcaaaagagccatgtatttgatacggtaaatcatgcatagtaattgtcttttctacataggggagctcttgttttttggaaccaattgaagacattcttaactgtaaaatattaatatgcatttattttaatatgtatgaaccatcaatactggatgacttattctaatgctacgtaccattaatgtaacagagatcaccttttccctgtcattcctatcctgtcttaatttcagttatcccagacaa

SEQ ID NO: 185302 - DNA, 1386 bp, Homo sapiens
  Payload ID: 16493
  Gene Symbol: SPOPL
  Gene Name: speckle-type POZ protein-like
  ENST ID: ENST00000420679
  CDS Start-End: 61-633
gtaaggtactcaactgtgtggggtactacataaatcctgaaagactacaataaagtggtgatgtctcgggaacccaccccacctctacctggagatatgtctactggtcccatagcagaaagctggtgttacacacaggttaaagtagtaaaattttcctatatgtggaccattaataacttcagtttttgtcgagaggaaatgggtgaagtgttaaaaagttcaacattttcatctggcccaagtgacaaaatgaaatggtgcctgagggtaaacccaaagggattagatgatgaaagtaaagactacttgtccttatatttgcttttagtcagctgccccaaaagtgaagttcgagcaaaattcaaattttcccttctgaatgctaaaagggaagaaacaaaagcaatggaaagccaaagagcatatcgatttgtgcaagggaaggactggggttttaaaaaattcattagaagggactttttgcttgatgaagctaatggtcttttaccagatgacaagcttacattattttgtgagaatctccagcactgcttgcagaagaggaggaagcattgcactacccttcctaaagaactgcctcctccccctcccctgcaagtggtgctgtagacaggtgagtgtggtccaagattcagtaaacatatcaggacatactaatacaaatactttgaaggtgcctgagtgtcgtctagcagaagatttaggtaatctctgggaaaacacaagatttacagactgcagttttttcgtgagaggacaagaatttaaagctcataaatctgtgcttgcagctcgatctccagtttttaacgccatgtttgaacatgaaatggaagaaagcaaaaagaatcgagtggaaataaatgatttagaccctgaagtttttaaagaaatgatgagattcatttacacagggagagcaccaaaccttgacaaaatggctgacaacttgttggcagctgcagacaaatatgcactggaacggctgaaggtcatgtgcgaagaagctttgtgtagtaacctctcagtagagaatgttgcagatacccttgtccttgcagatttgcacagtgcagaacagttgaaagcacaagccatagactttattaataggtgcagtgtacttcgacaacttgggtgtaaagatgggaaaaactggaacagcaaccaagcaaccgacataatggaaacatcagggtggaagtccatgattcagtctcaccctcatttagtagcagaagcctttcgagcactagcatctgcacagtgtccacagtttggcattccacgcaaacggctaaaacagtcctgaaatcttccatgaacagttgaaaaatggaattgactttcactcctccaggt

SEQ ID NO: 185303 - DNA, 558 bp, Homo sapiens
  Payload ID: 16493
  Gene Symbol: SPOPL
  Gene Name: speckle-type POZ protein-like
  ENST ID: ENST00000430968
  CDS Start-End: 249-467
ggagatagggaaggagggcgggtcggggaggagggatgcggttcggcggaggcggccgccacagggacttgccgccatcacccctgctgccaccaccgcagcctcgggctcccagggcggacacggccaccgcctcagcgggagaggagtctccaccaggactgaccgctgccgcccagcacgtccaggtaaggtactcaactgtgtggggtactacataaatcctgaaagactacaataaagtggtgatgtctcgggaacccaccccacctctacctggagatatgtctactggtcccatagcagaaagctggtgttacacacaggttaaagtagtaaaattttcctatatgtggaccattaataacttcagtttttgtcgagaggaaatgggtgaagtgttaaaaagttcaacattttcatctggcccaagtgacaaaatgaaatgtcagctgccccaaaagtgaagttcgagcaaaattcaaattttcccttctgaatgctaaaagggaagaaacaaaagcaatggaaagccaaagagcatatcgatttgtgcaa

SEQ ID NO: 185304 - DNA, 26584 bp, Homo sapiens
  Payload ID: 16494
  Gene Symbol: SYNE1
  Gene Name: spectrin repeat containing, nuclear envelope 1
  ENST ID: ENST00000341594
  CDS Start-End: 654-25832
cccgggcagtggaaaccgtgggcaaaagttagctggcaggacagcgcagctcctccaggcagcggaggcagcgcgtcccggctctcagggacatttccttcccacctcgacccccgggaggtggtcccggtataaaggctcgctgagcgggtgggtcacagcacagctttgcagctgcggagaaacgcccaaggccgtgcatctccaggagggcggctgggctcccgcagtcctgcagaccgcgcccgatcccggcgacagggcgggcggacagccgcgcatccccggggtcccgccgagcctgggcgcagagagccgggaggaagcgttcgctcgcttcgccttgctgctgggaaactgaacgaggccgagagagaaggttcttgagttcatgtaagaggacagtcttaaaacggaagaagaaaaagaagcagttcagtctttgggagagctgcctccttgttgagtgctgcaaaggcctggaattcatttatgacagaatagatctagaaaagtccaagcatgttttctagagtggtgtagccctgtgctgcctccagtgaagagtctcttggtgttggcttcgtgcttccggagggaccatggcaacctccagaggggcctcccggtgtcctcgggatatcgccaatgtgatgcagaggctgcaagatgagcaagagatagtacaaaaacgaactttcacaaaatggatcaactctcatctggccaagcggaaacctccaatggtggtggacgatctttttgaagacatgaaagatggtgttaaactgcttgcccttctggaggtcctgtctgggcagaaactgccttgtgaacaaggacgccggatgaagcgaatccatgctgtggctaacattggcacggcactcaagttcctcgaaggaagaaagattaaattagtcaacattaactccaccgatatagctgatggccgaccctcaatagttcttggattgatgtggaccattattctatatttccagattgaagagttgaccagcaacctgccccagctccagtctttgtccagcagcgcatcctccgtggacagcatagttagctctgagactcccagcccaccaagtaaacggaaggtgaccaccaagatccaaggaaatgctaagaaggctttattaaagtgggttcagtacacagctggcaagcagactggaatagaagtaaaagattttgggaagagttggagaagcggggttgcctttcattcagttattcatgccattcgaccggaattggtggacttggagacagtgaaaggcagatccaaccgagaaaatttggaggatgctttcactatcgccgaaacagaactggggatcccaagactgctagatcctgaagacgttgatgtggataaaccagatgagaaatctattatgacctatgtagcccagtttctgaaacattatcctgacatccacaatgcaagcactgatgggcaagaggatgatgaaatacttccaggtttcccatcttttgcaaattctgtacaaaattttaagagagaagacagagtaatttttaaggaaatgaaagtttggatagaacaatttgagagagatttgacaagagcacagatggtggaatcaaatttacaggataaatatcagtcatttaagcacttcagagttcaatatgaaatgaagaggaaacagattgaacatttaatacaaccattacacagagacggtaaattgtcacttgaccaagcattggtaaaacaatcttgggatagagtgacctccaggctctttgactggcatatacagcttgataaatctcttcctgcacctctgggcaccataggtgcctggctgtacagagcggaggtggccctgagagaggaaataaccgttcaacaggtccacgaggaaacagcaaacacgatacaacggaaacttgagcaacataagagaaaatgccagacaatcatggatctgcttcaaaacacggatgcccacaaaagagcattccatgaaatctaccggaccaggtctgttaacgggattccagtgccacctgatcaattagaggacatggccgagaggtttcattttgtttcctccacatcagagctacacctaatgaaaatggaatttttagaattaaagtaccgtctgctctcactgctggttcttgcagagtcaaagctgaagtcttggatcattaagtacgggaggagagagtcagtggagcagcttctacaaaactacgtgtcttttatagaaaatagcaagttctttgaacaatatgaggtgacataccagatcttgaaacagacagctgagatgtatgtcaaagcagatggttcagtggaagaagctgagaatgtgatgaaattcatgaatgaaaccaccgctcagtggaggaatctctcagtagaagtgaggagtgtgaggagcatgctggaagaagtgatctctaactgggatcgctatggcaatacagtggctagtctgcaagcctggctagaggatgctgaaaaaatgctcaatcaatcagaaaatgccaaaaaggatttttttcgaaatttacctcattggattcagcagcatactgccatgaacgatgctggcaattttctaattgaaacctgtgatgagatggtttcccgtgacctgaagcagcaattactgttgctaaatgggcggtggagggagttgtttatggaagtcaagcaatatgctcaagctgatgagatggacagaatgaagaaggaatacacagactgtgttgttaccctgtctgcttttgcaacggaagcccataagaaactttctgaacccttagaagtctcttttatgaatgtcaagctattaattcaagacttggaggatattgagcagagggtgcctgtgatggatgcccaatacaagataattacaaagacagcacacctcattaccaaagaaagcccccaagaagaaggaaaagaaatgtttgcgaccatgtcaaagctcaaagagcagctaaccaaggtcaaagaatgttactccccactcctttatgagtctcagcagctgttgattccgttggaggaattagaaaagcagatgacgtccttttatgactcacttgggaaaatcaatgaaattatcacagttcttgagcgtgaggcacaatcgagtgccctttttaaacaaaaacatcagttgaggatactgaaatgcaaatggtgtaattcaagccaaaaaatgaccctctgccttgtgctgggctcaatgatttccatgctgtctactgccaaaatcacaattgcaggctacaagtcagaggtggaggtgtctgaactgttagcttgtcaagaaaactgtaagaaaaccttgacacttattgagaaaggcagtcaaagtgttcaaaagtttgtgaccttgagcaacgtgttaaagcattttgatcagacgaggctacaaacagattgcagatattcatgttgcttttcagtaatgagaaagcagcatcacattatgattgtttttcacatcaagagtatggtaaagaaaactggagattggaagaagcatgtggaaaccaacagtcgcttgatgaagaagtttgaggagtctcgagcagagttggagaaggtactgcggattgctcaggagggcctggaggaaaagggggatccagaggagctcctgcggagacacactgagtttttcagtcagctggatcagagggtgctcaatgctttcctgaaagcttgtgatgaactcaccgacatccttccagagcaggagcagcaggggctgcaggaagctgttcgaaagctccacaaacaatggaaggatcttcaaggagaagccccttatcatttgcttcatctgaagattgatgtggagaagaataggttcttagcctctgtagaagaatgcagaactgagctggatcgagagaccaagctgatgccccaggaaggcagtgaaaagataattaaagagcacagggttttcttcagtgacaaaggtcctcatcatctctgtgagaaaaggttacagctcatcgaggaactctgtgtgaaactcccagtgcgggacccagtaagggacacacctggaacctgtcacgtgactctcaaagagctcagagctgccattgacagcacctacaggaagctcatggaagacccagacaagtggaaggactacactagcagattctctgagttctcatcttggatatctacaaatgagacacaattaaaggggatcaagggtgaggccatcgatactgccaaccacggagaggttaaacgtgccgttgaagagatcagaaatggtgttaccaaaaggggtgagaccctcagctggctgaaatccaggctgaaagttttgacagaagtttcttctgagaatgaagcccaaaagcagggagatgagctggcaaaattatccagctctttcaaggctcttgtgacgctgctgtcagaggttgaaaagatgctaagcaattttggggactgtgtccagtacaaagaaatagtcaaaaattctctcgaagaattaatttctggctctaaagaagtccaggaacaagctgagaagatcttggatactgaaaatctgtttgaagcacagcagttacttcttcatcaccagcaaaagacaaagcggatctcagcaaagaagagagatgtgcagcagcagatcgcgcaggcgcagcagggagaaggggggctgcctgaccgaggccacgaggagctgcggaagctggagagcacactggatggcctggagcgcagccgggagaggcaggaacgccgcatccaggtcacattaagaaaatgggagcgatttgaaacaaacaaagaaacagtagtaagatacctttttcaaacaggttccagtcatgaacgcttcttgagttttagcagtttggaaagtttatcttcagaactggaacaaacaaaggagttttctaaacggacagaaagtattgcagtccaggctgagaaccttgtaaaggaagcttcagagataccgcttgggccccaaaataagcagctgcttcaacagcaggccaagtcaatcaaagaacaagtcaaaaaattagaagacacgcttgaagaagagtatgtgattgacaataaaaccatggaaatggtgaaaaccaagtgggatcattttggcagtaattttgagactctgtccgtctggataactgagaaagaaaaagaactcaatgccttggaaacttcgtcatctgccatggacatgcaaatcagccaaattaaggtcacaattcaggaaatagaaagtaagctcagcagcattgtaggattagaagaagaagcccagtcttttgctcagtttgttaccactggagaatctgctcgaattaaagccaagttgacacaaataagaagatacggggaagagcttcgagagcatgcacagtgtctggaaggaacaatcctgggacatttatctcagcagcaaaagtttgaagagaaccttagaaagatccagcaatctgtgtctgaatttgaagataaacttgctgttccaattaaaatatgttcttcagctacagaaacatacaaagttcttcaagaacatatggatctctgccaggccctggagtcactgagcagcgcgatcactgccttctcagccagtgccaggaaggttgtgaacagagattcctgtgttcaggaggctgcggctctacagcagcaatacgaggacatcctaaggagggcgaaggagagacagacggcgctggagaatctgctggcccactggcagaggctagagaaagaactatcatcctttttgacctggttagagcggggtgaagctaaagccagttccccagaaatggacatttctgcagacagagtcaaagtggaagcctccaaagatgatgtgaaaatgatgaaactacatttggagcagttggatgagagatggagagatttaccacagatcattaacaaaaggattaattttcttcagtctgtggttgctgaacaccagcaatttgatgagctgctgctttccttttctgtctggattaaactgtttctcagtgaattacaaactacctctgagattagcataatggaccatcaagtagcccttactcggcataaggaccacgcagcagaagtagagagcaaaaagggcgaattgcagagtctgcagggtcacttagcaaagttgggttctctgggccgtgctgaggacctccacctcctgcagggaaaggctgaggactgcttccagctgtttgaggaggccagccaggttgtggagaggcggcagcttgccctgtcccatttggcagaattcctccagagccatgcctctctgtccggcattctccgccagctgaggcaaacagtggaagcaaccaacagtatgaataagaacgagtctgatttgatagaaaaggacctcaatgatgctcttcaaaatgctaaagcattagaatctgctgccgtcagtctggatggcattctttccaaagcccaataccatctgaaaatcgggagctctgagcaaaggacttcctgcagagccacggctgatcagctctgtggagaggtagagaggatccagaaccttctgggaaccaagcagagtgaggcagatgctctggcagtgttgaaaaaagcattccaagaccagaaagaggagcttctgaaaagcattgaggacattgaagaaaggactgacaaagagcgattgaaagaacctacccgccaagctcttcagcagaggttaagagtgtttaatcagctagaagatgaattgaattctcacgagcatgaactatgttggttgaaagacaaagccaagcaaattgcccagaaagatgtagcttttgcacctgaagttgacagggagataaaccgcttagaggtcacctgggatgataccaaaagactaattcatgaaaatcagggtcagtgctgtggacttattgacttaatgagagaatatcagaacctgaaatcagctgtatctaaagtcttagaaaatgccagcagtgtgattgtaaccagaactaccataaaagatcaggaggatcttaaatgggctttttccaagcatgaaactgccaagaacaaaatgaattacaaacagaaagacttggataactttaccagcaaaggaaaacacttgttatctgagctgaagaaaattcacagtagtgatttcagcttggtgaaaacagacatggagagcaccgtggacaaatggctggatgtatcagagaaacttgaagaaaacatggataggctgagagtaagcctgtccatttgggatgatgtactgtcaactagagatgagattgagggatggtcaaacaactgcgttccacagatggcagaaaacatcagcaacctggataaccacctcagagctgaagaactgcttaaagaatttgagtctgaagttaaaaacaaagcattgagattggaagaactgcattccaaagttaatgatctgaaagaattaactaaaaatctagaaacaccgccagaccttcagtttatagaagcagacttaatgcagaaactggagcatgccaaagaaataactgaagtagcaaaaggaaccctgaaggatttcacggctcaaagtacacaagtggagaagtttattaatgacataacaacatggttcacaaaagtggaagaatcgttgatgaactgtgcccaaaatgagacttgtgaagcattgaaaaaagtcaaggatatacaaaaagaacttcaaagtcaacaaagcaacatcagctctacccaagaaaatctcaatagcttgtgccgcaagtaccactcagctgagttggagagcctgggccgtgcaatgactggtctgataaagaaacatgaagccgtgagccagttgtgctccaaaacccaggccagcctgcaggaatctctggaaaaacacttcagtgaagagtctatgcaggaattccaagaatggtttttgggagcaaaggcagcagcaaaagaatcatcagatcgcaccggtgacagcaaagttctagaagcaaagctccatgatcttcagcagaacattttggactcagtcagtgatgggcagagcaaacttgatgcagtgactcaagaaggacaaactttgtatgcacatttgtctaaacaaattgtcagtagcattcaagaacaaatcacaaaggccaatgaagagtttcaagcatttctgaaacaatgccttaaagataagcaggctcttcaagactgtgcttcagaacttggaagctttgaagatcagcacagaaaactgaacttatggatccatgaaatggaagaaaggttcaatacggaaaacttgggagagagtaaacagcacattcctgagaagaaaaatgaagttcataaagttgaaatgtttttgggagaactgctggctgcaagagagtctcttgataagctttcccagagagggcagcttctgagtgaagaaggccacggtgctgggcaggagggccgcctgtgttcccagctcctcacaagccaccagaacctacttagaatgaccaaagagaaactccggagctgccaggtggcccttcaggagcacgaagccctggaggaagcactgcaaagcatgtggttctgggtgaaggccattcaggacagactggcctgtgcagagagcactcttgggagcaaagacaccctggagaaacggctgtcacaaatacaggatattctcctgatgaaaggtgaaggggaagttaagttgaatatggccattggcaagggggaacaggccttgagaagtagcaacaaagaaggtcagagggtgattcagactcagttagagacccttaaagaagtgtgggctgacatcatgagctcctccgtccacgctcaaagcactttagagtctgtgattagccaatggaatgactatgtagagaggaaaaaccagttggagcagtggatggaatcagtggatcaaaaaatagaacatcccttacaaccacagccaggtctgaaagagaagttcgtcctgcttgaccacctccagtccatcctgtctgaggcagaagatcacacgagagcccttcaccgtctaattgcgaagtccagggagctctacgaaaagacagaggatgagtctttcaaggacacagctcaagaggagctgaaaacacagtttaatgatataatgactgttgccaaggaaaaaatgaggaaagtggaagagattgtgaaagatcatctaatgtatttagatgcggtccacgagttcacagattggctccattcagcaaaggaagaacttcaccggtggtcagatatgtctggagattcatcagccacccagaaaaagttatcaaaaattaaggagctgatagattccagagagattggtgcaagccgtctcagcagagtggagtcgctggctcccgaagtgaaacagaacacaactgccagtgggtgtgagctcatgcacacggagatgcaggccctgcgtgccgactggaagcagtgggaagacagtgtattccaaacgcagagctgtttggagaacctggtcagccagatggccctttcggagcaggaattctcaggccaagtggctcaactggagcaggccctggaacagttcagtgcccttctgaaaacctgggctcagcagttaaccctcctggaaggcaagaacacggatgaggagatagtggaatgctggcacaaaggacaagagatactggatgctttgcaaaaagcagagcctagaacagaggatctcaagtctcagctgaatgaactttgtcgattttccagagacctgagtacctacagtggaaaagtttctggcttgattaaagagtataattgtctttgtttgcaagcatccaagggctgccagaataaagaacagattttacagcaaagatttcgaaaggccttcagggatttccagcagtggttggttaatgcaaaaatcactaccgccaagtgttttgatatacctcaaaatataagtgaagtttcaactagtcttcagaaaatacaggagtttttgtcagaaagtgaaaatggacagcacaagctaaacatgatgctgtctaaaggggaacttctgagtaccctgctgaccaaagagaaagcgaaagggatccaggccaaagttacagctgcaaaagaagattggaaaaattttcattcaaatctccaccaaaaagaatctgctctagagaatctaaagatccaaatgaaggactttgaagtaagtgctgagcctatccaggactggctgagtaaaactgagaagatggtccatgaaagcagcaatcgcctctatgatctgccagcaaagaggagggagcagcagaagctccagtctgtccttgaggaaatacactgctacgagcctcagctcaacaggctgaaagagaaagctcagcagctgtgggaaggacaagctgccagcaagagctttaggcacagagtgtcgcagctgtcttctcagtatctagcgctaagcaatttaacaaaggagaaagtgtcaagactggatagaatcgttgcagaacacaatcagttctctcttgggattaaagaattacaagactggatgacggatgcgattcacatgctggattcatactgccacccgacatccgacaaaagtgtgctggacagcaggacgctcaagctcgaggctctattatcagtcaaacaggaaaaagagattcagatgaaaatgatagtgaccaggggagaatctgtccttcagaatacttctccagaaggcattcccactattcagcagcagctgcagagtgtgaaggatatgtgggcatcccttttgtctgcagggattcgttgtaaaagggtgaggctcccctgtgcctatattgccctcaaactgagagtacatcagcatgcggagctgcgggataaaacaacgatgctcggaaaagccaaggaagccgtaaccaagtctgaaaaacttgtccgcctgcaccaagagtatcagagagacctaaaggcatttgaagtttggttggggcaagaacaagaaaagctcgaccagtattcagttcttgaaggtgatgcccacactcatgagacaacattgcgtgatcttcaggagctacaggtacactgtgcagaggggcaggccctgttgaactcagtgctgcacaccagagaggatgtgatcccatcaggtatcccacaggcagaggaccgggctttagagtctctccggcaagactggcaggcttaccagcacaggctgtccgagactcgaactcagttcaataacgtggtgaacaaattgaggctaatggagcaaaagtttcagcaagtagatgaatggctcaaaacagcagaggagaaagttagtcccaggaccagacgtcagtctaacagggcaaccaaggagatacaattacatcagatgaagaagtggcacgaagaagtgactgcatacagagatgaagttgaggaagtgggagctagagctcaggagatactggacgagagccacgtgaacagcagaatgggttgccaggccacccagctgacttccagataccaggccctgcttctccaagtgctggaacaaataaaattcctggaggaggagattcagagtttggaggaatcagaatcatccctcagttcctattctgattggtatggctctactcataaaaacttcaagaatgtggctaccaagattgacaaagtagatacagtaatgatggggaagaaattgaagacgttggaggttttgctcaaagacatggagaaaggtcacagtttgctgaaatcagcccgggagaaaggagagagggctgttaaatacttggaggaaggcgaggcagagaggttaagaaaggagattcatgatcacatggagcagttgaaggaactgaccagcactgtccggaaagaacacatgacgctggaaaaatcacttcaacaaacggtgctgtcccatgaaccatcagtaaagtcagtgagagagaagggtgaagctcttttggaactggtgcaggacgtcactttaaaggacaaaatagatcaacttcaaagtgattaccaggacctgtgcagcataggaaaggagcatgtcttcagtctggaggcgaaagtcaaagaccatgaagactacaacagtgagctccaagaggtcgaaaagtggctgctgcagatgtctggcagactggtggcacctgacctcctggagacaagcagcctggagacaatcacccagcaattggcccaccacaagatgtaccagagtttggaacacgaacttcagaagcacgtcagccgacaagacaccctgcagcagtgccaggcctggctttctgcagtccagccggatttagagccaagtcctcaaccacctcttagtagggcagaagccattaagcaggtcaaacacttcagagctttgcaagagcaggcaaggacctacctagatctcctttgctccatgtgtgacctgtcaaatgcttcggtgaaaaccacagcaaaagacattcaacaaacagagcaaacgattgaacaaaagcttgtccaggcccagaacttaactcagggctgggaagagatcaagcacctgaagtctgagctctggatttacctgcaagatgctgatcagcaactgcagaacatgaagaggaggcactctgagctggagctgaacattgcacagaacatggtttcacaagttaaggattttgttaagaaactacagagcaaacaggcatccgtgaacaccataatagaaaaggtgaataagttaacaaagaaggaggaatcgcctgaacacaaggaaataaatcatttaaatgatcagtggctcgatttgtgccgtcagtctaacaacctgtgcttgcaaagggaagaggatcttcagagaacaagagattaccatgactgtatgaatgttgttgaagtgttcctagaaaaatttactacagaatgggataacttggccagatctgatgcagagagtacagctgtccacctggaagctttgaaaaagttagcattggcattgcaggagagaaagtatgctattgaagatctgaaagatcaaaagcagaaaatgatagagcatctgaatttagatgacaaggagttagtcaaagaacagacgagtcatttagagcaacgttggtttcagcttgaggacctcattaaaaggaaaatccaagtgtcagtcaccaacttggaggagttaaatgtggtgcagtccagatttcaggagctaatggagtgggcagaagagcaacaacccaacatcgccgaggcccttaagcagagccctcctccagatatggctcagaaccttctcatggatcacctggccatctgcagtgaactggaggccaagcagatgctcctgaaatcgcttataaaggacgcagacagggtcatggcagatcttggtctcaatgagcgacaggtcatccagaaggctctctctgatgcacaaagccacgtgaattgtctcagtgacttagtgggccagcgaagaaagaagcattttaaggaagattttgataaagcttgccactggctaaaacaagcagatattgttacatttcctgaaatcaacctaatgaatgagagttctgagcttcatacacaactggctaaataccaaaacattcttgaacaatctccagaatatgaaaatcttctacttacgctgcagagaactgggcagaccatattaccatcgctgaatgaagtcgatcattcctacctcagtgaaaagctaaatgctttgcctcgacaatttaatgtaattgttgccttggctaaagacaagttctataaagtccaggaagcaattcttgctcggaaggaatatgcttccttgattgagttgacaacccagtctctgagtgaacttgaagcccaattcttgaggatgagcaaagttcccaccgacctggccgttgaggaggctctttctctgcaagatggttgcagagccattctggacgaggtggcgggccttggggaggcggtggatgaactgaaccagaaaaaagaaggttttcgcagcacaggtcagccttggcagccagacaagatgctgcaccttgtcaccttatatcacaggctgaagcgacaaacagaacagagggttagcttattagaagacaccaccagtgcttaccaagaacacgagaagatgtgccaacagctggagagacaactgaagtctgtaaaagaggagcagtccaaagtgaatgaggaaacgctgcctgcagaggagaagctcaaaatgtatcactccctggcaggaagtctccaggactcagggattgtactgaaacgagtaaccatacatcttgaagatcttgccccacaccttgaccccttggcttatgagaaagccaggcatcagatccagtcctggcaaggggagttaaaactgttgacttctgccattggtgagacggtgacagaatgtgagagccgaatggtgcagagtatagacttccagactgagatgagtcgctccctggactggctgaggagagtgaaggcagagctcagtgggccggtgtacctagacctcaacctgcaggacatccaagaggaaatcagaaaaatccaaattcatcaggaagaggtccagtccagcttgagaatcatgaatgcgctgagtcacaaggaaaaggagaagttcacaaaggccaaggagctgatttctgcggatttagaacacagcctcgctgagctctcagagctggatggagacatccaggaagccttacgcaccagacaggctaccttgactgaaatatatagccagtgtcaaaggtattatcaggtatttcaagcagccaatgactggcttgaggatgcccaagaattgttacagctggcaggcaatggcctagacgtggagagcgcagaggaaaatctcaaaagccacatggaatttttcagtacagaggatcagttccatagtaacctggaggagctccacagcctggtagccaccctggacccactcatcaagccaaccggcaaagaagacctagaacagaaagtggcttctctggaactcaggagccagaggatgagccgggactctggtgcccaagctttagtgtcagtggttaactctttccatgagaaaattgtggcccttgaggaaaaagcttcacaactggagaaaaccggaaatgatgccagcaaagccaccctgagcaggtcaatgaccaccgtctggcagcgctggacacgccttcgagctgtggcccaggaccaggagaagatcctggaagatgcagtggatgagtggacgggctttaacaacaaggttaaaaaggccactgaaatgattgatcagctgcaagataagttacctggaagttcagcagagaaagcatcgaaagcagagctcttaactcttcttgaataccacgacacgttcgttctggagctggagcagcagcagtcggccttgggcatgctgcggcagcaaaccctgagcatgctccaggatggagccgccccaacccctggggaagagcctccgctcatgcaggaaatcaccgccatgcaagatcggtgcctgaaaatggtggagactcagatcaattctgtgaaatgttgggttcaggaaacgaaagaatatttagggaatccaacaatagaaatagatgctcaacttgaagaacttcagattctcctaacagaagccacaaatcaccgacagaacattgaaaaaatggcagaagaacagaaggagaagtacttaggtctttataccatattaccttctgaactctcccttcagttggctgaagtggcgttagatctaaagatccgagatcagatccaagacaaaataaaagaagttgagcagagcaaggccacgagccaggaactcagccggcaaattcagaagttagctaaagacctcacaactattctaactaagctgaaagcgaagacagataatgtagttcaagctaaaactgaccaaaaggcagcatcacatttagaagaatacaatgaaatgcttgaattaattttgaagtggattgaaaaagctaaagtcttggctcatggaactattgcatggaattctgcaagccagcttcgggaacaatatattttgcatcagaccctgctagaagaatccaaagaaattgacagtgagctggaagcaatgactgagaaattacagtacctcactagcgtgtactgtacagaaaaaatgtctcagcaagtggcagaactgggacgggagactgaggagttgcgacagatgatcaaaattcgtttgcagaacctccaagatgcagctaaggatatgaaaaaatttgaagcagagttgaaaaagttacaagctgccttggagcaagcccaggcaacactgacttctccagaagttggacgtctcagtctcaaggagcagctctctcatcggcagcatttgttgtctgagatggagtcactgaagccgaaggtgcaagcagtgcagctctgccagagtgccctccggatccccgaggatgtggttgccagcttacctctctgtcatgctgctctgcggctgcaggaagaggccagccggctgcagcacaccgccatccagcagtgtaacatcatgcaggaagctgtggtacaatatgaacaatatgagcaagaaatgaaacatctccagcaactgatagaaggagctcacagagagattgaggataaacctgttgccaccagtaacatacaggagctgcaggctcagatttctcggcatgaggagctggcgcagaaaattaagggctaccaggagcagatcgcttctttgaattccaagtgcaagatgctgacgatgaaagccaagcacgccaccatgctgctgacggtgaccgaggtcgaggggctggcggaagggacagaggacctggatggggagctcctccccacgccttcggcccacccctctgtggtcatgatgactgcaggtcgctgtcacactttgctgtcaccggtcactgaggagtctggggaggagggaaccaacagtgagatttcctctccacctgcctgtcgctccccttcacctgtggctaatacagatgcttctgttaaccaggacattgcatattaccaagccttgtctgctgagaggttgcagacagatgctgcaaaaattcaccccagcacatccgcatcccaggagttctatgaaccgggattggagccatccgctactgccaaactgggtgatttgcagcgttcttgggaaaccttaaagaatgtgatcagtgagaagcagcgcacactctatgaagctttggaacgccagcagaagtaccaggactccctccagtccatctctacgaagatggaggccattgagctgaaactcagtgagagcccagagcctggcaggagtccagaaagccagatggctgaacatcaggcattgatggatgagattctcatgctccaggatgaaatcaatgagctccagtcctctctcgcagaggagctggtatccgagtcttgtgaggccgaccctgcggagcagctggccttgcagtccacgctcactgtcttagccgagcgaatgtccaccatcaggatgaaagcctcggggaaacggcagcttttggaggagaagttgaatgatcagctggaggaacaaaggcaggaacaggccctgcagaggtatcgctgtgaagccgatgagctggacagctggctcttgagtaccaaggccactctggacactgcgctgagtccacccaaggagcccatggacatggaggcccagcttatggactgccagaatatgctggtggaaatagagcagaaggtggtggctttatcagaactgtcagtccacaatgagaacctgctgctggagggcaaagctcacaccaaggacgaggccgagcagctggctggaaagctgagaaggctcaaggggagcctgctggagctgcagagagccctgcatgataagcagctcaacatgcagggaacagcacaggagaaggaggagagcgatgttgacctaacagccacgcagagccccggcgtccaggaatggctggcccaagctcgcaccacatggacccagcagcggcagagcagtctccagcaacaaaaagagttagaacaggaattagccgagcagaagagtctccttcgctcagtagccagtcgtggagaggagattctaattcaacattcggcggcagagacctctggtgatgctggcgaaaaacctgatgtgttatcccaggagttggggatggaaggggagaaatcatccgctgaagaccagatgagaatgaaatgggaaagcctacatcaagaatttagtaccaagcagaaactactacagaatgttctggaacaggaacaagagcaagtgctttatagcaggccaaatcgactcttgtctggtgtgccactgtacaaaggggacgtgccaacccaagataaatctgcagttacatctttgctggatggactgaaccaagccttcgaggaggtttcatcccagagtggaggggcaaagaggcagagtatacacttggagcagaagttgtatgatggagtctcagccacctctacttggttggatgacgttgaagaacgtttatttgttgccacagcacttttaccagaagaaacagagacttgtctcttcaaccaagagattcttgccaaagacattaaggaaatgtctgaagaaatggataagaacaaaaacttgttttcccaagcttttccagagaatggtgataatcgagatgttattgaagatactttgggttgtcttttgggcaggttatccttgctagactcagtagtgaatcaacgatgtcatcagatgaaagaaagacttcagcaaatactaaatttccagaatgatctgaaagtgctgtttacatcactggctgacaacaaatacatcattctgcaaaaactggcaaatgtgtttgaacagcccgtagcagaacaaatagaggcaatacaacaggctgaagatggactcaaagaatttgatgcaggaatcattgaattaaagaggcgtggtgacaagctacaggtcgagcagccgtccatgcaagaactctccaagctccaggacatgtatgatgagctgatgatgatcattggctcccggaggagtggtctgaatcagaaccttacactcaagagtcagtatgagagggccctacaagatctggctgacctgctagaaactggtcaggagaagatggcaggagaccagaaaatcatcgtgtcttccaaagaggaaatccagcaactacttgacaaacataaggaatactttcagggcctggaatctcatatgatcttgactgaaacactcttcagaaagataatcagctttgcagtccaaaaggaaacccagttccatacagagctgatggctcaggcttctgctgtactgaaacgggctcacaagaggggtgtggagctggagtacattctagagacgtggtcccatctggatgaggaccagcaggagctcagcagacagctggaggtggtggaaagcagcatcccaagcgtgggtctggtggaggagaacgaggacaggcttattgaccgcataacactctaccagcatttaaaatctagccttaatgaataccagcccaaattatatcaagtattagatgatgggaaacgacttctgatatccatcagctgctcagatctagaaagccaactaaatcaacttggagagtgctggctaagtaacaccaataaaatgtctaaggaacttcacagactggaaacaatattgaaacactggaccagatatcaaagtgaatctgcagatctaattcactggttacaatctgcaaaagaccggctagaattttggactcagcaatctgtgacagtcccacaagagctggaaatggtccgtgatcatctaaatgctttcctggagttttctaaagaagtggatgcccaatcttccctgaaatcatctgttctgagtactggaaatcagctccttcgactaaaaaaggtggacacagccacgctgcgctctgagctgtcgcgcattgatagccagtggactgacctgctaaccaatatcccagccgtccaggagaagctccaccagctccagatggataaactgccttcccgccatgccatttctgaagtcatgagttggatttctctaatggaaaatgttattcagaaggatgaagataatattaaaaattccataggttacaaggcaattcatgaataccttcagaaatataagggttttaagatagacattaactgtaaacagctgacagtggattttgtgaaccagtccgtgctacaaatcagcagtcaggatgtggaaagtaagcgtagtgataagactgattttgctgagcaacttggagcaatgaataaaagttggcaaattctgcaaggtctagtaactgagaagatccagctgttggaaggcttattggaatcttggtcagaatatgaaaataatgtacaatgtctgaaaacatggtttgaaacccaggaaaagagactaaaacaacagcatcgaattggagatcaggcttctgttcaaaatgcactgaaagactgtcaggatctggaagatttgattaaagcaaaagaaaaagaagtagagaaaattgagcagaatggacttgctttgattcagaacaagaaagaagacgtctctagcattgtcatgagcacactgcgagagctcggccaaacctgggcaaatttagatcacatggttggacaattaaagatactgctgaaatcagtgcttgaccaatggagtagtcacaaagtggcctttgacaagataaacagttacctcatggaggccagatactctctttcccgattccgtctgctgactggctccttagaagctgtgcaagttcaggtggacaatcttcagaatctccaagatgatctggaaaaacaggaaaggagcttacagaaatttggctctatcaccaaccaattattaaaagagtgtcacccacccgtgacagaaactcttaccaatacactgaaagaagtcaacatgagatggaataacttgctggaagagattgctgagcagctacagtccagcaaggccctacttcagctttggcaaagatacaaggactactccaaacagtgtgcttcgacagttcagcagcaggaggatcgaaccaatgagctgttgaaggcagccacaaacaaggacattgccgatgatgaggttgccacatggattcaagattgcaacgacctcctcaaaggactgggcacagttaaagattccctcttttttctccatgagctgggagagcaactgaagcaacaagtggatgcttccgcagcatcagctattcaatcggatcaactctctttgagtcaacacttgtgtgccctggagcaagctctctgcaaacagcagacttcattacaggctggagttcttgattatgaaacctttgccaagagtttagaagctttggaggcctggatagtggaagctgaagaaatactacaagggcaggaccctagccactcatctgacctctccacaatccaggaaaggatggaagaacttaagggacagatgttaaaattcagcagcatggctccagatttagaccgtctaaatgagcttggatataggttacccttgaatgataaggaaatcaaaagaatgcagaatctgaaccgccattggtctctgatctcctctcagactacagaaagattcagcaagttgcagtcatttttgctacaacatcagactttcttggaaaaatgtgaaacatggatggaattcctagttcagacagaacaaaagttagcagtagagatttcaggaaattatcagcaccttttggaacagcagagagcacacgagttgtttcaagccgagatgttcagtcgtcagcagattttgcactcaatcattattgatgggcaacgtcttctagaacaaggtcaagttgatgacagggatgaattcaacctgaaattgacactcctcagtaatcaatggcagggagtgattcgcagggcccagcagaggcgggggatcattgacagccagattcgccagtggcagcgctatagggagatggcagaaaagcttcgtaaatggttggttgaagtgtcctacctccccatgagtggtctcggaagtgttcctataccactgcaacaagcaaggaccctctttgatgaagtgcagttcaaagaaaaagtgtttctgcggcaacaaggcagctacatcctgactgtggaggctggcaagcaactccttctctcggcggacagtggcgctgaggccgccttgcaggccgaactcgctgaaatccaagagaaatggaaatcagccagcatgcggctggaagaacagaagaaaaaactagccttcttgttgaaagactgggaaaaatgtgagaaaggaatagcagattccctggagaaactacgaactttcaaaaagaagctttcgcagtctctcccggatcaccatgaagagctccatgcagaacaaatgcgttgcaaggaattagaaaatgcagttgggagctggacagatgacttgacccagttgagcctgctgaaggacaccctctctgcctatatcagtgctgatgatatctccattcttaatgaacgcgtagagcttctgcaaaggcagtgggaagaactatgccaccagctctccttaaggcggcagcaaataggtgaaagattgaatgaatgggcagtcttcagtgaaaagaacaaggaactctgtgagtggttgactcaaatggaaagcaaagtttctcagaatggagacattctcattgaagaaatgatagagaagctcaagaaggattatcaagaggaaattgctattgctcaagagaacaaaatacagctccaacaaatgggagaacgacttgctaaagccagccatgaaagcaaagcatctgagattgaatacaagctgggaaaggtcaacgaccggtggcagcatctcctggacctcattgcagccagggtgaagaagctgaaggagaccctggtagccgtgcagcagcttgataagaacatgagcagcctgaggacctggctcgctcacatcgagtcagagctggccaagccaatagtctacgattcctgtaactcggaagaaatacagagaaagcttaatgagcagcaggagcttcagagagacatagagaagcacagtacaggtgttgcatctgtcctcaacctgtgtgaagtcctgctgcacgactgtgacgcctgtgccactgatgccgagtgtgactctatacagcaggctacgagaaacctggaccggcggtggagaaacatttgtgctatgtccatggaaaggaggctgaaaatcgaagagacgtggcgattgtggcagaaatttctggatgactattcacgttttgaagattggctgaagtcttcagaaaggacagctgcttttcccagctcttctggggtgatctatacagttgccaaggaagaactaaagaaatttgaggctttccagcgacaggtccacgagtgcctgacgcagctggaactgatcaacaagcagtaccgccgcctggccagggagaaccgcactgattcagcatgtagcctcaaacagatggttcacgaaggcaaccagagatgggacaacctgcaaaagcgtgtcacctccatcttgcgcagactcaagcattttattggccagcgtgaggagtttgagactgcgcgggacagcattctggtctggctcacagagatggatctgcagctcactaatattgaacatttttctgagtgtgatgttcaagctaaaataaagcaactcaaggccttccagcaggaaatttcactgaaccacaataagattgagcagataattgcccaaggagaacagctgatagaaaagagtgagcccttggatgcagcgatcatcgaggaggaactagatgagctccgacggtactgccaggaggtcttcgggcgtgtggaaagataccataagaaactgatccgcctgcctctcccagacgatgagcacgacctctcagacagggagctggagctggaagactctgcagctctgtcggacctgcactggcacgaccgctctgcagacagcctgctttctccacagccttcctccaatctctccctctcgctcgctcagcccctccggagcgagcggtcaggacgagacaccccggctagtgtggactccatccccctggagtgggatcacgactatgacctcagtcgggacctggagtctgcaatgtccagagctctgccctctgaggatgaagaaggtcaggatgacaaagatttctacctccggggagctgttggcttatcaggggaccacagtgccctagagtcacagatccgacaactgggcaaagccctggatgatagccgttttcagatacagcaaaccgaaaatatcattcgcagcaaaactcccacggggccggagctagacaccagctacaaaggctacatgaaactgctgggcgaatgcagtagcagtatagactccgtgaagagactggagcacaaactgaaggaggaagaggagagccttcctggctttgttaacctgcatagtaccgaaacccaaacggctggtgtgattgaccgatgggagcttctccaggcccaggcattgagcaaggagttgaggatgaagcagaacctccagaagtggcagcagtttaactcagacttgaacagcatctgggcctggctgggggacacggaggaggagttggaacagctccagcgtctggaactcagcactgacatccagaccatcgagctccagatcaaaaagctcaaggagctccagaaagctgtggaccaccgcaaagccatcatcctctccatcaatctctgcagccctgagttcacccaggctgacagcaaggagagccgggacctgcaggatcgcttgtcgcagatgaatgggcgctgggaccgagtgtgctctctgctggaggagtggcggggcctgctgcaggatgccctgatgcagtgccagggtttccatgaaatgagccatggtttgcttcttatgctggagaacattgacagaaggaaaaatgaaattgtccctattgattctaaccttgatgcagagatacttcaggaccatcacaaacagcttatgcaaataaagcatgagctgttggaatcccaactcagagtagcctctttgcaagacatgtcttgccaactactggtgaatgctgaaggaacagactgtttagaagccaaagaaaaagtccatgttattggaaatcggctcaaacttctcttgaaggaggtcagtcgtcatatcaaggaactggagaagttattagacgtgtcaagtagtcagcaggatttgtcttcctggtcttctgctgatgaactggacacctcagggtctgtgagtcccacatcaggaaggagcaccccaaacagacagaaaacgccacgaggcaagtgtagtctctcacagcctggaccctctgtcagcagtccacatagcaggtccacaaaaggtggctccgattcctccctttctgagccagggccaggtcggtccggccgcggcttcctgttcagagtcctccgagcagctcttccccttcagcttctcctgctcctcctcatcgggcttgcctgccttgtaccaatgtcagaggaagactacagctgtgccctctccaacaactttgcccggtcattccaccccatgctcagatacacgaatggccctcctccactctgaactaagcagatgccatctgcagaagtgctggtagcataaggaggatcgggtcataagcaatcccaaactaccaacaagaggaccttgatcttggcgaaagccctcggtgtggcagctttagccctcctccagatcacatgtgtgcaaattatggcttcagaggtggaagataaacagtgacgggggaacaaacagacaacaagaaggtttggaagaaatctggtttgagactctgaaccttagcactaaggagattgagtaaggacctccaaagttccccggactcatgaattctgggcccttggcccattctgtgcacagccaaggacttcagtagaccatctgggcagctttcccatggtgctgctccaaccatcagataaatgaccctcccaagcaccatgtcagtgtcgtacaatctaccaaccaaccagtgctgaagagattttagaaccttgtaacatacaatttttaagagcttatatggcagcttcctttttaccttgttttcctttggggcatgatgttttaacctttgctttagaagcacaagctgtaaatctaaaaggcacttttttttagaggtataaagaaaaactagatgtaataaataagatcatggaaggctttatgtgaaaaaagttgaatgttatagtaaaaaaaaaaagatatttatgtatgtacagtttgctaaagccaagttttgtttgtattgatttctttgcatttattatagatattataaaatagtt

SEQ ID NO: 185305 - DNA, 3154 bp, Homo sapiens
  Payload ID: 16494
  Gene Symbol: SYNE1
  Gene Name: spectrin repeat containing, nuclear envelope 1
  ENST ID: ENST00000354674
  CDS Start-End: 148-3075
agtgtcatgttatcgggcagagactaccaacatttgtctacagtgagcattttcatacttctatacacagacaaggggaaactttcatccccacgcaggatatagctttttgctctgcagagtctaacttttgcaagtggaagcttcatggtggtggcggaggacctgagtgccctgaggatggcagaggacagctgtgtggatgcagatctcccagattgtaactgcgatgtcacaagggtgaagaagctgaaggagaccctggtagccgtgcagcagcttgataagaacatgagcagcctgaggacctggctcgctcacatcgagtcagagctggccaagccaatagtctacgattcctgtaactcggaagaaatacagagaaagcttaatgagcagcaggagcttcagagagacatagagaagcacagtacaggtgttgcatctgtcctcaacctgtgtgaagtcctgctgcacgactgtgacgcctgtgccactgatgccgagtgtgactctatacagcaggctacgagaaacctggaccggcggtggagaaacatttgtgctatgtccatggaaaggaggctgaaaatcgaagagacgtggcgattgtggcagaaatttctggatgactattcacgttttgaagattggctgaagtcttcagaaaggacagctgcttttcccagctcttctggggtgatctatacagttgccaaggaagaactaaagaaatttgaggctttccagcgacaggtccacgagtgcctgacgcagctggaactgatcaacaagcagtaccgccgcctggccagggagaaccgcactgattcagcatgtagcctcaaacagatggttcacgaaggcaaccagagatgggacaacctgcaaaagcgtgtcacctccatcttgcgcagactcaagcattttattggccagcgtgaggagtttgagactgcgcgggacagcattctggtctggctcacagagatggatctgcagctcactaatattgaacatttttctgagtgtgatgttcaagctaaaataaagcaactcaaggccttccagcaggaaatttcactgaaccacaataagattgagcagataattgcccaaggagaacagctgatagaaaagagtgagcccttggatgcagcgatcatcgaggaggaactagatgagctccgacggtactgccaggaggtcttcgggcgtgtggaaagataccataagaaactgatccgcctgcctctcccagacgatgagcacgacctctcagacagggagctggagctggaagactctgcagctctgtcggacctgcactggcacgaccgctctgcagacagcctgctttctccacagccttcctccaatctctccctctcgctcgctcagcccctccggagcgagcggtcaggacgagacaccccggctagtgtggactccatccccctggagtgggatcacgactatgacctcagtcgggacctggagtctgcaatgtccagagctctgccctctgaggatgaagaaggtcaggatgacaaagatttctacctccggggagctgttggcttatcagatgtaatgatccccgaaagccctgaggcctatgtaaaactcacagaaaatgcaatcaaaaatacctccggggaccacagtgccctagagtcacagatccgacaactgggcaaagccctggatgatagccgttttcagatacagcaaaccgaaaatatcattcgcagcaaaactcccacggggccggagctagacaccagctacaaaggctacatgaaactgctgggcgaatgcagtagcagtatagactccgtgaagagactggagcacaaactgaaggaggaagaggagagccttcctggctttgttaacctgcatagtaccgaaacccaaacggctggtgtgattgaccgatgggagcttctccaggcccaggcattgagcaaggagttgaggatgaagcagaacctccagaagtggcagcagtttaactcagacttgaacagcatctgggcctggctgggggacacggaggaggagttggaacagctccagcgtctggaactcagcactgacatccagaccatcgagctccagatcaaaaagctcaaggagctccagaaagctgtggaccaccgcaaagccatcatcctctccatcaatctctgcagccctgagttcacccaggctgacagcaaggagagccgggacctgcaggatcgcttgtcgcagatgaatgggcgctgggaccgagtgtgctctctgctggaggagtggcggggcctgctgcaggatgccctgatgcagtgccagggtttccatgaaatgagccatggtttgcttcttatgctggagaacattgacagaaggaaaaatgaaattgtccctattgattctaaccttgatgcagagatacttcaggaccatcacaaacagcttatgcaaataaagcatgagctgttggaatcccaactcagagtagcctctttgcaagacatgtcttgccaactactggtgaatgctgaaggaacagactgtttagaagccaaagaaaaagtccatgttattggaaatcggctcaaacttctcttgaaggaggtcagtcgtcatatcaaggaactggagaagttattagacgtgtcaagtagtcagcaggatttgtcttcctggtcttctgctgatgaactggacacctcagggtctgtgagtcccacatcaggaaggagcaccccaaacagacagaaaacgccacgaggcaagtgtagtctctcacagcctggaccctctgtcagcagtccacatagcaggtccacaaaaggtggctccgattcctccctttctgagccagggccaggtcggtccggccgcggcttcctgttcagagtcctccgagcagctcttccccttcagcttctcctgctcctcctcatcgggcttgcctgccttgtaccaatgtcagaggaagactacagctgtgccctctccaacaactttgcccggtcattccaccccatgctcagatacacgaatggccctcctccactctgaactaagcagatgccatctgcagaagtgctggtagcataaggaggatcgggtcataagcaatcccaaactaccaacaaga

SEQ ID NO: 185306 - DNA, 7165 bp, Homo sapiens
  Payload ID: 16494
  Gene Symbol: SYNE1
  Gene Name: spectrin repeat containing, nuclear envelope 1
  ENST ID: ENST00000367248
  CDS Start-End: 470-4771
agccagccagggtgagcgcgggcgccgggccgcggccgccggccgcagcgggctgagattgttgtcctctgtcaccagggcggctgggctcccgcagtcctgcagaccgcgcccgatcccggcgacagggcgggcggacagccgcgcatccccggggtcccgccgagcctgggcgcagagagccgggaggaagcgttcgctcgcttcgccttgctgctgggaaactgaacgaggccgagagagaaggttcttgagttcatgtaagaggacagtcttaaaacggaagaagaaaaagaagcagttcagtctttgggagagctgcctccttgttgagtgctgcaaaggcctggaattcatttatgacagaatagatctagaaaagtccaagcatgttttctagagtggtgtagccctgtgctgcctccagtgaagagtctcttggtgttggcttcgtgcttccggagggaccatggcaacctccagaggggcctcccggtgtcctcgggatatcgccaatgtgatgcagaggctgcaagatgagcaagagatagtacaaaaacgaactttcacaaaatggatcaactctcatctggccaagcggaaacctccaatggtggtggacgatctttttgaagacatgaaagatggtgttaaactgcttgcccttctggaggtcctgtctgggcagaaactgccttgtgaacaaggacgccggatgaagcgaatccatgctgtggctaacattggcacggcactcaagttcctcgaaggaagaaagtccatgcacagaggatcaccgattaaattagtcaacattaactccaccgatatagctgatggccgaccctcaatagttcttggattgatgtggaccattattctatatttccagattgaagagttgaccagcaacctgccccagctccagtctttgtccagcagcgcatcctccgtggacagcatagttagctctgagactcccagcccaccaagtaaacggaaggtgaccaccaagatccaaggaaatgctaagaaggctttattaaagtgggttcagtacacagctggcaagcagactggaatagaagtaaaagattttgggaagagttggagaagcggggttgcctttcattcagttattcatgccattcgaccggaattggtggacttggagacagtgaaaggcagatccaaccgagaaaatttggaggatgctttcactatcgccgaaacagaactggggatcccaagactgctagatcctgaagacgttgatgtggataaaccagatgagaaatctattatgacctatgtagcccagtttctgaaacattatcctgacatccacaatgcaagcactgatgggcaagaggatgatagagaagacagagtaatttttaaggaaatgaaagtttggatagaacaatttgagagagatttgacaagagcacagatggtggaatcaaatttacaggataaatatcagtcatttaagcacttcagagttcaatatgaaatgaagaggaaacagattgaacatttaatacaaccattacacagagacggtaaattgtcacttgaccaagcattggtaaaacaatcttgggatagagtgacctccaggctctttgactggcatatacagcttgataaatctcttcctgcacctctgggcaccataggtgcctggctgtacagagcggaggtggccctgagagaggaaataaccgttcaacaggtccacgaggaaacagcaaacacgatacaacggaaacttgagcaacataaggatctgcttcaaaacacggatgcccacaaaagagcattccatgaaatctaccggaccaggtctgttaacgggattccagtgccacctgatcaattagaggacatggccgagaggtttcattttgtttcctccacatcagagctacacctaatgaaaatggaatttttagaattaaagtaccgtctgctctcactgctggttcttgcagagtcaaagctgaagtcttggatcattaagtacgggaggagagagtcagtggagcagcttctacaaaactacgtgtcttttatagaaaatagcaagttctttgaacaatatgaggtgacataccagatcttgaaacagacagctgagatgtatgtcaaagcagatggttcagtggaagaagctgagaatgtgatgaaattcatgaatgaaaccaccgctcagtggaggaatctctcagtagaagtgaggagtgtgaggagcatgctggaagaagtgatctctaactgggatcgctatggcaatacagtggctagtctgcaagcctggctagaggatgctgaaaaaatgctcaatcaatcagaaaatgccaaaaaggatttttttcgaaatttacctcattggattcagcagcatactgccatgaacgatgctggcaattttctaattgaaacctgtgatgagatggtttcccgtgacctgaagcagcaattactgttgctaaatgggcggtggagggagttgtttatggaagtcaagcaatatgctcaagctgatgagatggacagaatgaagaaggaatacacagactgtgttgttaccctgtctgcttttgcaacggaagcccataagaaactttctgaacccttagaagtctcttttatgaatgtcaagctattaattcaagacttggaggatattgagcagagggtgcctgtgatggatgcccaatacaagataattacaaagacagcacacctcattaccaaagaaagcccccaagaagaaggaaaagaaatgtttgcgaccatgtcaaagctcaaagagcagctaaccaaggtcaaagaatgttactccccactcctttatgagtctcagcagctgttgattccgttggaggaattagaaaagcagatgacgtccttttatgactcacttgggaaaatcaatgaaattatcacagttcttgagcgtgaggcacaatcgagtgccctttttaaacaaaaacatcaggaactgttagcttgtcaagaaaactgtaagaaaaccttgacacttattgagaaaggcagtcaaagtgttcaaaagtttgtgaccttgagcaacgtgttaaagcattttgatcagacgaggctacaaagacagattgcagatattcatgttgcttttcagagtatggtaaagaaaactggagattggaagaagcatgtggaaaccaacagtcgcttgatgaagaagtttgaggagtctcgagcagagttggagaaggtactgcggattgctcaggagggcctggaggaaaagggggatccagaggagctcctgcggagacacactgagtttttcagtcagctggatcagagggtgctcaatgctttcctgaaagcttgtgatgaactcaccgacatccttccagagcaggagcagcaggggctgcaggaagctgttcgaaagctccacaaacaatggaaggatcttcaaggagaagccccttatcatttgcttcatctgaagattgatgtggagaagaataggttcttagcctctgtagaagaatgcagaactgagctggatcgagagaccaagctgatgccccaggaaggcagtgaaaagataattaaagagcacagggttttcttcagtgacaaaggtcctcatcatctctgtgagaaaaggttacagctcatcgaggaactctgtgtgaaactcccagtgcgggacccagtaagggacacacctggaacctgtcacgtgactctcaaagagctcagagctgccattgacagcacctacaggaagctcatggaagacccagacaagtggaaggactacactagcagattctctgagttctcatcttggatatctacaaatgagacacaattaaaggggatcaagggtgaggccatcgatactgccaaccacggagaggttaaacgtgccgttgaagagatcagaaatggtgttaccaaaaggggtgagaccctcagctggctgaaatccaggctgaaagttttgacagaagtttcttctgagaatgaagcccaaaagcagggagatgagctggcaaaattatccagctctttcaaggctcttgtgacgctgctgtcagaggttgaaaagatgctaagcaattttggggactgtgtccagtacaaagaaatagtcaaaaattctctcgaagaattaatttctggctctaaagaagtccaggaacaagctgagaagatcttggatactgaaaatctgtttgaagcacagcagttacttcttcatcaccagcaaaagacaaagcggatctcagcaaagaagagagatgtgcagcagcagatcgcgcaggcgcagcagggagaaggggggctgcctgaccgaggccacgaggagctgcggaagctggagagcacactggatggcctggagcgcagccgggagaggcaggaacgccgcatccaggtcacattaagaaaatgggagcgatttgaaacaaacaaagaaacagtagtaagatacctttttcaaacaggttccagtcatgaacgcttcttgagttttagcagtttggaaagtttatcttcagaactggaacaaacaaaggagttttctaaacggacagaaagtattgcagtccaggctgagaaccttgtaaaggaagcttcagagataccgcttgggccccaaaataagcagctgcttcaacagcaggccaagtcaatcaaagaacaagtcaaaaaattagaagacacgcttgaagaagagtatgtgattgacaagtcctaaactttcttctctgagataaagtttcatacaatctttcctgtaccttgtattcaaaacactcttttaaaatctcaaagtgtctgtgtatttcagcatgttttgaggaaacaactcacagttcaaaagaaagtatcgctaatacagaaaccaatatctataacagagcccaaaaaatataaaggatgtgggttttgcatcttaaactgatcatgttcatgagaaagccatatctattctattctgtggcctttgtacattgtagagggaatcttgaaaaagaactaatatttaaaataatttttttactatattattctgctgtcaccatttagagcgaaaaggagatattttgttagtgtagattccaggcctaaatacacatcacatagaccatatatctccaacctgaagaagctcctggagcttgtttacagtgcctcggtattcaagttatcctgactaatatgctctttccagaaattaactttaaaatattttatttttaaacttttaatgtttgtttatctgaaaaaaaaaaactgcttggcctattgatatcctgttatatacccaaaatatacaaaaaagtttggaggggaaaaacatatgaggatacagccaatattattcaaaacaatatggctaaacatttctatttttaacataatttagtggcaaatcaatgatacataatagcatattattattaagggacaggccatcatttctaaggtgggttttaaaatgtaaaatgtgtttttaatactattaacagcttaaaattaacattttacatttgcctaaactttaaaatttgatacatattttatttaaaacaaattatgacttgaaattttgaggactttatattacattaaatattctctatcaagttatggaaatagtaaaacagagtttattagaaaggaatttacttctattaagaatagccattttaacctttatttaatttaaaaagttgcaatataacacagcttgcattacctgtactgctgacagcattaggcacattcagggtataaatttgagactgcaatattatttaatttgacagtcaatgatgccactctatttttcttgatgtcttcaagtgccttttggtaaacagggacattctttcactttttttttttttaacccaaggacttactagttcaattatatactgttagtttcttagtctttttctaaactgaaagccatagtcacctggttatacatgcatagctaatacaaattagaaatctatagttgaaattctgttcactagatttgttacaaataaaacctataagttgtctaaaagtagttagggtgctcatgtacaataatttataaatgtcttttggaatcaggaccataagacatttatgaaaatggctgaagtcacaaagattatacatcgcaggattagctctaataatagaaacagttcttgcccggcagcatgggattgagatcacgagctctgtcttgattgataagatgcagtttataaaggtatttctatagaaagcatcactgcagtgtctctcctttaagtgtaagaagaacatttctttggaaataggactattgaaaagctgtgtacactgaaatcttttctggcatagtttataaaaataagtcctggcaacaactggtcacatgcagagtttaattagattctacctggattcaaacccctttggacccagcaatgttttgttcaaagtgcagtttcactcaaagtgtagatactgcctcattaaatgttcattctcagagaagataggaaaacctgataaactactcagaacaactgtgcaattttttttttagcgtgaatagtttcaactttgaaatggtcacaaatgtcttcattatctcttcacctggtgatttcaaggaaaatgtgttgttgttctctattaaaatactgagttttatttacttaatttggttaattttagtattaaaaccatggaaatggtgaaaaccaagtgggatcattttggcagtaattttgagactctgtccgtctggataactgagaaagaaaaagaactcaatgccttggaaacttcgtcatctgccatggacatgcaaatcagccaaattaaggtgacctgctcacacattatatttataatccatgtctagcttttaagaactactttcttacatttcatcaaatgctgttcggtcccaggacaagactttcattgcaatgtgactattaaaattaaattcatacattttatcaagctaagaggtctggattaatactgggcaacatttatagttggaattatgtattcacattgtctgacttgtgcattcaaagttaatattgtgtgaaatatcattaaaatatttttatggttacattaa

SEQ ID NO: 185307 - DNA, 5837 bp, Homo sapiens
  Payload ID: 16494
  Gene Symbol: SYNE1
  Gene Name: spectrin repeat containing, nuclear envelope 1
  ENST ID: ENST00000367251
  CDS Start-End: 1-4965
gagaaaattgagcagaatggacttgctttgattcagaacaagaaagaagacgtctctagcattgtcatgagcacactgcgagagctcggccaaacctgggcaaatttagatcacatggttggacaattaaagatactgctgaaatcagtgcttgaccaatggagtagtcacaaagtggcctttgacaagataaacagttacctcatggaggccagatactctctttcccgattccgtctgctgactggctccttagaagctgtgcaagttcaggtggacaatcttcagaatctccaagatgatctggaaaaacaggaaaggagcttacagaaatttggctctatcaccaaccaattattaaaagagtgtcacccacccgtgacagaaactcttaccaatacactgaaagaagtcaacatgagatggaataacttgctggaagagattgctgagcagctacagtccagcaaggccctacttcagctttggcaaagatacaaggactactccaaacagtgtgcttcgacagttcagcagcaggaggatcgaaccaatgagctgttgaaggcagccacaaacaaggacattgccgatgatgaggttgccacatggattcaagattgcaacgacctcctcaaaggactgggcacagttaaagattccctcttttttctccatgagctgggagagcaactgaagcaacaagtggatgcttccgcagcatcagctattcaatcggatcaactctctttgagtcaacacttgtgtgccctggagcaagctctctgcaaacagcagacttcattacaggctggagttcttgattatgaaacctttgccaagagtttagaagctttggaggcctggatagtggaagctgaagaaatactacaagggcaggaccctagccactcatctgacctctccacaatccaggaaaggatggaagaacttaagggacagatgttaaaattcagcagcatggctccagatttagaccgtctaaatgagcttggatataggttacccttgaatgataaggaaatcaaaagaatgcagaatctgaaccgccattggtctctgatctcctctcagactacagaaagattcagcaagttgcagtcatttttgctacaacatcagactttcttggaaaaatgtgaaacatggatggaattcctagttcagacagaacaaaagttagcagtagagatttcaggaaattatcagcaccttttggaacagcagagagcacacgagttgtttcaagccgagatgttcagtcgtcagcagattttgcactcaatcattattgatgggcaacgtcttctagaacaaggtcaagttgatgacagggatgaattcaacctgaaattgacactcctcagtaatcaatggcagggagtgattcgcagggcccagcagaggcgggggatcattgacagccagattcgccagtggcagcgctatagggagatggcagaaaagcttcgtaaatggttggttgaagtgtcctacctccccatgagtggtctcggaagtgttcctataccactgcaacaagcaaggaccctctttgatgaagtgcagttcaaagaaaaagtgtttctgcggcaacaaggcagctacatcctgactgtggaggctggcaagcaactccttctctcggcggacagtggcgctgaggccgccttgcaggccgaactcgctgaaatccaagagaaatggaaatcagccagcatgcggctggaagaacagaagaaaaaactagccttcttgttgaaagactgggaaaaatgtgagaaaggaatagcagattccctggagaaactacgaactttcaaaaagaagctttcgcagtctctcccggatcaccatgaagagctccatgcagaacaaatgcgttgcaaggaattagaaaatgcagttgggagctggacagatgacttgacccagttgagcctgctgaaggacaccctctctgcctatatcagtgctgatgatatctccattcttaatgaacgcgtagagcttctgcaaaggcagtgggaagaactatgccaccagctctccttaaggcggcagcaaataggtgaaagattgaatgaatgggcagtcttcagtgaaaagaacaaggaactctgtgagtggttgactcaaatggaaagcaaagtttctcagaatggagacattctcattgaagaaatgatagagaagctcaagaaggattatcaagaggaaattgctattgctcaagagaacaaaatacagctccaacaaatgggagaacgacttgctaaagccagccatgaaagcaaagcatctgagattgaatacaagctgggaaaggtcaacgaccggtggcagcatctcctggacctcattgcagccagggtgaagaagctgaaggagaccctggtagccgtgcagcagcttgataagaacatgagcagcctgaggacctggctcgctcacatcgagtcagagctggccaagccaatagtctacgattcctgtaactcggaagaaatacagagaaagcttaatgagcagcaggagcttcagagagacatagagaagcacagtacaggtgttgcatctgtcctcaacctgtgtgaagtcctgctgcacgactgtgacgcctgtgccactgatgccgagtgtgactctatacagcaggctacgagaaacctggaccggcggtggagaaacatttgtgctatgtccatggaaaggaggctgaaaatcgaagagacgtggcgattgtggcagaaatttctggatgactattcacgttttgaagattggctgaagtcttcagaaaggacagctgcttttcccagctcttctggggtgatctatacagttgccaaggaagaactaaagaaatttgaggctttccagcgacaggtccacgagtgcctgacgcagctggaactgatcaacaagcagtaccgccgcctggccagggagaaccgcactgattcagcatgtagcctcaaacagatggttcacgaaggcaaccagagatgggacaacctgcaaaagcgtgtcacctccatcttgcgcagactcaagcattttattggccagcgtgaggagtttgagactgcgcgggacagcattctggtctggctcacagagatggatctgcagctcactaatattgaacatttttctgagtgtgatgttcaagctaaaataaagcaactcaaggccttccagcaggaaatttcactgaaccacaataagattgagcagataattgcccaaggagaacagctgatagaaaagagtgagcccttggatgcagcgatcatcgaggaggaactagatgagctccgacggtactgccaggaggtcttcgggcgtgtggaaagataccataagaaactgatccgcctgcctctcccagacgatgagcacgacctctcagacagggagctggagctggaagactctgcagctctgtcggacctgcactggcacgaccgctctgcagacagcctgctttctccacagccttcctccaatctctccctctcgctcgctcagcccctccggagcgagcggtcaggacgagacaccccggctagtgtggactccatccccctggagtgggatcacgactatgacctcagtcgggacctggagtctgcaatgtccagagctctgccctctgaggatgaagaaggtcaggatgacaaagatttctacctccggggagctgttggcttatcagatgtaatgatccccgaaagccctgaggcctatgtaaaactcacagaaaatgcaatcaaaaatacctccggggaccacagtgccctagagtcacagatccgacaactgggcaaagccctggatgatagccgttttcagatacagcaaaccgaaaatatcattcgcagcaaaactcccacggggccggagctagacaccagctacaaaggctacatgaaactgctgggcgaatgcagtagcagtatagactccgtgaagagactggagcacaaactgaaggaggaagaggagagccttcctggctttgttaacctgcatagtaccgaaacccaaacggctggtgtgattgaccgatgggagcttctccaggcccaggcattgagcaaggagttgaggatgaagcagaacctccagaagtggcagcagtttaactcagacttgaacagcatctgggcctggctgggggacacggaggaggagttggaacagctccagcgtctggaactcagcactgacatccagaccatcgagctccagatcaaaaagctcaaggagctccagaaagctgtggaccaccgcaaagccatcatcctctccatcaatctctgcagccctgagttcacccaggctgacagcaaggagagccgggacctgcaggatcgcttgtcgcagatgaatgggcgctgggaccgagtgtgctctctgctggaggagtggcggggcctgctgcaggatgccctgatgcagtgccagggtttccatgaaatgagccatggtttgcttcttatgctggagaacattgacagaaggaaaaatgaaattgtccctattgattctaaccttgatgcagagatacttcaggaccatcacaaacagcttatgcaaataaagcatgagctgttggaatcccaactcagagtagcctctttgcaagacatgtcttgccaactactggtgaatgctgaaggaacagactgtttagaagccaaagaaaaagtccatgttattggaaatcggctcaaacttctcttgaaggaggtcagtcgtcatatcaaggaactggagaagttattagacgtgtcaagtagtcagcaggatttgtcttcctggtcttctgctgatgaactggacacctcagggtctgtgagtcccacatcaggaaggagcaccccaaacagacagaaaacggtccacaaaaggtggctccgattcctccctttctgagccagggccaggtcggtccggccgcggcttcctgttcagagtcctccgagcagctcttccccttcagcttctcctgctcctcctcatcgggcttgcctgccttgtaccaatgtcagaggaagactacagctgtgccctctccaacaactttgcccggtcattccaccccatgctcagatacacgaatggccctcctccactctgaactaagcagatgccatctgcagaagtgctggtagcataaggaggatcgggtcataagcaatcccaaactaccaacaagaggaccttgatcttggcgaaagccctcggtgtggcagctttagccctcctccagatcacatgtgtgcaaattatggcttcagaggtggaagataaacagtgacgggggaacaaacagacaacaagaaggtttggaagaaatctggtttgagactctgaaccttagcactaaggagattgagtaaggacctccaaagttccccggactcatgaattctgggcccttggcccattctgtgcacagccaaggacttcagtagaccatctgggcagctttcccatggtgctgctccaaccatcagataaatgaccctcccaagcaccatgtcagtgtcgtacaatctaccaaccaaccagtgctgaagagattttagaaccttgtaacatacaatttttaagagcttatatggcagcttcctttttaccttgttttcctttggggcatgatgttttaacctttgctttagaagcacaagctgtaaatctaaaaggcacttttttttagaggtataaagaaaaactagatgtaataaataagatcatggaaggctttatgtgaaaaaagttgaatgttatagtaaaaaaaaaaa

SEQ ID NO: 185308 - DNA, 5189 bp, Homo sapiens
  Payload ID: 16494
  Gene Symbol: SYNE1
  Gene Name: spectrin repeat containing, nuclear envelope 1
  Uniprot ID: Q8NF91
  ENST ID: ENST00000367253
  CDS Start-End: 1-5178
atggcaacctccagaggggcctcccggtgtcctcgggatatcgccaatgtgatgcagaggctgcaagatgagcaagagatagtacaaaaacgaactttcacaaaatggatcaactctcatctggccaagcggaaacctccaatggtggtggacgatctttttgaagacatgaaagatggtgttaaactgcttgcccttctggaggtcctgtctgggcagaaactgccttgtgaacaaggacgccggatgaagcgaatccatgctgtggctaacattggcacggcactcaagttcctcgaaggaagaaagattaaattagtcaacattaactccaccgatatagctgatggccgaccctcaatagttcttggattgatgtggaccattattctatatttccagattgaagagttgaccagcaacctgccccagctccagtctttgtccagcagcgcatcctccgtggacagcatagttagctctgagactcccagcccaccaagtaaacggaaggtgaccaccaagatccaaggaaatgctaagaaggctttattaaagtgggttcagtacacagctggcaagcagactggaatagaagtaaaagattttgggaagagttggagaagcggggttgcctttcattcagttattcatgccattcgaccggaattggtggacttggagacagtgaaaggcagatccaaccgagaaaatttggaggatgctttcactatcgccgaaacagaactggggatcccaagactgctagatcctgaagacgttgatgtggataaaccagatgagaaatctattatgacctatgtagcccagtttctgaaacattatcctgacatccacaatgcaagcactgatgggcaagaggatgatgaaatacttccaggtttcccatcttttgcaaattctgtacaaaattttaagagagaagacagagtaatttttaaggaaatgaaagtttggatagaacaatttgagagagatttgacaagagcacagatggtggaatcaaatttacaggataaatatcagtcatttaagcacttcagagttcaatatgaaatgaagaggaaacagattgaacatttaatacaaccattacacagagacggtaaattgtcacttgaccaagcattggtaaaacaatcttgggatagagtgacctccaggctctttgactggcatatacagcttgataaatctcttcctgcacctctgggcaccataggtgcctggctgtacagagcggaggtggccctgagagaggaaataaccgttcaacaggtccacgaggaaacagcaaacacgatacaacggaaacttgagcaacataaggatctgcttcaaaacacggatgcccacaaaagagcattccatgaaatctaccggaccaggtctgttaacgggattccagtgccacctgatcaattagaggacatggccgagaggtttcattttgtttcctccacatcagagctacacctaatgaaaatggaatttttagaattaaagtaccgtctgctctcactgctggttcttgcagagtcaaagctgaagtcttggatcattaagtacgggaggagagagtcagtggagcagcttctacaaaactacgtgtcttttatagaaaatagcaagttctttgaacaatatgaggtgacataccagatcttgaaacagacagctgagatgtatgtcaaagcagatggttcagtggaagaagctgagaatgtgatgaaattcatgaatgaaaccaccgctcagtggaggaatctctcagtagaagtgaggagtgtgaggagcatgctggaagaagtgatctctaactgggatcgctatggcaatacagtggctagtctgcaagcctggctagaggatgctgaaaaaatgctcaatcaatcagaaaatgccaaaaaggatttttttcgaaatttacctcattggattcagcagcatactgccatgaacgatgctggcaattttctaattgaaacctgtgatgagatggtttcccgtgacctgaagcagcaattactgttgctaaatgggcggtggagggagttgtttatggaagtcaagcaatatgctcaagctgatgagatggacagaatgaagaaggaatacacagactgtgttgttaccctgtctgcttttgcaacggaagcccataagaaactttctgaacccttagaagtctcttttatgaatgtcaagctattaattcaagacttggaggatattgagcagagggtgcctgtgatggatgcccaatacaagataattacaaagacagcacacctcattaccaaagaaagcccccaagaagaaggaaaagaaatgtttgcgaccatgtcaaagctcaaagagcagctaaccaaggtcaaagaatgttactccccactcctttatgagtctcagcagctgttgattccgttggaggaattagaaaagcagatgacgtccttttatgactcacttgggaaaatcaatgaaattatcacagttcttgagcgtgaggcacaatcgagtgccctttttaaacaaaaacatcaggaactgttagcttgtcaagaaaactgtaagaaaaccttgacacttattgagaaaggcagtcaaagtgttcaaaagtttgtgaccttgagcaacgtgttaaagcattttgatcagacgaggctacaaagacagattgcagatattcatgttgcttttcagagtatggtaaagaaaactggagattggaagaagcatgtggaaaccaacagtcgcttgatgaagaagtttgaggagtctcgagcagagttggagaaggtactgcggattgctcaggagggcctggaggaaaagggggatccagaggagctcctgcggagacacactgagtttttcagtcagctggatcagagggtgctcaatgctttcctgaaagcttgtgatgaactcaccgacatccttccagagcaggagcagcaggggctgcaggaagctgttcgaaagctccacaaacaatggaaggatcttcaaggagaagccccttatcatttgcttcatctgaagattgatgtggagaagaataggttcttagcctctgtagaagaatgcagaactgagctggatcgagagaccaagctgatgccccaggaaggcagtgaaaagataattaaagagcacagggttttcttcagtgacaaaggtcctcatcatctctgtgagaaaaggttacagctcatcgaggaactctgtgtgaaactcccagtgcgggacccagtaagggacacacctggaacctgtcacgtgactctcaaagagctcagagctgccattgacagcacctacaggaagctcatggaagacccagacaagtggaaggactacactagcagattctctgagttctcatcttggatatctacaaatgagacacaattaaaggggatcaagggtgaggccatcgatactgccaaccacggagaggttaaacgtgccgttgaagagatcagaaatggtgttaccaaaaggggtgagaccctcagctggctgaaatccaggctgaaagttttgacagaagtttcttctgagaatgaagcccaaaagcagggagatgagctggcaaaattatccagctctttcaaggctcttgtgacgctgctgtcagaggttgaaaagatgctaagcaattttggggactgtgtccagtacaaagaaatagtcaaaaattctctcgaagaattaatttctggctctaaagaagtccaggaacaagctgagaagatcttggatactgaaaatctgtttgaagcacagcagttacttcttcatcaccagcaaaagacaaagcggatctcagcaaagaagagagatgtgcagcagcagatcgcgcaggcgcagcagggagaaggggggctgcctgaccgaggccacgaggagctgcggaagctggagagcacactggatggcctggagcgcagccgggagaggcaggaacgccgcatccaggtcacattaagaaaatgggagcgatttgaaacaaacaaagaaacagtagtaagatacctttttcaaacaggttccagtcatgaacgcttcttgagttttagcagtttggaaagtttatcttcagaactggaacaaacaaaggagttttctaaacggacagaaagtattgcagtccaggctgagaaccttgtaaaggaagcttcagagataccgcttgggccccaaaataagcagctgcttcaacagcaggccaagtcaatcaaagaacaagtcaaaaaattagaagacacgcttgaagaagatattaaaaccatggaaatggtgaaaaccaagtgggatcattttggcagtaattttgagactctgtccgtctggataactgagaaagaaaaagaactcaatgccttggaaacttcgtcatctgccatggacatgcaaatcagccaaattaaggtcacaattcaggaaatagaaagtaagctcagcagcattgtaggattagaagaagaagcccagtcttttgctcagtttgttaccactggagaatctgctcgaattaaagccaagttgacacaaataagaagatacggggaagagcttcgagagcatgcacagtgtctggaaggaacaatcctgggacatttatctcagcagcaaaagtttgaagagaaccttagaaagatccagcaatctgtgtctgaatttgaagataaacttgctgttccaattaaaatatgttcttcagctacagaaacatacaaagttcttcaagaacatatggatctctgccaggccctggagtcactgagcagcgcgatcactgccttctcagccagtgccaggaaggttgtgaacagagattcctgtgttcaggaggctgcggctctacagcagcaatacgaggacatcctaaggagggcgaaggagagacagacggcgctggagaatctgctggcccactggcagaggctagagaaagaactatcatcctttttgacctggttagagcggggtgaagctaaagccagttccccagaaatggacatttctgcagacagagtcaaagtggaaggtgaacttcagttaatacaggcaagttcaaggaagtgtgaggaaggaaaaaataaaatgctttttgttacagttacattatttaaaataataaaataaataaacttgta

SEQ ID NO: 185309 - DNA, 27748 bp, Homo sapiens
  Payload ID: 16494
  Gene Symbol: SYNE1
  Gene Name: spectrin repeat containing, nuclear envelope 1
  Uniprot ID: Q8NF91
  ENST ID: ENST00000367255
  CDS Start-End: 603-26996
cccgggcagtggaaaccgtgggcaaaagttagctggcaggacagcgcagctcctccaggcagcggaggcagcgcgtcccggctctcagggacatttccttcccacctcgacccccgggaggtggtcccggtataaaggctcgctgagcgggtgggtcacagcacagctttgcagctgcggagaaacgcccaaggccgtgcatctccaggagggcggctgggctcccgcagtcctgcagaccgcgcccgatcccggcgacagggcgggcggacagccgcgcatccccggggtcccgccgagcctgggcgcagagagccgggaggaagcgttcgctcgcttcgccttgctgctgggaaactgaacgaggccgagagagaaggttcttgagttcatgtaagaggacagtcttaaaacggaagaagaaaaagaagcagttcagtctttgggagagctgcctccttgttgagtgctgcaaaggcctggaattcatttatgacagaatagatctagaaaagtccaagcatgttttctagagtggtgtagccctgtgctgcctccagtgaagagtctcttggtgttggcttcgtgcttccggagggaccatggcaacctccagaggggcctcccggtgtcctcgggatatcgccaatgtgatgcagaggctgcaagatgagcaagagatagtacaaaaacgaactttcacaaaatggatcaactctcatctggccaagcggaaacctccaatggtggtggacgatctttttgaagacatgaaagatggtgttaaactgcttgcccttctggaggtcctgtctgggcagaaactgccttgtgaacaaggacgccggatgaagcgaatccatgctgtggctaacattggcacggcactcaagttcctcgaaggaagaaagattaaattagtcaacattaactccaccgatatagctgatggccgaccctcaatagttcttggattgatgtggaccattattctatatttccagattgaagagttgaccagcaacctgccccagctccagtctttgtccagcagcgcatcctccgtggacagcatagttagctctgagactcccagcccaccaagtaaacggaaggtgaccaccaagatccaaggaaatgctaagaaggctttattaaagtgggttcagtacacagctggcaagcagactggaatagaagtaaaagattttgggaagagttggagaagcggggttgcctttcattcagttattcatgccattcgaccggaattggtggacttggagacagtgaaaggcagatccaaccgagaaaatttggaggatgctttcactatcgccgaaacagaactggggatcccaagactgctagatcctgaagacgttgatgtggataaaccagatgagaaatctattatgacctatgtagcccagtttctgaaacattatcctgacatccacaatgcaagcactgatgggcaagaggatgatgaaatacttccaggtttcccatcttttgcaaattctgtacaaaattttaagagagaagacagagtaatttttaaggaaatgaaagtttggatagaacaatttgagagagatttgacaagagcacagatggtggaatcaaatttacaggataaatatcagtcatttaagcacttcagagttcaatatgaaatgaagaggaaacagattgaacatttaatacaaccattacacagagacggtaaattgtcacttgaccaagcattggtaaaacaatcttgggatagagtgacctccaggctctttgactggcatatacagcttgataaatctcttcctgcacctctgggcaccataggtgcctggctgtacagagcggaggtggccctgagagaggaaataaccgttcaacaggtccacgaggaaacagcaaacacgatacaacggaaacttgagcaacataaggatctgcttcaaaacacggatgcccacaaaagagcattccatgaaatctaccggaccaggtctgttaacgggattccagtgccacctgatcaattagaggacatggccgagaggtttcattttgtttcctccacatcagagctacacctaatgaaaatggaatttttagaattaaagtaccgtctgctctcactgctggttcttgcagagtcaaagctgaagtcttggatcattaagtacgggaggagagagtcagtggagcagcttctacaaaactacgtgtcttttatagaaaatagcaagttctttgaacaatatgaggtgacataccagatcttgaaacagacagctgagatgtatgtcaaagcagatggttcagtggaagaagctgagaatgtgatgaaattcatgaatgaaaccaccgctcagtggaggaatctctcagtagaagtgaggagtgtgaggagcatgctggaagaagtgatctctaactgggatcgctatggcaatacagtggctagtctgcaagcctggctagaggatgctgaaaaaatgctcaatcaatcagaaaatgccaaaaaggatttttttcgaaatttacctcattggattcagcagcatactgccatgaacgatgctggcaattttctaattgaaacctgtgatgagatggtttcccgtgacctgaagcagcaattactgttgctaaatgggcggtggagggagttgtttatggaagtcaagcaatatgctcaagctgatgagatggacagaatgaagaaggaatacacagactgtgttgttaccctgtctgcttttgcaacggaagcccataagaaactttctgaacccttagaagtctcttttatgaatgtcaagctattaattcaagacttggaggatattgagcagagggtgcctgtgatggatgcccaatacaagataattacaaagacagcacacctcattaccaaagaaagcccccaagaagaaggaaaagaaatgtttgcgaccatgtcaaagctcaaagagcagctaaccaaggtcaaagaatgttactccccactcctttatgagtctcagcagctgttgattccgttggaggaattagaaaagcagatgacgtccttttatgactcacttgggaaaatcaatgaaattatcacagttcttgagcgtgaggcacaatcgagtgccctttttaaacaaaaacatcaggaactgttagcttgtcaagaaaactgtaagaaaaccttgacacttattgagaaaggcagtcaaagtgttcaaaagtttgtgaccttgagcaacgtgttaaagcattttgatcagacgaggctacaaagacagattgcagatattcatgttgcttttcagagtatggtaaagaaaactggagattggaagaagcatgtggaaaccaacagtcgcttgatgaagaagtttgaggagtctcgagcagagttggagaaggtactgcggattgctcaggagggcctggaggaaaagggggatccagaggagctcctgcggagacacactgagtttttcagtcagctggatcagagggtgctcaatgctttcctgaaagcttgtgatgaactcaccgacatccttccagagcaggagcagcaggggctgcaggaagctgttcgaaagctccacaaacaatggaaggatcttcaaggagaagccccttatcatttgcttcatctgaagattgatgtggagaagaataggttcttagcctctgtagaagaatgcagaactgagctggatcgagagaccaagctgatgccccaggaaggcagtgaaaagataattaaagagcacagggttttcttcagtgacaaaggtcctcatcatctctgtgagaaaaggttacagctcatcgaggaactctgtgtgaaactcccagtgcgggacccagtaagggacacacctggaacctgtcacgtgactctcaaagagctcagagctgccattgacagcacctacaggaagctcatggaagacccagacaagtggaaggactacactagcagattctctgagttctcatcttggatatctacaaatgagacacaattaaaggggatcaagggtgaggccatcgatactgccaaccacggagaggttaaacgtgccgttgaagagatcagaaatggtgttaccaaaaggggtgagaccctcagctggctgaaatccaggctgaaagttttgacagaagtttcttctgagaatgaagcccaaaagcagggagatgagctggcaaaattatccagctctttcaaggctcttgtgacgctgctgtcagaggttgaaaagatgctaagcaattttggggactgtgtccagtacaaagaaatagtcaaaaattctctcgaagaattaatttctggctctaaagaagtccaggaacaagctgagaagatcttggatactgaaaatctgtttgaagcacagcagttacttcttcatcaccagcaaaagacaaagcggatctcagcaaagaagagagatgtgcagcagcagatcgcgcaggcgcagcagggagaaggggggctgcctgaccgaggccacgaggagctgcggaagctggagagcacactggatggcctggagcgcagccgggagaggcaggaacgccgcatccaggtcacattaagaaaatgggagcgatttgaaacaaacaaagaaacagtagtaagatacctttttcaaacaggttccagtcatgaacgcttcttgagttttagcagtttggaaagtttatcttcagaactggaacaaacaaaggagttttctaaacggacagaaagtattgcagtccaggctgagaaccttgtaaaggaagcttcagagataccgcttgggccccaaaataagcagctgcttcaacagcaggccaagtcaatcaaagaacaagtcaaaaaattagaagacacgcttgaagaagatattaaaaccatggaaatggtgaaaaccaagtgggatcattttggcagtaattttgagactctgtccgtctggataactgagaaagaaaaagaactcaatgccttggaaacttcgtcatctgccatggacatgcaaatcagccaaattaaggtcacaattcaggaaatagaaagtaagctcagcagcattgtaggattagaagaagaagcccagtcttttgctcagtttgttaccactggagaatctgctcgaattaaagccaagttgacacaaataagaagatacggggaagagcttcgagagcatgcacagtgtctggaaggaacaatcctgggacatttatctcagcagcaaaagtttgaagagaaccttagaaagatccagcaatctgtgtctgaatttgaagataaacttgctgttccaattaaaatatgttcttcagctacagaaacatacaaagttcttcaagaacatatggatctctgccaggccctggagtcactgagcagcgcgatcactgccttctcagccagtgccaggaaggttgtgaacagagattcctgtgttcaggaggctgcggctctacagcagcaatacgaggacatcctaaggagggcgaaggagagacagacggcgctggagaatctgctggcccactggcagaggctagagaaagaactatcatcctttttgacctggttagagcggggtgaagctaaagccagttccccagaaatggacatttctgcagacagagtcaaagtggaaggtgaacttcagttaatacaggcactgcaaaatgaagttgtatcccaggcctcattctatagcaaacttttgcaattgaaggaatcattgttctcagtagcctccaaagatgatgtgaaaatgatgaaactacatttggagcagttggatgagagatggagagatttaccacagatcattaacaaaaggattaattttcttcagtctgtggttgctgaacaccagcaatttgatgagctgctgctttccttttctgtctggattaaactgtttctcagtgaattacaaactacctctgagattagcataatggaccatcaagtagcccttactcggcataaggaccacgcagcagaagtagagagcaaaaagggcgaattgcagagtctgcagggtcacttagcaaagttgggttctctgggccgtgctgaggacctccacctcctgcagggaaaggctgaggactgcttccagctgtttgaggaggccagccaggttgtggagaggcggcagcttgccctgtcccatttggcagaattcctccagagccatgcctctctgtccggcattctccgccagctgaggcaaacagtggaagcaaccaacagtatgaataagaacgagtctgatttgatagaaaaggacctcaatgatgctcttcaaaatgctaaagcattagaatctgctgccgtcagtctggatggcattctttccaaagcccaataccatctgaaaatcgggagctctgagcaaaggacttcctgcagagccacggctgatcagctctgtggagaggtagagaggatccagaaccttctgggaaccaagcagagtgaggcagatgctctggcagtgttgaaaaaagcattccaagaccagaaagaggagcttctgaaaagcattgaggacattgaagaaaggactgacaaagagcgattgaaagaacctacccgccaagctcttcagcagaggttaagagtgtttaatcagctagaagatgaattgaattctcacgagcatgaactatgttggttgaaagacaaagccaagcaaattgcccagaaagatgtagcttttgcacctgaagttgacagggagataaaccgcttagaggtcacctgggatgataccaaaagactaattcatgaaaatcagggtcagtgctgtggacttattgacttaatgagagaatatcagaacctgaaatcagctgtatctaaagtcttagaaaatgccagcagtgtgattgtaaccagaactaccataaaagatcaggaggatcttaaatgggctttttccaagcatgaaactgccaagaacaaaatgaattacaaacagaaagacttggataactttaccagcaaaggaaaacacttgttatctgagctgaagaaaattcacagtagtgatttcagcttggtgaaaacagacatggagagcaccgtggacaaatggctggatgtatcagagaaacttgaagaaaacatggataggctgagagtaagcctgtccatttgggatgatgtactgtcaactagagatgagattgagggatggtcaaacaactgcgttccacagatggcagaaaacatcagcaacctggataaccacctcagagctgaagaactgcttaaagaatttgagtctgaagttaaaaacaaagcattgagattggaagaactgcattccaaagttaatgatctgaaagaattaactaaaaatctagaaacaccgccagaccttcagtttatagaagcagacttaatgcagaaactggagcatgccaaagaaataactgaagtagcaaaaggaaccctgaaggatttcacggctcaaagtacacaagtggagaagtttattaatgacataacaacatggttcacaaaagtggaagaatcgttgatgaactgtgcccaaaatgagacttgtgaagcattgaaaaaagtcaaggatatacaaaaagaacttcaaagtcaacaaagcaacatcagctctacccaagaaaatctcaatagcttgtgccgcaagtaccactcagctgagttggagagcctgggccgtgcaatgactggtctgataaagaaacatgaagccgtgagccagttgtgctccaaaacccaggccagcctgcaggaatctctggaaaaacacttcagtgagtctatgcaggaattccaagaatggtttttgggagcaaaggcagcagcaaaagaatcatcagatcgcaccggtgacagcaaagttctagaagcaaagctccatgatcttcagaacattttggactcagtcagtgatgggcagagcaaacttgatgcagtgactcaagaaggacaaactttgtatgcacatttgtctaaacaaattgtcagtagcattcaagaacaaatcacaaaggccaatgaagagtttcaagcatttctgaaacaatgccttaaagataagcaggctcttcaagactgtgcttcagaacttggaagctttgaagatcagcacagaaaactgaacttatggatccatgaaatggaagaaaggttcaatacggaaaacttgggagagagtaaacagcacattcctgagaagaaaaatgaagttcataaagttgaaatgtttttgggagaactgctggctgcaagagagtctcttgataagctttcccagagagggcagcttctgagtgaagaaggccacggtgctgggcaggagggccgcctgtgttcccagctcctcacaagccaccagaacctacttagaatgaccaaagagaaactccggagctgccaggtggcccttcaggagcacgaagccctggaggaagcactgcaaagcatgtggttctgggtgaaggccattcaggacagactggcctgtgcagagagcactcttgggagcaaagacaccctggagaaacggctgtcacaaatacaggatattctcctgatgaaaggtgaaggggaagttaagttgaatatggccattggcaagggggaacaggccttgagaagtagcaacaaagaaggtcagagggtgattcagactcagttagagacccttaaagaagtgtgggctgacatcatgagctcctccgtccacgctcaaagcactttagagtctgtgattagccaatggaatgactatgtagagaggaaaaaccagttggagcagtggatggaatcagtggatcaaaaaatagaacatcccttacaaccacagccaggtctgaaagagaagttcgtcctgcttgaccacctccagtccatcctgtctgaggcagaagatcacacgagagcccttcaccgtctaattgcgaagtccagggagctctacgaaaagacagaggatgagtctttcaaggacacagctcaagaggagctgaaaacacagtttaatgatataatgactgttgccaaggaaaaaatgaggaaagtggaagagattgtgaaagatcatctaatgtatttagatgcggtccacgagttcacagattggctccattcagcaaaggaagaacttcaccggtggtcagatatgtctggagattcatcagccacccagaaaaagttatcaaaaattaaggagctgatagattccagagagattggtgcaagccgtctcagcagagtggagtcgctggctcccgaagtgaaacagaacacaactgccagtgggtgtgagctcatgcacacggagatgcaggccctgcgtgccgactggaagcagtgggaagacagtgtattccaaacgcagagctgtttggagaacctggtcagccagatggccctttcggagcaggaattctcaggccaagtggctcaactggagcaggccctggaacagttcagtgcccttctgaaaacctgggctcagcagttaaccctcctggaaggcaagaacacggatgaggagatagtggaatgctggcacaaaggacaagagatactggatgctttgcaaaaagcagagcctagaacagaggatctcaagtctcagctgaatgaactttgtcgattttccagagacctgagtacctacagtggaaaagtttctggcttgattaaagagtataattgtctttgtttgcaagcatccaagggctgccagaataaagaacagattttacagcaaagatttcgaaaggccttcagggatttccagcagtggttggttaatgcaaaaatcactaccgccaagtgttttgatatacctcaaaatataagtgaagtttcaactagtcttcagaaaatacaggagtttttgtcagaaagtgaaaatggacagcacaagctaaacatgatgctgtctaaaggggaacttctgagtaccctgctgaccaaagagaaagcgaaagggatccaggccaaagttacagctgcaaaagaagattggaaaaattttcattcaaatctccaccaaaaagaatctgctctagagaatctaaagatccaaatgaaggactttgaagtaagtgctgagcctatccaggactggctgagtaaaactgagaagatggtccatgaaagcagcaatcgcctctatgatctgccagcaaagaggagggagcagcagaagctccagtctgtccttgaggaaatacactgctacgagcctcagctcaacaggctgaaagagaaagctcagcagctgtgggaaggacaagctgccagcaagagctttaggcacagagtgtcgcagctgtcttctcagtatctagcgctaagcaatttaacaaaggagaaagtgtcaagactggatagaatcgttgcagaacacaatcagttctctcttgggattaaagaattacaagactggatgacggatgcgattcacatgctggattcatactgccacccgacatccgacaaaagtgtgctggacagcaggacgctcaagctcgaggctctattatcagtcaaacaggaaaaagagattcagatgaaaatgatagtgaccaggggagaatctgtccttcagaatacttctccagaaggcattcccactattcagcagcagctgcagagtgtgaaggatatgtgggcatcccttttgtctgcagggattcgttgtaaaagccaactcgaaggagctctctccaagtggacaagttatcaggatggcgttcgacagttctccggttggatggatagtatggaagccaacctgaatgaatcagaaaggcagcatgcggagctgcgggataaaacaacgatgctcggaaaagccaagttattaaatgaagaagtgctgagttacagcagcttgctggagaccatcgaagtcaaaggggctggcatgacagaacactatgtcacccagctagaactccaggatctacaggaacgatacagagccatccaagagagggccaaggaagccgtaaccaagtctgaaaaacttgtccgcctgcaccaagagtatcagagagacctaaaggcatttgaagtttggttggggcaagaacaagaaaagctcgaccagtattcagttcttgaaggtgatgcccacactcatgagacaacattgcgtgatcttcaggagctacaggtacactgtgcagaggggcaggccctgttgaactcagtgctgcacaccagagaggatgtgatcccatcaggtatcccacaggcagaggaccgggctttagagtctctccggcaagactggcaggcttaccagcacaggctgtccgagactcgaactcagttcaataacgtggtgaacaaattgaggctaatggagcaaaagtttcagcaagtagatgaatggctcaaaacagcagaggagaaagttagtcccaggaccagacgtcagtctaacagggcaaccaaggagatacaattacatcagatgaagaagtggcacgaagaagtgactgcatacagagatgaagttgaggaagtgggagctagagctcaggagatactggacgagagccacgtgaacagcagaatgggttgccaggccacccagctgacttccagataccaggccctgcttctccaagtgctggaacaaataaaattcctggaggaggagattcagagtttggaggaatcagaatcatccctcagttcctattctgattggtatggctctactcataaaaacttcaagaatgtggctaccaagattgacaaagtagatacagtaatgatggggaagaaattgaagacgttggaggttttgctcaaagacatggagaaaggtcacagtttgctgaaatcagcccgggagaaaggagagagggctgttaaatacttggaggaaggcgaggcagagaggttaagaaaggagattcatgatcacatggagcagttgaaggaactgaccagcactgtccggaaagaacacatgacgctggaaaaaggtcttcatttagcaaaggaattctcagataaatgcaaagcactgacacagtggatagcagaataccaggaaattctacatgttcctgaagaacccaaaatggaattatatgagaaaaaagctcagttatctaaatacaagtcacttcaacaaacggtgctgtcccatgaaccatcagtaaagtcagtgagagagaagggtgaagctcttttggaactggtgcaggacgtcactttaaaggacaaaatagatcaacttcaaagtgattaccaggacctgtgcagcataggaaaggagcatgtcttcagtctggaggcgaaagtcaaagaccatgaagactacaacagtgagctccaagaggtcgaaaagtggctgctgcagatgtctggcagactggtggcacctgacctcctggagacaagcagcctggagacaatcacccagcaattggcccaccacaaggcaatgatggaagaaattgctggttttgaagaccgtttgaacaatcttcaaatgaaaggtgatactttgattggccaatgtgcagaccacctgcaagcgaaacttaaacaaaacgtgcatgctcatctgcagggcacaaaggacagctactcagcgatctgcagcacagctcagaggatgtaccagagtttggaacacgaacttcagaagcacgtcagccgacaagacaccctgcagcagtgccaggcctggctttctgcagtccagccggatttagagccaagtcctcaaccacctcttagtagggcagaagccattaagcaggtcaaacacttcagagctttgcaagagcaggcaaggacctacctagatctcctttgctccatgtgtgacctgtcaaatgcttcggtgaaaaccacagcaaaagacattcaacaaacagagcaaacgattgaacaaaagcttgtccaggcccagaacttaactcagggctgggaagagatcaagcacctgaagtctgagctctggatttacctgcaagatgctgatcagcaactgcagaacatgaagaggaggcactctgagctggagctgaacattgcacagaacatggtttcacaagttaaggattttgttaagaaactacagagcaaacaggcatccgtgaacaccataatagaaaaggtgaataagttaacaaagaaggaggaatcgcctgaacacaaggaaataaatcatttaaatgatcagtggctcgatttgtgccgtcagtctaacaacctgtgcttgcaaagggaagaggatcttcagagaacaagagattaccatgactgtatgaatgttgttgaagtgttcctagaaaaatttactacagaatgggataacttggccagatctgatgcagagagtacagctgtccacctggaagctttgaaaaagttagcattggcattgcaggagagaaagtatgctattgaagatctgaaagatcaaaagcagaaaatgatagagcatctgaatttagatgacaaggagttagtcaaagaacagacgagtcatttagagcaacgttggtttcagcttgaggacctcattaaaaggaaaatccaagtgtcagtcaccaacttggaggagttaaatgtggtgcagtccagatttcaggagctaatggagtgggcagaagagcaacaacccaacatcgccgaggcccttaagcagagccctcctccagatatggctcagaaccttctcatggatcacctggccatctgcagtgaactggaggccaagcagatgctcctgaaatcgcttataaaggacgcagacagggtcatggcagatcttggtctcaatgagcgacaggtcatccagaaggctctctctgatgcacaaagccacgtgaattgtctcagtgacttagtgggccagcgaagaaagtacttaaacaaagccttgtccgagaaaacccagtttctcatggcagtgttccaggccaccagccaaattcagcaacatgagcgaaagataatgttccgtgaacacatctgtctgttaccagatgatgtgagcaaacaagtcaaaacatgtaagagtgcacaagccagcctcaagacttaccaaaatgaagtcactggactttgggcccagggtcgcgaactaatgaaggaagtcacagagcaggaaaagagtgaagtgctggggaagcttcaggaattgcagagtgtctatgacagtgttttacaaaagtgcagtcaccggttacaagaactagagaagaatttggtttctaggaagcattttaaggaagattttgataaagcttgccactggctaaaacaagcagatattgttacatttcctgaaatcaacctaatgaatgagagttctgagcttcatacacaactggctaaataccaaaacattcttgaacaatctccagaatatgaaaatcttctacttacgctgcagagaactgggcagaccatattaccatcgctgaatgaagtcgatcattcctacctcagtgaaaagctaaatgctttgcctcgacaatttaatgtaattgttgccttggctaaagacaagttctataaagtccaggaagcaattcttgctcggaaggaatatgcttccttgattgagttgacaacccagtctctgagtgaacttgaagcccaattcttgaggatgagcaaagttcccaccgacctggccgttgaggaggctctttctctgcaagatggttgcagagccattctggacgaggtggcgggccttggggaggcggtggatgaactgaaccagaaaaaagaaggttttcgcagcacaggtcagccttggcagccagacaagatgctgcaccttgtcaccttatatcacaggctgaagcgacaaacagaacagagggttagcttattagaagacaccaccagtgcttaccaagaacacgagaagatgtgccaacagctggagagacaactgaagtctgtaaaagaggagcagtccaaagtgaatgaggaaacgctgcctgcagaggagaagctcaaaatgtatcactccctggcaggaagtctccaggactcagggattgtactgaaacgagtaaccatacatcttgaagatcttgccccacaccttgaccccttggcttatgagaaagccaggcatcagatccagtcctggcaaggggagttaaaactgttgacttctgccattggtgagacggtgacagaatgtgagagccgaatggtgcagagtatagacttccagactgagatgagtcgctccctggactggctgaggagagtgaaggcagagctcagtgggccggtgtacctagacctcaacctgcaggacatccaagaggaaatcagaaaaatccaaattcatcaggaagaggtccagtccagcttgagaatcatgaatgcgctgagtcacaaggaaaaggagaagttcacaaaggccaaggagctgatttctgcggatttagaacacagcctcgctgagctctcagagctggatggagacatccaggaagccttacgcaccagacaggctaccttgactgaaatatatagccagtgtcaaaggtattatcaggtatttcaagcagccaatgactggcttgaggatgcccaagaattgttacagctggcaggcaatggcctagacgtggagagcgcagaggaaaatctcaaaagccacatggaatttttcagtacagaggatcagttccatagtaacctggaggagctccacagcctggtagccaccctggacccactcatcaagccaaccggcaaagaagacctagaacagaaagtggcttctctggaactcaggagccagaggatgagccgggactctggtgcccaagtggatctcttgcagagatgcacagctcaatggcacgattaccagaaagcaagggaagaggttattgaattgatgaatgatacagaaaagaaattgtctgagttttctttgttgaagacttcgtctagtcatgaagcggaagaaaaattgtcagaacacaaggctttagtgtcagtggttaactctttccatgagaaaattgtggcccttgaggaaaaagcttcacaactggagaaaaccggaaatgatgccagcaaagccaccctgagcaggtcaatgaccaccgtctggcagcgctggacacgccttcgagctgtggcccaggaccaggagaagatcctggaagatgcagtggatgagtggacgggctttaacaacaaggttaaaaaggccactgaaatgattgatcagctgcaagataagttacctggaagttcagcagagaaagcatcgaaagcagagctcttaactcttcttgaataccacgacacgttcgttctggagctggagcagcagcagtcggccttgggcatgctgcggcagcaaaccctgagcatgctccaggatggagccgccccaacccctggggaagagcctccgctcatgcaggaaatcaccgccatgcaagatcggtgcctgaacatgcaggagaaagtgaagactaatggaaagttggtgaagcaagagctgaaggaccgagaaatggtggagactcagatcaattctgtgaaatgttgggttcaggaaacgaaagaatatttagggaatccaacaatagaaatagatgctcaacttgaagaacttcagattctcctaacagaagccacaaatcaccgacagaacattgaaaaaatggcagaagaacagaaggagaagtacttaggtctttataccatattaccttctgaactctcccttcagttggctgaagtggcgttagatctaaagatccgagatcagatccaagacaaaataaaagaagttgagcagagcaaggccacgagccaggaactcagccggcaaattcagaagttagctaaagacctcacaactattctaactaagctgaaagcgaagacagataatgtagttcaagctaaaactgaccaaaaggtgctgggagaggaattagatggctgtaattcaaagttaatggaattagatgcagcagtacagaaattcttggaacagaatggccaactgggtaagccactggccaagaagataggaaaactgactgaacttcaccagcagaccattagacaagctgagaatcggctctccaagctcaatcaggcagcatcacatttagaagaatacaatgaaatgcttgaattaattttgaagtggattgaaaaagctaaagtcttggctcatggaactattgcatggaattctgcaagccagcttcgggaacaatatattttgcatcagaccctgctagaagaatccaaagaaattgacagtgagctggaagcaatgactgagaaattacagtacctcactagcgtgtactgtacagaaaaaatgtctcagcaagtggcagaactgggacgggagactgaggagttgcgacagatgatcaaaattcgtttgcagaacctccaagatgcagctaaggatatgaaaaaatttgaagcagagttgaaaaagttacaagctgccttggagcaagcccaggcaacactgacttctccagaagttggacgtctcagtctcaaggagcagctctctcatcggcagcatttgttgtctgagatggagtcactgaagccgaaggtgcaagcagtgcagctctgccagagtgccctccggatccccgaggatgtggttgccagcttacctctctgtcatgctgctctgcggctgcaggaagaggccagccggctgcagcacaccgccatccagcagtgtaacatcatgcaggaagctgtggtacaatatgaacaatatgagcaagaaatgaaacatctccagcaactgatagaaggagctcacagagagattgaggataaacctgttgccaccagtaacatacaggagctgcaggctcagatttctcggcatgaggagctggcgcagaaaattaagggctaccaggagcagatcgcttctttgaattccaagtgcaagatgctgacgatgaaagccaagcacgccaccatgctgctgacggtgaccgaggtcgaggggctggcggaagggacagaggacctggatggggagctcctccccacgccttcggcccacccctctgtggtcatgatgactgcaggtcgctgtcacactttgctgtcaccggtcactgaggagtctggggaggagggaaccaacagtgagatttcctctccacctgcctgtcgctccccttcacctgtggctaatacagatgcttctgttaaccaggacattgcatattaccaagccttgtctgctgagaggttgcagacagatgctgcaaaaattcaccccagcacatccgcatcccaggagttctatgaaccgggattggagccatccgctactgccaaactgggtgatttgcagcgttcttgggaaaccttaaagaatgtgatcagtgagaagcagcgcacactctatgaagctttggaacgccagcagaagtaccaggactccctccagtccatctctacgaagatggaggccattgagctgaaactcagtgagagcccagagcctggcaggagtccagaaagccagatggctgaacatcaggcattgatggatgagattctcatgctccaggatgaaatcaatgagctccagtcctctctcgcagaggagctggtatccgagtcttgtgaggccgaccctgcggagcagctggccttgcagtccacgctcactgtcttagccgagcgaatgtccaccatcaggatgaaagcctcggggaaacggcagcttttggaggagaagttgaatgatcagctggaggaacaaaggcaggaacaggccctgcagaggtatcgctgtgaagccgatgagctggacagctggctcttgagtaccaaggccactctggacactgcgctgagtccacccaaggagcccatggacatggaggcccagcttatggactgccagaatatgctggtggaaatagagcagaaggtggtggctttatcagaactgtcagtccacaatgagaacctgctgctggagggcaaagctcacaccaaggacgaggccgagcagctggctggaaagctgagaaggctcaaggggagcctgctggagctgcagagagccctgcatgataagcagctcaacatgcagggaacagcacaggagaaggaggagagcgatgttgacctaacagccacgcagagccccggcgtccaggaatggctggcccaagctcgcaccacatggacccagcagcggcagagcagtctccagcaacaaaaagagttagaacaggaattagccgagcagaagagtctccttcgctcagtagccagtcgtggagaggagattctaattcaacattcggcggcagagacctctggtgatgctggcgaaaaacctgatgtgttatcccaggagttggggatggaaggggagaaatcatccgctgaagaccagatgagaatgaaatgggaaagcctacatcaagaatttagtaccaagcagaaactactacagaatgttctggaacaggaacaagagcaagtgctttatagcaggccaaatcgactcttgtctggtgtgccactgtacaaaggggacgtgccaacccaagataaatctgcagttacatctttgctggatggactgaaccaagccttcgaggaggtttcatcccagagtggaggggcaaagaggcagagtatacacttggagcagaagttgtatgatggagtctcagccacctctacttggttggatgacgttgaagaacgtttatttgttgccacagcacttttaccagaagaaacagagacttgtctcttcaaccaagagattcttgccaaagacattaaggaaatgtctgaagaaatggataagaacaaaaacttgttttcccaagcttttccagagaatggtgataatcgagatgttattgaagatactttgggttgtcttttgggcaggttatccttgctagactcagtagtgaatcaacgatgtcatcagatgaaagaaagacttcagcaaatactaaatttccagaatgatctgaaagtgctgtttacatcactggctgacaacaaatacatcattctgcaaaaactggcaaatgtgtttgaacagcccgtagcagaacaaatagaggcaatacaacaggctgaagatggactcaaagaatttgatgcaggaatcattgaattaaagaggcgtggtgacaagctacaggtcgagcagccgtccatgcaagaactctccaagctccaggacatgtatgatgagctgatgatgatcattggctcccggaggagtggtctgaatcagaaccttacactcaagagtcagtatgagagggccctacaagatctggctgacctgctagaaactggtcaggagaagatggcaggagaccagaaaatcatcgtgtcttccaaagaggaaatccagcaactacttgacaaacataaggaatactttcagggcctggaatctcatatgatcttgactgaaacactcttcagaaagataatcagctttgcagtccaaaaggaaacccagttccatacagagctgatggctcaggcttctgctgtactgaaacgggctcacaagaggggtgtggagctggagtacattctagagacgtggtcccatctggatgaggaccagcaggagctcagcagacagctggaggtggtggaaagcagcatcccaagcgtgggtctggtggaggagaacgaggacaggcttattgaccgcataacactctaccagcatttaaaatctagccttaatgaataccagcccaaattatatcaagtattagatgatgggaaacgacttctgatatccatcagctgctcagatctagaaagccaactaaatcaacttggagagtgctggctaagtaacaccaataaaatgtctaaggaacttcacagactggaaacaatattgaaacactggaccagatatcaaagtgaatctgcagatctaattcactggttacaatctgcaaaagaccggctagaattttggactcagcaatctgtgacagtcccacaagagctggaaatggtccgtgatcatctaaatgctttcctggagttttctaaagaagtggatgcccaatcttccctgaaatcatctgttctgagtactggaaatcagctccttcgactaaaaaaggtggacacagccacgctgcgctctgagctgtcgcgcattgatagccagtggactgacctgctaaccaatatcccagccgtccaggagaagctccaccagctccagatggataaactgccttcccgccatgccatttctgaagtcatgagttggatttctctaatggaaaatgttattcagaaggatgaagataatattaaaaattccataggttacaaggcaattcatgaataccttcagaaatataagggttttaagatagacattaactgtaaacagctgacagtggattttgtgaaccagtccgtgctacaaatcagcagtcaggatgtggaaagtaagcgtagtgataagactgattttgctgagcaacttggagcaatgaataaaagttggcaaattctgcaaggtctagtaactgagaagatccagctgttggaaggcttattggaatcttggtcagaatatgaaaataatgtacaatgtctgaaaacatggtttgaaacccaggaaaagagactaaaacaacagcatcgaattggagatcaggcttctgttcaaaatgcactgaaagactgtcaggatctggaagatttgattaaagcaaaagaaaaagaagtagagaaaattgagcagaatggacttgctttgattcagaacaagaaagaagacgtctctagcattgtcatgagcacactgcgagagctcggccaaacctgggcaaatttagatcacatggttggacaattaaagatactgctgaaatcagtgcttgaccaatggagtagtcacaaagtggcctttgacaagataaacagttacctcatggaggccagatactctctttcccgattccgtctgctgactggctccttagaagctgtgcaagttcaggtggacaatcttcagaatctccaagatgatctggaaaaacaggaaaggagcttacagaaatttggctctatcaccaaccaattattaaaagagtgtcacccacccgtgacagaaactcttaccaatacactgaaagaagtcaacatgagatggaataacttgctggaagagattgctgagcagctacagtccagcaaggccctacttcagctttggcaaagatacaaggactactccaaacagtgtgcttcgacagttcagcagcaggaggatcgaaccaatgagctgttgaaggcagccacaaacaaggacattgccgatgatgaggttgccacatggattcaagattgcaacgacctcctcaaaggactgggcacagttaaagattccctcttttttctccatgagctgggagagcaactgaagcaacaagtggatgcttccgcagcatcagctattcaatcggatcaactctctttgagtcaacacttgtgtgccctggagcaagctctctgcaaacagcagacttcattacaggctggagttcttgattatgaaacctttgccaagagtttagaagctttggaggcctggatagtggaagctgaagaaatactacaagggcaggaccctagccactcatctgacctctccacaatccaggaaaggatggaagaacttaagggacagatgttaaaattcagcagcatggctccagatttagaccgtctaaatgagcttggatataggttacccttgaatgataaggaaatcaaaagaatgcagaatctgaaccgccattggtctctgatctcctctcagactacagaaagattcagcaagttgcagtcatttttgctacaacatcagactttcttggaaaaatgtgaaacatggatggaattcctagttcagacagaacaaaagttagcagtagagatttcaggaaattatcagcaccttttggaacagcagagagcacacgagttgtttcaagccgagatgttcagtcgtcagcagattttgcactcaatcattattgatgggcaacgtcttctagaacaaggtcaagttgatgacagggatgaattcaacctgaaattgacactcctcagtaatcaatggcagggagtgattcgcagggcccagcagaggcgggggatcattgacagccagattcgccagtggcagcgctatagggagatggcagaaaagcttcgtaaatggttggttgaagtgtcctacctccccatgagtggtctcggaagtgttcctataccactgcaacaagcaaggaccctctttgatgaagtgcagttcaaagaaaaagtgtttctgcggcaacaaggcagctacatcctgactgtggaggctggcaagcaactccttctctcggcggacagtggcgctgaggccgccttgcaggccgaactcgctgaaatccaagagaaatggaaatcagccagcatgcggctggaagaacagaagaaaaaactagccttcttgttgaaagactgggaaaaatgtgagaaaggaatagcagattccctggagaaactacgaactttcaaaaagaagctttcgcagtctctcccggatcaccatgaagagctccatgcagaacaaatgcgttgcaaggaattagaaaatgcagttgggagctggacagatgacttgacccagttgagcctgctgaaggacaccctctctgcctatatcagtgctgatgatatctccattcttaatgaacgcgtagagcttctgcaaaggcagtgggaagaactatgccaccagctctccttaaggcggcagcaaataggtgaaagattgaatgaatgggcagtcttcagtgaaaagaacaaggaactctgtgagtggttgactcaaatggaaagcaaagtttctcagaatggagacattctcattgaagaaatgatagagaagctcaagaaggattatcaagaggaaattgctattgctcaagagaacaaaatacagctccaacaaatgggagaacgacttgctaaagccagccatgaaagcaaagcatctgagattgaatacaagctgggaaaggtcaacgaccggtggcagcatctcctggacctcattgcagccagggtgaagaagctgaaggagaccctggtagccgtgcagcagcttgataagaacatgagcagcctgaggacctggctcgctcacatcgagtcagagctggccaagccaatagtctacgattcctgtaactcggaagaaatacagagaaagcttaatgagcagcaggagcttcagagagacatagagaagcacagtacaggtgttgcatctgtcctcaacctgtgtgaagtcctgctgcacgactgtgacgcctgtgccactgatgccgagtgtgactctatacagcaggctacgagaaacctggaccggcggtggagaaacatttgtgctatgtccatggaaaggaggctgaaaatcgaagagacgtggcgattgtggcagaaatttctggatgactattcacgttttgaagattggctgaagtcttcagaaaggacagctgcttttcccagctcttctggggtgatctatacagttgccaaggaagaactaaagaaatttgaggctttccagcgacaggtccacgagtgcctgacgcagctggaactgatcaacaagcagtaccgccgcctggccagggagaaccgcactgattcagcatgtagcctcaaacagatggttcacgaaggcaaccagagatgggacaacctgcaaaagcgtgtcacctccatcttgcgcagactcaagcattttattggccagcgtgaggagtttgagactgcgcgggacagcattctggtctggctcacagagatggatctgcagctcactaatattgaacatttttctgagtgtgatgttcaagctaaaataaagcaactcaaggccttccagcaggaaatttcactgaaccacaataagattgagcagataattgcccaaggagaacagctgatagaaaagagtgagcccttggatgcagcgatcatcgaggaggaactagatgagctccgacggtactgccaggaggtcttcgggcgtgtggaaagataccataagaaactgatccgcctgcctctcccagacgatgagcacgacctctcagacagggagctggagctggaagactctgcagctctgtcggacctgcactggcacgaccgctctgcagacagcctgctttctccacagccttcctccaatctctccctctcgctcgctcagcccctccggagcgagcggtcaggacgagacaccccggctagtgtggactccatccccctggagtgggatcacgactatgacctcagtcgggacctggagtctgcaatgtccagagctctgccctctgaggatgaagaaggtcaggatgacaaagatttctacctccggggagctgttggcttatcaggggaccacagtgccctagagtcacagatccgacaactgggcaaagccctggatgatagccgttttcagatacagcaaaccgaaaatatcattcgcagcaaaactcccacggggccggagctagacaccagctacaaaggctacatgaaactgctgggcgaatgcagtagcagtatagactccgtgaagagactggagcacaaactgaaggaggaagaggagagccttcctggctttgttaacctgcatagtaccgaaacccaaacggctggtgtgattgaccgatgggagcttctccaggcccaggcattgagcaaggagttgaggatgaagcagaacctccagaagtggcagcagtttaactcagacttgaacagcatctgggcctggctgggggacacggaggaggagttggaacagctccagcgtctggaactcagcactgacatccagaccatcgagctccagatcaaaaagctcaaggagctccagaaagctgtggaccaccgcaaagccatcatcctctccatcaatctctgcagccctgagttcacccaggctgacagcaaggagagccgggacctgcaggatcgcttgtcgcagatgaatgggcgctgggaccgagtgtgctctctgctggaggagtggcggggcctgctgcaggatgccctgatgcagtgccagggtttccatgaaatgagccatggtttgcttcttatgctggagaacattgacagaaggaaaaatgaaattgtccctattgattctaaccttgatgcagagatacttcaggaccatcacaaacagcttatgcaaataaagcatgagctgttggaatcccaactcagagtagcctctttgcaagacatgtcttgccaactactggtgaatgctgaaggaacagactgtttagaagccaaagaaaaagtccatgttattggaaatcggctcaaacttctcttgaaggaggtcagtcgtcatatcaaggaactggagaagttattagacgtgtcaagtagtcagcaggatttgtcttcctggtcttctgctgatgaactggacacctcagggtctgtgagtcccacatcaggaaggagcaccccaaacagacagaaaacgccacgaggcaagtgtagtctctcacagcctggaccctctgtcagcagtccacatagcaggtccacaaaaggtggctccgattcctccctttctgagccagggccaggtcggtccggccgcggcttcctgttcagagtcctccgagcagctcttccccttcagcttctcctgctcctcctcatcgggcttgcctgccttgtaccaatgtcagaggaagactacagctgtgccctctccaacaactttgcccggtcattccaccccatgctcagatacacgaatggccctcctccactctgaactaagcagatgccatctgcagaagtgctggtagcataaggaggatcgggtcataagcaatcccaaactaccaacaagaggaccttgatcttggcgaaagccctcggtgtggcagctttagccctcctccagatcacatgtgtgcaaattatggcttcagaggtggaagataaacagtgacgggggaacaaacagacaacaagaaggtttggaagaaatctggtttgagactctgaaccttagcactaaggagattgagtaaggacctccaaagttccccggactcatgaattctgggcccttggcccattctgtgcacagccaaggacttcagtagaccatctgggcagctttcccatggtgctgctccaaccatcagataaatgaccctcccaagcaccatgtcagtgtcgtacaatctaccaaccaaccagtgctgaagagattttagaaccttgtaacatacaatttttaagagcttatatggcagcttcctttttaccttgttttcctttggggcatgatgttttaacctttgctttagaagcacaagctgtaaatctaaaaggcacttttttttagaggtataaagaaaaactagatgtaataaataagatcatggaaggctttatgtgaaaaaagttgaatgttatagtaaaaaaaaaaagatatttatgtatgtacagtttgctaaagccaagttttgtttgtattgatttctttgcatttattatagatattataaaatagtt

SEQ ID NO: 185310 - DNA, 5022 bp, Homo sapiens
  Payload ID: 16494
  Gene Symbol: SYNE1
  Gene Name: spectrin repeat containing, nuclear envelope 1
  ENST ID: ENST00000367257
  CDS Start-End: 1-4068
gaaacctttgccaagagtttagaagctttggaggcctggatagtggaagctgaagaaatactacaagggcaggaccctagccactcatctgacctctccacaatccaggaaaggatggaagaacttaagggacagatgttaaaattcagcagcatggctccagatttagaccgtctaaatgagcttggatataggttacccttgaatgataaggaaatcaaaagaatgcagaatctgaaccgccattggtctctgatctcctctcagactacagaaagattcagcaagttgcagtcatttttgctacaacatcagactttcttggaaaaatgtgaaacatggatggaattcctagttcagacagaacaaaagttagcagtagagatttcaggaaattatcagcaccttttggaacagcagagagcacacgagttgtttcaagccgagatgttcagtcgtcagcagattttgcactcaatcattattgatgggcaacgtcttctagaacaaggtcaagttgatgacagggatgaattcaacctgaaattgacactcctcagtaatcaatggcagggagtgattcgcagggcccagcagaggcgggggatcattgacagccagattcgccagtggcagcgctatagggagatggcagaaaagcttcgtaaatggttggttgaagtgtcctacctccccatgagtggtctcggaagtgttcctataccactgcaacaagcaaggaccctctttgatgaagtgcagttcaaagaaaaagtgtttctgcggcaacaaggcagctacatcctgactgtggaggctggcaagcaactccttctctcggcggacagtggcgctgaggccgccttgcaggccgaactcgctgaaatccaagagaaatggaaatcagccagcatgcggctggaagaacagaagaaaaaactagccttcttgttgaaagactgggaaaaatgtgagaaaggaatagcagattccctggagaaactacgaactttcaaaaagaagctttcgcagtctctcccggatcaccatgaagagctccatgcagaacaaatgcgttgcaaggaattagaaaatgcagttgggagctggacagatgacttgacccagttgagcctgctgaaggacaccctctctgcctatatcagtgctgatgatatctccattcttaatgaacgcgtagagcttctgcaaaggcagtgggaagaactatgccaccagctctccttaaggcggcagcaaataggtgaaagattgaatgaatgggcagtcttcagtgaaaagaacaaggaactctgtgagtggttgactcaaatggaaagcaaagtttctcagaatggagacattctcattgaagaaatgatagagaagctcaagaaggattatcaagaggaaattgctattgctcaagagaacaaaatacagctccaacaaatgggagaacgacttgctaaagccagccatgaaagcaaagcatctgagattgaatacaagctgggaaaggtcaacgaccggtggcagcatctcctggacctcattgcagccagggtgaagaagctgaaggagaccctggtagccgtgcagcagcttgataagaacatgagcagcctgaggacctggctcgctcacatcgagtcagagctggccaagccaatagtctacgattcctgtaactcggaagaaatacagagaaagcttaatgagcagcaggagcttcagagagacatagagaagcacagtacaggtgttgcatctgtcctcaacctgtgtgaagtcctgctgcacgactgtgacgcctgtgccactgatgccgagtgtgactctatacagcaggctacgagaaacctggaccggcggtggagaaacatttgtgctatgtccatggaaaggaggctgaaaatcgaagagacgtggcgattgtggcagaaatttctggatgactattcacgttttgaagattggctgaagtcttcagaaaggacagctgcttttcccagctcttctggggtgatctatacagttgccaaggaagaactaaagaaatttgaggctttccagcgacaggtccacgagtgcctgacgcagctggaactgatcaacaagcagtaccgccgcctggccagggagaaccgcactgattcagcatgtagcctcaaacagatggttcacgaaggcaaccagagatgggacaacctgcaaaagcgtgtcacctccatcttgcgcagactcaagcattttattggccagcgtgaggagtttgagactgcgcgggacagcattctggtctggctcacagagatggatctgcagctcactaatattgaacatttttctgagtgtgatgttcaagctaaaataaagcaactcaaggccttccagcaggaaatttcactgaaccacaataagattgagcagataattgcccaaggagaacagctgatagaaaagagtgagcccttggatgcagcgatcatcgaggaggaactagatgagctccgacggtactgccaggaggtcttcgggcgtgtggaaagataccataagaaactgatccgcctgcctctcccagacgatgagcacgacctctcagacagggagctggagctggaagactctgcagctctgtcggacctgcactggcacgaccgctctgcagacagcctgctttctccacagccttcctccaatctctccctctcgctcgctcagcccctccggagcgagcggtcaggacgagacaccccggctagtgtggactccatccccctggagtgggatcacgactatgacctcagtcgggacctggagtctgcaatgtccagagctctgccctctgaggatgaagaaggtcaggatgacaaagatttctacctccggggagctgttggcttatcaggggaccacagtgccctagagtcacagatccgacaactgggcaaagccctggatgatagccgttttcagatacagcaaaccgaaaatatcattcgcagcaaaactcccacggggccggagctagacaccagctacaaaggctacatgaaactgctgggcgaatgcagtagcagtatagactccgtgaagagactggagcacaaactgaaggaggaagaggagagccttcctggctttgttaacctgcatagtaccgaaacccaaacggctggtgtgattgaccgatgggagcttctccaggcccaggcattgagcaaggagttgaggatgaagcagaacctccagaagtggcagcagtttaactcagacttgaacagcatctgggcctggctgggggacacggaggaggagttggaacagctccagcgtctggaactcagcactgacatccagaccatcgagctccagatcaaaaagctcaaggagctccagaaagctgtggaccaccgcaaagccatcatcctctccatcaatctctgcagccctgagttcacccaggctgacagcaaggagagccgggacctgcaggatcgcttgtcgcagatgaatgggcgctgggaccgagtgtgctctctgctggaggagtggcggggcctgctgcaggatgccctgatgcagtgccagggtttccatgaaatgagccatggtttgcttcttatgctggagaacattgacagaaggaaaaatgaaattgtccctattgattctaaccttgatgcagagatacttcaggaccatcacaaacagcttatgcaaataaagcatgagctgttggaatcccaactcagagtagcctctttgcaagacatgtcttgccaactactggtgaatgctgaaggaacagactgtttagaagccaaagaaaaagtccatgttattggaaatcggctcaaacttctcttgaaggaggtcagtcgtcatatcaaggaactggagaagttattagacgtgtcaagtagtcagcaggatttgtcttcctggtcttctgctgatgaactggacacctcagggtctgtgagtcccacatcaggaaggagcaccccaaacagacagaaaacggtccacaaaaggtggctccgattcctccctttctgagccagggccaggtcggtccggccgcggcttcctgttcagagtcctccgagcagctcttccccttcagcttctcctgctcctcctcatcgggcttgcctgccttgtaccaatgtcagaggaagactacagctgtgccctctccaacaactttgcccggtcattccaccccatgctcagatacacgaatggccctcctccactctgaactaagcagatgccatctgcagaagtgctggtagcataaggaggatcgggtcataagcaatcccaaactaccaacaagaggaccttgatcttggcgaaagccctcggtgtggcagctttagccctcctccagatcacatgtgtgcaaattatggcttcagaggtggaagataaacagtgacgggggaacaaacagacaacaagaaggtttggaagaaatctggtttgagactctgaaccttagcactaaggagattgagtaaggacctccaaagttccccggactcatgaattctgggcccttggcccattctgtgcacagccaaggacttcagtagaccatctgggcagctttcccatggtgctgctccaaccatcagataaatgaccctcccaagcaccatgtcagtgtcgtacaatctaccaaccaaccagtgctgaagagattttagaaccttgtaacatacaatttttaagagcttatatggcagcttcctttttaccttgttttcctttggggcatgatgttttaacctttgctttagaagcacaagctgtaaatctaaaaggcacttttttttagaggtataaagaaaaactagatgtaataaataagatcatggaaggctttatgtgaaaaaagttgaatgttatagtaaaaaaaaaaagatatttatgtatgtacagtttgctaaagccaagttttgtttgtattgatttctttgcatttattatagatattataaaata

SEQ ID NO: 185311 - DNA, 1546 bp, Homo sapiens
  Payload ID: 16494
  Gene Symbol: SYNE1
  Gene Name: spectrin repeat containing, nuclear envelope 1
  ENST ID: ENST00000454018
  CDS Start-End: 1-1533
gagctgatagattccagagagattggtgcaagccgtctcagcagagtggagtcgctggctcccgaagtgaaacagaacacaactgccagtgggtgtgagctcatgcacacggagatgcaggccctgcgtgccgactggaagcagtgggaagacagtgtattccaaacgcagagctgtttggagaacctggtcagccagatggccctttcggagcaggaattctcaggccaagtggctcaactggagcaggccctggaacagttcagtgcccttctgaaaacctgggctcagcagttaaccctcctggaaggcaagaacacggatgaggagatagtggaatgctggcacaaaggacaagagatactggatgctttgcaaaaagcagagcctagaacagaggatctcaagtctcagctgaatgaactttgtcgattttccagagacctgagtacctacagtggaaaagtttctggcttgattaaagagtataattgtctttgtttgcaagcatccaagggctgccagaataaagaacagattttacagcaaagatttcgaaaggccttcagggatttccagcagtggttggttaatgcaaaaatcactaccgccaagtgttttgatatacctcaaaatataagtgaagtttcaactagtcttcagaaaatacaggagtttttgtcagaaagtgaaaatggacagcacaagctaaacatgatgctgtctaaaggggaacttctgagtaccctgctgaccaaagagaaagcgaaagggatccaggccaaagttacagctgcaaaagaagattggaaaaattttcattcaaatctccaccaaaaagaatctgctctagagaatctaaagatccaaatgaaggactttgaagtaagtgctgagcctatccaggactggctgagtaaaactgagaagatggtccatgaaagcagcaatcgcctctatgatctgccagcaaagaggagggagcagcagaagctccagtctgtccttgaggaaatacactgctacgagcctcagctcaacaggctgaaagagaaagctcagcagctgtgggaaggacaagctgccagcaagagctttaggcacagagtgtcgcagctgtcttctcagtatctagcgctaagcaatttaacaaaggagaaagtgtcaagactggatagaatcgttgcagaacacaatcagttctctcttgggattaaagaattacaagactggatgacggatgcgattcacatgctggattcatactgccacccgacatccgacaaaagtgtgctggacagcaggacgctcaagctcgaggtgtgcatctttacacagaaatatctccaacctacagaatttgtttttctcaaaatttcccgtctccatccacctggggtgatgatgtcacattctctccatgataaatctcagatgctttgtgagtgcaacgctgtctgccttgggtgcacatgccagagaattcctgaatcatctgaccccggatgttttccaaaaaataaaataaaataaagcccgaatgtga

SEQ ID NO: 185312 - DNA, 6001 bp, Homo sapiens
  Payload ID: 16494
  Gene Symbol: SYNE1
  Gene Name: spectrin repeat containing, nuclear envelope 1
  ENST ID: ENST00000448038
  CDS Start-End: 3265-4407
ctcgatttgtgccgtcagtctaacaacctgtgcttgcaaagggaagaggatcttcagagaacaagagattaccatgactgtatgaatgttgttgaagtgttcctagaaaaatttactacagaatgggataacttggccagatctgatgcagagagtacagctgtccacctggaagctttgaaaaagttagcattggcattgcaggagagaaagtatgctattgaagatctgaaagatcaaaagcagaaaatgatagagcatctgaatttagatgacaaggagttagtcaaagaacagacgagtcatttagagcaacgttggtttcagcttgaggacctcattaaaaggaaaatccaagtgtcagtcaccaacttggaggagttaaatgtggtgcagtccagatttcaggagctaatggagtgggcagaagagcaacaacccaacatcgccgaggcccttaagcagagccctcctccagatatggctcagaaccttctcatggatcacctggccatctgcagtgaactggaggccaagcagatgctcctgaaatcgcttataaaggacgcagacagggtcatggcagatcttggtctcaatgagcgacaggtcatccagaaggctctctctgatgcacaaagccacgtgaattgtctcagtgacttagtgggccagcgaagaaagtacttaaacaaagccttgtccgagaaaacccagtttctcatggcagtgttccaggccaccagccaaattcagcaacatgagcgaaagataatgttccgtgaacacatctgtctgttaccagatgatgtgagcaaacaagtcaaaacatgtaagagtgcacaagccagcctcaagacttaccaaaatgaagtcactggactttgggcccagggtcgcgaactaatgaaggaagtcacagagcaggaaaagagtgaagtgctggggaagcttcaggaattgcagagtgtctatgacagtgttttacaaaagtgcagtcaccggttacaagaactagagaagaatttggtttctaggaagcattttaaggaagattttgataaagcttgccactggctaaaacaagcagatattgttacatttcctgaaatcaacctaatgaatgagagttctgagcttcatacacaactggctaaataccaaaacattcttgaacaatctccagaatatgaaaatcttctacttacgctgcagagaactgggcagaccatattaccatcgctgaatgaagtcgatcattcctacctcagtgaaaagctaaatgctttgcctcgacaatttaatgtaattgttgccttggctaaagacaagttctataaagtccaggaagcaattcttgctcggaaggaatatgcttccttgattgagttgacaacccagtctctgagtgaacttgaagcccaattcttgaggatgagcaaagttcccaccgacctggccgttgaggaggctctttctctgcaagatggttgcagagccattctggacgaggtggcgggccttggggaggcggtggatgaactgaaccagaaaaaagaaggttttcgcagcacaggtcagccttggcagccagacaagatgctgcaccttgtcaccttatatcacaggctgaagcgacaaacagaacagagggttagcttattagaagacaccaccagtgcttaccaagaacacgagaagatgtgccaacagctggagagacaactgaagtctgtaaaagaggagcagtccaaagtgaatgaggaaacgctgcctgcagaggagaagctcaaaatgtatcactccctggcaggaagtctccaggactcagggattgtactgaaacgagtaaccatacatcttgaagatcttgccccacaccttgaccccttggcttatgagaaagccaggcatcagatccagtcctggcaaggggagttaaaactgttgacttctgccattggtgagacggtgacagaatgtgagagccgaatggtgcagagtatagacttccagactgagatgagtcgctccctggactggctgaggagagtgaaggcagagctcagtgggccggtgtacctagacctcaacctgcaggacatccaagaggaaatcagaaaaatccaaattcatcaggaagaggtccagtccagcttgagaatcatgaatgcgctgagtcacaaggaaaaggagaagttcacaaaggccaaggagctgatttctgcggatttagaacacagcctcgctgagctctcagagctggatggagacatccaggaagccttacgcaccagacaggctaccttgactgaaatatatagccagtgtcaaaggtattatcaggtatttcaagcagccaatgactggcttgaggatgcccaagaattgttacagctggcaggcaatggcctagacgtggagagcgcagaggaaaatctcaaaagccacatggaatttttcagtacagaggatcagttccatagtaacctggaggagctccacagcctggtagccaccctggacccactcatcaagccaaccggcaaagaagacctagaacagaaagtggcttctctggaactcaggagccagaggatgagccgggactctggtgcccaagtggatctcttgcagagatgcacagctcaatggcacgattaccagaaagcaagggaagaggttattgaattgatgaatgatacagaaaagaaattgtctgagttttctttgttgaagacttcgtctagtcatgaagcggaagaaaaattgtcagaacacaaggctttagtgtcagtggttaactctttccatgagaaaattgtggcccttgaggaaaaagcttcacaactggagaaaaccggaaatgatgccagcaaagccaccctgagcaggtcaatgaccaccgtctggcagcgctggacacgccttcgagctgtggcccaggaccaggagaagatcctggaagatgcagtggatgagtggacgggctttaacaacaaggttaaaaaggccactgaaatgattgatcagctgcaagataagttacctggaagttcagcagagaaagcatcgaaagcagagctcttaactcttcttgaataccacgacacgttcgttctggagctggagcagcagcagtcggccttgggcatgctgcggcagcaaaccctgagcatgctccaggatggagccgccccaacccctggggaagagcctccgctcatgcaggaaatcaccgccatgcaagatcggtgcctgaacatgcaggagaaagtgaagactaatggaaagttggtgaagcaagagctgaaggaccgagaaatggtggagactcagatcaattctgtgaaatgttgggttcaggaaacgaaagaatatttagggaatccaacaatagaaatagatgctcaacttgaagaacttcagattctcctaacagaagccacaaatcaccgacagaacattgaaaaaatggcagaagaacagaaggagaagtacttaggtctttataccatattaccttctgaactctcccttcagttggctgaagtggcgttagatctaaagatccgagatcagacattggaagatctactgggaaggatgacttggcaagttcatggtctttttatatttttgagacagagtctcgctctgtcccccaggctggagtgcagtgaaacaatctcagcttactgcaacctcctgggtttaagcagttctcgtgcctcagcctcccaagtagctgggattccaggcatgcaccaccatacccggctaattttttgtatttttagtaaaaagagacaaggttttgccatgttggccagcctggtctcaaactcctggcctcaagtgagctgcctgcctcagcctcccaaagtgctgggattacagatccaagacaaaataaaagaagttgagcagagcaaggccacgagccaggaactcagccggcaaattcagaagttagctaaagacctcacaactattctaactaagctgaaagcgaagacagataatgtagttcaagctaaaactgaccaaaaggtgctgggagaggaattagatggctgtaattcaaagttaatggaattagatgcagcagtacagaaattcttggaacagaatggccaactgggtaagccactggccaagaagataggaaaactgactgaacttcaccagcagaccattagacaagctgagaatcggctctccaagctcaatcaggcagcatcacatttagaagaatacaatgaaatgcttgaattaattttgaagtggattgaaaaagctaaagtcttggctcatggaactattgcatggaattctgcaagccagcttcgggaacaatatattttgcatcaggtaaccttaggaaaaataatctttaaaaagtaaccaagggcaatttgatttaactgggtagactgacacaacacttagagggctgtgatgtaaaatttttggagctaccagataaaaagaatgctaaggtacccctaagttgttcagtagttggacagaaaggagcttctcatgaaatttcatgaaattgaataaataaatatccttgatcttccctaaacctaccttacaccaagacccaaaccaatcagccttgtagaactcattttctgtagcttctttgaaataattatctgcagggatctggtgggaaattctttcctgtgaagagatgcaatgaagtgtggaaagattctagactccacactcagactggtgggaaaaccaagctccgccatgcagggctgtgtgatttggagcagaatgctttgcctctctgaattctgtcttctcatcatttgtatgaagacgtaaataatattcgtatttcagacttatgagatcaagtggtttaaggtacacacgtgcaaacgtctgcctggcacatgcaggtgctcagtgggagatctcccgcctcctccctcagccctcacccaggcctgtcatctggccttccacaggaggtcgggcagcccagagcaagccatgagtccacatcacatgctggctatgttagttcatttcctctgaagttacatgagaaaaatgttccttttctgtcagtcacgtcatccaggaaattatttcatccttttgtaacttaagcttaaattagacacagatagttaataggctagttatcatataataaaatatagggtgacttttataggagttacatgggtatcgagtattctagatttttgtctcttatattatttatgtatccttgtggcctttaaatgaatccctgtttccattcttgtttacagggttctagatcaaagcctcatttttccatttttggaatgctttaacagcttctaatttttccctatattcacagtctttcttctctgatcaatcttgcgtattcttcccacaatgtctttcttaagcaactccaatcttttgctttaagatatgcttagatatgaacagacaggacttaagttaccactgatttgaaaacaatgaaaaaaagccaacatccttagaagtctagaaatgcaaatttcagcaaaaaaagagaggaagaaagacaaacttaactgtcacattcatactgtttctttcaagttcatatttaaggaagtgagagctctcaaacattgctggtatcctggtaaaatctctttgaaaaataattggcaaaatgtatggtgattgtcaaaaatgttgctactctgggccacgtgcggtggctcacacctgtaatcccagcactttgggaggccgaggtgggtggatcacaaggtcaggagttcaagaccagcttggccaatatggtgaaaccccatctctactaaaaatacaaaagttagctgggcatggtggtgggcacctgtagtcccagctactcaggaatctgaggcaggagaatcgcttgaactcgggaggtggaggttgcagtgagccaagatcatgccactgcactccagcctgggtgacagtgagactccatctc

SEQ ID NO: 185313 - DNA, 27436 bp, Homo sapiens
  Payload ID: 16494
  Gene Symbol: SYNE1
  Gene Name: spectrin repeat containing, nuclear envelope 1
  ENST ID: ENST00000423061
  CDS Start-End: 438-26687
cggccgccggccgcagcgggctgagattgttgtcctctgtcaccagggcggctgggctcccgcagtcctgcagaccgcgcccgatcccggcgacagggcgggcggacagccgcgcatccccggggtcccgccgagcctgggcgcagagagccgggaggaagcgttcgctcgcttcgccttgctgctgggaaactgaacgaggccgagagagaaggttcttgagttcatgtaagaggacagtcttaaaacggaagaagaaaaagaagcagttcagtctttgggagagctgcctccttgttgagtgctgcaaaggcctggaattcatttatgacagaatagatctagaaaagtccaagcatgttttctagagtggtgtagccctgtgctgcctccagtgaagagtctcttggtgttggcttcgtgcttccggagggaccatggcaacctccagaggggcctcccggtgtcctcgggatatcgccaatgtgatgcagaggctgcaagatgagcaagagatagtacaaaaacgaactttcacaaaatggatcaactctcatctggccaagcggaaacctccaatggtggtggacgatctttttgaagacatgaaagatggtgttaaactgcttgcccttctggaggtcctgtctgggcagaaactgccttgtgaacaaggacgccggatgaagcgaatccatgctgtggctaacattggcacggcactcaagttcctcgaaggaagaaagtccatgcacagaggatcaccgattaaattagtcaacattaactccaccgatatagctgatggccgaccctcaatagttcttggattgatgtggaccattattctatatttccagattgaagagttgaccagcaacctgccccagctccagtctttgtccagcagcgcatcctccgtggacagcatagttagctctgagactcccagcccaccaagtaaacggaaggtgaccaccaagatccaaggaaatgctaagaaggctttattaaagtgggttcagtacacagctggcaagcagactggaatagaagtaaaagattttgggaagagttggagaagcggggttgcctttcattcagttattcatgccattcgaccggaattggtggacttggagacagtgaaaggcagatccaaccgagaaaatttggaggatgctttcactatcgccgaaacagaactggggatcccaagactgctagatcctgaagacgttgatgtggataaaccagatgagaaatctattatgacctatgtagcccagtttctgaaacattatcctgacatccacaatgcaagcactgatgggcaagaggatgatgaaatacttccaggtttcccatcttttgcaaattctgtacaaaattttaagagagaagacagagtaatttttaaggaaatgaaagtttggatagaacaatttgagagagatttgacaagagcacagatggtggaatcaaatttacaggataaatatcagtcatttaagcacttcagagttcaatatgaaatgaagaggaaacagattgaacatttaatacaaccattacacagagacggtaaattgtcacttgaccaagcattggtaaaacaatcttgggatagagtgacctccaggctctttgactggcatatacagcttgataaatctcttcctgcacctctgggcaccataggtgcctggctgtacagagcggaggtggccctgagagaggaaataaccgttcaacaggtccacgaggaaacagcaaacacgatacaacggaaacttgagcaacataaggatctgcttcaaaacacggatgcccacaaaagagcattccatgaaatctaccggaccaggtctgttaacgggattccagtgccacctgatcaattagaggacatggccgagaggtttcattttgtttcctccacatcagagctacacctaatgaaaatggaatttttagaattaaagtaccgtctgctctcactgctggttcttgcagagtcaaagctgaagtcttggatcattaagtacgggaggagagagtcagtggagcagcttctacaaaactacgtgtcttttatagaaaatagcaagttctttgaacaatatgaggtgacataccagatcttgaaacagacagctgagatgtatgtcaaagcagatggttcagtggaagaagctgagaatgtgatgaaattcatgaatgaaaccaccgctcagtggaggaatctctcagtagaagtgaggagtgtgaggagcatgctggaagaagtgatctctaactgggatcgctatggcaatacagtggctagtctgcaagcctggctagaggatgctgaaaaaatgctcaatcaatcagaaaatgccaaaaaggatttttttcgaaatttacctcattggattcagcagcatactgccatgaacgatgctggcaattttctaattgaaacctgtgatgagatggtttcccgtgacctgaagcagcaattactgttgctaaatgggcggtggagggagttgtttatggaagtcaagcaatatgctcaagctgatgagatggacagaatgaagaaggaatacacagactgtgttgttaccctgtctgcttttgcaacggaagcccataagaaactttctgaacccttagaagtctcttttatgaatgtcaagctattaattcaagacttggaggatattgagcagagggtgcctgtgatggatgcccaatacaagataattacaaagacagcacacctcattaccaaagaaagcccccaagaagaaggaaaagaaatgtttgcgaccatgtcaaagctcaaagagcagctaaccaaggtcaaagaatgttactccccactcctttatgagtctcagcagctgttgattccgttggaggaattagaaaagcagatgacgtccttttatgactcacttgggaaaatcaatgaaattatcacagttcttgagcgtgaggcacaatcgagtgccctttttaaacaaaaacatcaggaactgttagcttgtcaagaaaactgtaagaaaaccttgacacttattgagaaaggcagtcaaagtgttcaaaagtttgtgaccttgagcaacgtgttaaagcattttgatcagacgaggctacaaagacagattgcagatattcatgttgcttttcagagtatggtaaagaaaactggagattggaagaagcatgtggaaaccaacagtcgcttgatgaagaagtttgaggagtctcgagcagagttggagaaggtactgcggattgctcaggagggcctggaggaaaagggggatccagaggagctcctgcggagacacactgagtttttcagtcagctggatcagagggtgctcaatgctttcctgaaagcttgtgatgaactcaccgacatccttccagagcaggagcagcaggggctgcaggaagctgttcgaaagctccacaaacaatggaaggatcttcaaggagaagccccttatcatttgcttcatctgaagattgatgtggagaagaataggttcttagcctctgtagaagaatgcagaactgagctggatcgagagaccaagctgatgccccaggaaggcagtgaaaagataattaaagagcacagggttttcttcagtgacaaaggtcctcatcatctctgtgagaaaaggttacagctcatcgaggaactctgtgtgaaactcccagtgcgggacccagtaagggacacacctggaacctgtcacgtgactctcaaagagctcagagctgccattgacagcacctacaggaagctcatggaagacccagacaagtggaaggactacactagcagattctctgagttctcatcttggatatctacaaatgagacacaattaaaggggatcaagggtgaggccatcgatactgccaaccacggagaggttaaacgtgccgttgaagagatcagaaatggtgttaccaaaaggggtgagaccctcagctggctgaaatccaggctgaaagttttgacagaagtttcttctgagaatgaagcccaaaagcagggagatgagctggcaaaattatccagctctttcaaggctcttgtgacgctgctgtcagaggttgaaaagatgctaagcaattttggggactgtgtccagtacaaagaaatagtcaaaaattctctcgaagaattaatttctggctctaaagaagtccaggaacaagctgagaagatcttggatactgaaaatctgtttgaagcacagcagttacttcttcatcaccagcaaaagacaaagcggatctcagcaaagaagagagatgtgcagcagcagatcgcgcaggcgcagcagggagaaggggggctgcctgaccgaggccacgaggagctgcggaagctggagagcacactggatggcctggagcgcagccgggagaggcaggaacgccgcatccaggtcacattaagaaaatgggagcgatttgaaacaaacaaagaaacagtagtaagatacctttttcaaacaggttccagtcatgaacgcttcttgagttttagcagtttggaaagtttatcttcagaactggaacaaacaaaggagttttctaaacggacagaaagtattgcagtccaggctgagaaccttgtaaaggaagcttcagagataccgcttgggccccaaaataagcagctgcttcaacagcaggccaagtcaatcaaagaacaagtcaaaaaattagaagacacgcttgaagaagatattaaaaccatggaaatggtgaaaaccaagtgggatcattttggcagtaattttgagactctgtccgtctggataactgagaaagaaaaagaactcaatgccttggaaacttcgtcatctgccatggacatgcaaatcagccaaattaaggtcacaattcaggaaatagaaagtaagctcagcagcattgtaggattagaagaagaagcccagtcttttgctcagtttgttaccactggagaatctgctcgaattaaagccaagttgacacaaataagaagatacggggaagagcttcgagagcatgcacagtgtctggaaggaacaatcctgggacatttatctcagcagcaaaagtttgaagagaaccttagaaagatccagcaatctgtgtctgaatttgaagataaacttgctgttccaattaaaatatgttcttcagctacagaaacatacaaagttcttcaagaacatatggatctctgccaggccctggagtcactgagcagcgcgatcactgccttctcagccagtgccaggaaggttgtgaacagagattcctgtgttcaggaggctgcggctctacagcagcaatacgaggacatcctaaggagggcgaaggagagacagacggcgctggagaatctgctggcccactggcagaggctagagaaagaactatcatcctttttgacctggttagagcggggtgaagctaaagccagttccccagaaatggacatttctgcagacagagtcaaagtggaaggtgaacttcagttaatacaggcactgcaaaatgaagttgtatcccaggcctcattctatagcaaacttttgcaattgaaggaatcattgttctcagtagcctccaaagatgatgtgaaaatgatgaaactacatttggagcagttggatgagagatggagagatttaccacagatcattaacaaaaggattaattttcttcagtctgtggttgctgaacaccagcaatttgatgagctgctgctttccttttctgtctggattaaactgtttctcagtgaattacaaactacctctgagattagcataatggaccatcaagtagcccttactcggcataaggaccacgcagcagaagtagagagcaaaaagggcgaattgcagagtctgcagggtcacttagcaaagttgggttctctgggccgtgctgaggacctccacctcctgcagggaaaggctgaggactgcttccagctgtttgaggaggccagccaggttgtggagaggcggcagcttgccctgtcccatttggcagaattcctccagagccatgcctctctgtccggcattctccgccagctgaggcaaacagtggaagcaaccaacagtatgaataagaacgagtctgatttgatagaaaaggacctcaatgatgctcttcaaaatgctaaagcattagaatctgctgccgtcagtctggatggcattctttccaaagcccaataccatctgaaaatcgggagctctgagcaaaggacttcctgcagagccacggctgatcagctctgtggagaggtagagaggatccagaaccttctgggaaccaagcagagtgaggcagatgctctggcagtgttgaaaaaagcattccaagaccagaaagaggagcttctgaaaagcattgaggacattgaagaaaggactgacaaagagcgattgaaagaacctacccgccaagctcttcagcagaggttaagagtgtttaatcagctagaagatgaattgaattctcacgagcatgaactatgttggttgaaagacaaagccaagcaaattgcccagaaagatgtagcttttgcacctgaagttgacagggagataaaccgcttagaggtcacctgggatgataccaaaagactaattcatgaaaatcagggtcagtgctgtggacttattgacttaatgagagaatatcagaacctgaaatcagctgtatctaaagtcttagaaaatgccagcagtgtgattgtaaccagaactaccataaaagatcaggaggatcttaaatgggctttttccaagcatgaaactgccaagaacaaaatgaattacaaacagaaagacttggataactttaccagcaaaggaaaacacttgttatctgagctgaagaaaattcacagtagtgatttcagcttggtgaaaacagacatggagagcaccgtggacaaatggctggatgtatcagagaaacttgaagaaaacatggataggctgagagtaagcctgtccatttgggatgatgtactgtcaactagagatgagattgagggatggtcaaacaactgcgttccacagatggcagaaaacatcagcaacctggataaccacctcagagctgaagaactgcttaaagaatttgagtctgaagttaaaaacaaagcattgagattggaagaactgcattccaaagttaatgatctgaaagaattaactaaaaatctagaaacaccgccagaccttcagtttatagaagcagacttaatgcagaaactggagcatgccaaagaaataactgaagtagcaaaaggaaccctgaaggatttcacggctcaaagtacacaagtggagaagtttattaatgacataacaacatggttcacaaaagtggaagaatcgttgatgaactgtgcccaaaatgagacttgtgaagcattgaaaaaagtcaaggatatacaaaaagaacttcaaagtcaacaaagcaacatcagctctacccaagaaaatctcaatagcttgtgccgcaagtaccactcagctgagttggagagcctgggccgtgcaatgactggtctgataaagaaacatgaagccgtgagccagttgtgctccaaaacccaggccagcctgcaggaatctctggaaaaacacttcagtgagtctatgcaggaattccaagaatggtttttgggagcaaaggcagcagcaaaagaatcatcagatcgcaccggtgacagcaaagttctagaagcaaagctccatgatcttcagaacattttggactcagtcagtgatgggcagagcaaacttgatgcagtgactcaagaaggacaaactttgtatgcacatttgtctaaacaaattgtcagtagcattcaagaacaaatcacaaaggccaatgaagagtttcaagcatttctgaaacaatgccttaaagataagcaggctcttcaagactgtgcttcagaacttggaagctttgaagatcagcacagaaaactgaacttatggatccatgaaatggaagaaaggttcaatacggaaaacttgggagagagtaaacagcacattcctgagaagaaaaatgaagttcataaagttgaaatgtttttgggagaactgctggctgcaagagagtctcttgataagctttcccagagagggcagcttctgagtgaagaaggccacggtgctgggcaggagggccgcctgtgttcccagctcctcacaagccaccagaacctacttagaatgaccaaagagaaactccggagctgccaggtggcccttcaggagcacgaagccctggaggaagcactgcaaagcatgtggttctgggtgaaggccattcaggacagactggcctgtgcagagagcactcttgggagcaaagacaccctggagaaacggctgtcacaaatacaggatattctcctgatgaaaggtgaaggggaagttaagttgaatatggccattggcaagggggaacaggccttgagaagtagcaacaaagaaggtcagagggtgattcagactcagttagagacccttaaagaagtgtgggctgacatcatgagctcctccgtccacgctcaaagcactttagagtctgtgattagccaatggaatgactatgtagagaggaaaaaccagttggagcagtggatggaatcagtggatcaaaaaatagaacatcccttacaaccacagccaggtctgaaagagaagttcgtcctgcttgaccacctccagtccatcctgtctgaggcagaagatcacacgagagcccttcaccgtctaattgcgaagtccagggagctctacgaaaagacagaggatgagtctttcaaggacacagctcaagaggagctgaaaacacagtttaatgatataatgactgttgccaaggaaaaaatgaggaaagtggaagagattgtgaaagatcatctaatgtatttagatgcggtccacgagttcacagattggctccattcagcaaaggaagaacttcaccggtggtcagatatgtctggagattcatcagccacccagaaaaagttatcaaaaattaaggagctgatagattccagagagattggtgcaagccgtctcagcagagtggagtcgctggctcccgaagtgaaacagaacacaactgccagtgggtgtgagctcatgcacacggagatgcaggccctgcgtgccgactggaagcagtgggaagacagtgtattccaaacgcagagctgtttggagaacctggtcagccagatggccctttcggagcaggaattctcaggccaagtggctcaactggagcaggccctggaacagttcagtgcccttctgaaaacctgggctcagcagttaaccctcctggaaggcaagaacacggatgaggagatagtggaatgctggcacaaaggacaagagatactggatgctttgcaaaaagcagagcctagaacagaggatctcaagtctcagctgaatgaactttgtcgattttccagagacctgagtacctacagtggaaaagtttctggcttgattaaagagtataattgtctttgtttgcaagcatccaagggctgccagaataaagaacagattttacagcaaagatttcgaaaggccttcagggatttccagcagtggttggttaatgcaaaaatcactaccgccaagtgttttgatatacctcaaaatataagtgaagtttcaactagtcttcagaaaatacaggagtttttgtcagaaagtgaaaatggacagcacaagctaaacatgatgctgtctaaaggggaacttctgagtaccctgctgaccaaagagaaagcgaaagggatccaggccaaagttacagctgcaaaagaagattggaaaaattttcattcaaatctccaccaaaaagaatctgctctagagaatctaaagatccaaatgaaggactttgaagtaagtgctgagcctatccaggactggctgagtaaaactgagaagatggtccatgaaagcagcaatcgcctctatgatctgccagcaaagaggagggagcagcagaagctccagtctgtccttgaggaaatacactgctacgagcctcagctcaacaggctgaaagagaaagctcagcagctgtgggaaggacaagctgccagcaagagctttaggcacagagtgtcgcagctgtcttctcagtatctagcgctaagcaatttaacaaaggagaaagtgtcaagactggatagaatcgttgcagaacacaatcagttctctcttgggattaaagaattacaagactggatgacggatgcgattcacatgctggattcatactgccacccgacatccgacaaaagtgtgctggacagcaggacgctcaagctcgaggctctattatcagtcaaacaggaaaaagagattcagatgaaaatgatagtgaccaggggagaatctgtccttcagaatacttctccagaaggcattcccactattcagcagcagctgcagagtgtgaaggatatgtgggcatcccttttgtctgcagggattcgttgtaaaagccaactcgaaggagctctctccaagtggacaagttatcaggatggcgttcgacagttctccggttggatggatagtatggaagccaacctgaatgaatcagaaaggcagcatgcggagctgcgggataaaacaacgatgctcggaaaagccaagttattaaatgaagaagtgctgagttacagcagcttgctggagaccatcgaagtcaaaggggctggcatgacagaacactatgtcacccagctagaactccaggatctacaggaacgatacagagccatccaagagagggccaaggaagccgtaaccaagtctgaaaaacttgtccgcctgcaccaagagtatcagagagacctaaaggcatttgaagtttggttggggcaagaacaagaaaagctcgaccagtattcagttcttgaaggtgatgcccacactcatgagacaacattgcgtgatcttcaggagctacaggtacactgtgcagaggggcaggccctgttgaactcagtgctgcacaccagagaggatgtgatcccatcaggtatcccacaggcagaggaccgggctttagagtctctccggcaagactggcaggcttaccagcacaggctgtccgagactcgaactcagttcaataacgtggtgaacaaattgaggctaatggagcaaaagtttcagcaagtagatgaatggctcaaaacagcagaggagaaaaagtggcacgaagaagtgactgcatacagagatgaagttgaggaagtgggagctagagctcaggagatactggacgagagccacgtgaacagcagaatgggttgccaggccacccagctgacttccagataccaggccctgcttctccaagtgctggaacaaataaaattcctggaggaggagattcagagtttggaggaatcagaatcatccctcagttcctattctgattggtatggctctactcataaaaacttcaagaatgtggctaccaagattgacaaagtagatacagtaatgatggggaagaaattgaagacgttggaggttttgctcaaagacatggagaaaggtcacagtttgctgaaatcagcccgggagaaaggagagagggctgttaaatacttggaggaaggcgaggcagagaggttaagaaaggagattcatgatcacatggagcagttgaaggaactgaccagcactgtccggaaagaacacatgacgctggaaaaaggtcttcatttagcaaaggaattctcagataaatgcaaagcactgacacagtggatagcagaataccaggaaattctacatgttcctgaagaacccaaaatggaattatatgagaaaaaagctcagttatctaaatacaagtcacttcaacaaacggtgctgtcccatgaaccatcagtaaagtcagtgagagagaagggtgaagctcttttggaactggtgcaggacgtcactttaaaggacaaaatagatcaacttcaaagtgattaccaggacctgtgcagcataggaaaggcaatgatggaagaaattgctggttttgaagaccgtttgaacaatcttcaaatgaaaggtgatactttgattggccaatgtgcagaccacctgcaagcgaaacttaaacaaaacgtgcatgctcatctgcagggcacaaaggacagctactcagcgatctgcagcacagctcagaggatgtaccagagtttggaacacgaacttcagaagcacgtcagccgacaagacaccctgcagcagtgccaggcctggctttctgcagtccagccggatttagagccaagtcctcaaccacctcttagtagggcagaagccattaagcaggtcaaacacttcagagctttgcaagagcaggcaaggacctacctagatctcctttgctccatgtgtgacctgtcaaatgcttcggtgaaaaccacagcaaaagacattcaacaaacagagcaaacgattgaacaaaagcttgtccaggcccagaacttaactcagggctgggaagagatcaagcacctgaagtctgagctctggatttacctgcaagatgctgatcagcaactgcagaacatgaagaggaggcactctgagctggagctgaacattgcacagaacatggtttcacaagttaaggattttgttaagaaactacagagcaaacaggcatccgtgaacaccataatagaaaaggtgaataagttaacaaagaaggaggaatcgcctgaacacaaggaaataaatcatttaaatgatcagtggctcgatttgtgccgtcagtctaacaacctgtgcttgcaaagggaagaggatcttcagagaacaagagattaccatgactgtatgaatgttgttgaagtgttcctagaaaaatttactacagaatgggataacttggccagatctgatgcagagagtacagctgtccacctggaagctttgaaaaagttagcattggcattgcaggagagaaagtatgctattgaagatctgaaagatcaaaagcagaaaatgatagagcatctgaatttagatgacaaggagttagtcaaagaacagacgagtcatttagagcaacgttggtttcagcttgaggacctcattaaaaggaaaatccaagtgtcagtcaccaacttggaggagttaaatgtggtgcagtccagatttcaggagctaatggagtgggcagaagagcaacaacccaacatcgccgaggcccttaagcagagccctcctccagatatggctcagaaccttctcatggatcacctggccatctgcagtgaactggaggccaagcagatgctcctgaaatcgcttataaaggacgcagacagggtcatggcagatcttggtctcaatgagcgacaggtcatccagaaggctctctctgatgcacaaagccacgtgaattgtctcagtgacttagtgggccagcgaagaaagtacttaaacaaagccttgtccgagaaaacccagtttctcatggcagtgttccaggccaccagccaaattcagcaacatgagcgaaagataatgttccgtgaacacatctgtctgttaccagatgatgtgagcaaacaagtcaaaacatgtaagagtgcacaagccagcctcaagacttaccaaaatgaagtcactggactttgggcccagggtcgcgaactaatgaaggaagtcacagagcaggaaaagagtgaagtgctggggaagcttcaggaattgcagagtgtctatgacagtgttttacaaaagtgcagtcaccggttacaagaactagagaagaatttggtttctaggaagcattttaaggaagattttgataaagcttgccactggctaaaacaagcagatattgttacatttcctgaaatcaacctaatgaatgagagttctgagcttcatacacaactggctaaataccaaaacattcttgaacaatctccagaatatgaaaatcttctacttacgctgcagagaactgggcagaccatattaccatcgctgaatgaagtcgatcattcctacctcagtgaaaagctaaatgctttgcctcgacaatttaatgtaattgttgccttggctaaagacaagttctataaagtccaggaagcaattcttgctcggaaggaatatgcttccttgattgagttgacaacccagtctctgagtgaacttgaagcccaattcttgaggatgagcaaagttcccaccgacctggccgttgaggaggctctttctctgcaagatggttgcagagccattctggacgaggtggcgggccttggggaggcggtggatgaactgaaccagaaaaaagaaggttttcgcagcacaggtcagccttggcagccagacaagatgctgcaccttgtcaccttatatcacaggctgaagcgacaaacagaacagagggttagcttattagaagacaccaccagtgcttaccaagaacacgagaagatgtgccaacagctggagagacaactgaagtctgtaaaagaggagcagtccaaagtgaatgaggaaacgctgcctgcagaggagaagctcaaaatgtatcactccctggcaggaagtctccaggactcagggattgtactgaaacgagtaaccatacatcttgaagatcttgccccacaccttgaccccttggcttatgagaaagccaggcatcagatccagtcctggcaaggggagttaaaactgttgacttctgccattggtgagacggtgacagaatgtgagagccgaatggtgcagagtatagacttccagactgagatgagtcgctccctggactggctgaggagagtgaaggcagagctcagtgggccggtgtacctagacctcaacctgcaggacatccaagaggaaatcagaaaaatccaaattcatcaggaagaggtccagtccagcttgagaatcatgaatgcgctgagtcacaaggaaaaggagaagttcacaaaggccaaggagctgatttctgcggatttagaacacagcctcgctgagctctcagagctggatggagacatccaggaagccttacgcaccagacaggctaccttgactgaaatatatagccagtgtcaaaggtattatcaggtatttcaagcagccaatgactggcttgaggatgcccaagaattgttacagctggcaggcaatggcctagacgtggagagcgcagaggaaaatctcaaaagccacatggaatttttcagtacagaggatcagttccatagtaacctggaggagctccacagcctggtagccaccctggacccactcatcaagccaaccggcaaagaagacctagaacagaaagtggcttctctggaactcaggagccagaggatgagccgggactctggtgcccaagtggatctcttgcagagatgcacagctcaatggcacgattaccagaaagcaagggaagaggttattgaattgatgaatgatacagaaaagaaattgtctgagttttctttgttgaagacttcgtctagtcatgaagcggaagaaaaattgtcagaacacaaggctttagtgtcagtggttaactctttccatgagaaaattgtggcccttgaggaaaaagcttcacaactggagaaaaccggaaatgatgccagcaaagccaccctgagcaggtcaatgaccaccgtctggcagcgctggacacgccttcgagctgtggcccaggaccaggagaagatcctggaagatgcagtggatgagtggacgggctttaacaacaaggttaaaaaggccactgaaatgattgatcagctgcaagataagttacctggaagttcagcagagaaagcatcgaaagcagagctcttaactcttcttgaataccacgacacgttcgttctggagctggagcagcagcagtcggccttgggcatgctgcggcagcaaaccctgagcatgctccaggatggagccgccccaacccctggggaagagcctccgctcatgcaggaaatcaccgccatgcaagatcggtgcctgaacatgcaggagaaagtgaagactaatggaaagttggtgaagcaagagctgaaggaccgagaaatggtggagactcagatcaattctgtgaaatgttgggttcaggaaacgaaagaatatttagggaatccaacaatagaaatagatgctcaacttgaagaacttcagattctcctaacagaagccacaaatcaccgacagaacattgaaaaaatggcagaagaacagaaggagaagtacttaggtctttataccatattaccttctgaactctcccttcagttggctgaagtggcgttagatctaaagatccgagatcagatccaagacaaaataaaagaagttgagcagagcaaggccacgagccaggaactcagccggcaaattcagaagttagctaaagacctcacaactattctaactaagctgaaagcgaagacagataatgtagttcaagctaaaactgaccaaaaggtgctgggagaggaattagatggctgtaattcaaagttaatggaattagatgcagcagtacagaaattcttggaacagaatggccaactgggtaagccactggccaagaagataggaaaactgactgaacttcaccagcagaccattagacaagctgagaatcggctctccaagctcaatcaggcagcatcacatttagaagaatacaatgaaatgcttgaattaattttgaagtggattgaaaaagctaaagtcttggctcatggaactattgcatggaattctgcaagccagcttcgggaacaatatattttgcatcagaccctgctagaagaatccaaagaaattgacagtgagctggaagcaatgactgagaaattacagtacctcactagcgtgtactgtacagaaaaaatgtctcagcaagtggcagaactgggacgggagactgaggagttgcgacagatgatcaaaattcgtttgcagaacctccaagatgcagctaaggatatgaaaaaatttgaagcagagttgaaaaagttacaagctgccttggagcaagcccaggcaacactgacttctccagaagttggacgtctcagtctcaaggagcagctctctcatcggcagcatttgttgtctgagatggagtcactgaagccgaaggtgcaagcagtgcagctctgccagagtgccctccggatccccgaggatgtggttgccagcttacctctctgtcatgctgctctgcggctgcaggaagaggccagccggctgcagcacaccgccatccagcagtgtaacatcatgcaggcagctgtggtacaatatgaacaatatgagcaagaaatgaaacatctccagcaactgatagaaggagctcacagagagattgaggataaacctgttgccaccagtaacatacaggagctgcaggctcagatttctcggcatgaggagctggcgcagaaaattaagggctaccaggagcagatcgcttctttgaattccaagtgcaagatgctgacgatgaaagccaagcacgccaccatgctgctgacggtgaccgaggtcgaggggctggcggaagggacagaggacctggatggggagctcctccccacgccttcggcccacccctctgtggtcatgatgactgcaggtcgctgtcacactttgctgtcaccggtcactgaggagtctggggaggagggaaccaacagtgagatttcctctccacctgcctgtcgctccccttcacctgtggctaatacagatgcttctgttaaccaggacattgcatattaccaagccttgtctgctgagaggttgcagacagatgctgcaaaaattcaccccagcacatccgcatcccaggagttctatgaaccgggattggagccatccgctactgccaaactgggtgatttgcagcgttcttgggaaaccttaaagaatgtgatcagtgagaagcagcgcacactctatgaagctttggaacgccagcagaagtaccaggactccctccagtccatctctacgaagatggaggccattgagctgaaactcagtgagagcccagagcctggcaggagtccagaaagccagatggctgaacatcaggcattgatggatgagattctcatgctccaggatgaaatcaatgagctccagtcctctctcgcagaggagctggtatccgagtcttgtgaggccgaccctgcggagcagctggccttgcagtccacgctcactgtcttagccgagcgaatgtccaccatcaggatgaaagcctcggggaaacggcagcttttggaggagaagttgaatgatcagctggaggaacaaaggcaggaacaggccctgcagaggtatcgctgtgaagccgatgagctggacagctggctcttgagtaccaaggccactctggacactgcgctgagtccacccaaggagcccatggacatggaggcccagcttatggactgccagaatatgctggtggaaatagagcagaaggtggtggctttatcagaactgtcagtccacaatgagaacctgctgctggagggcaaagctcacaccaaggacgaggccgagcagctggctggaaagctgagaaggctcaaggggagcctgctggagctgcagagagccctgcatgataagcagctcaacatgcagggaacagcacaggagaaggaggagagcgatgttgacctaacagccacgcagagccccggcgtccaggaatggctggcccaagctcgcaccacatggacccagcagcggcagagcagtctccagcaacaaaaagagttagaacaggaattagccgagcagaagagtctccttcgctcagtagccagtcgtggagaggagattctaattcaacattcggcggcagagacctctggtgatgctggcgaaaaacctgatgtgttatcccaggagttggggatggaaggggagaaatcatccgctgaagaccagatgagaatgaaatgggaaagcctacatcaagaatttagtaccaagcagaaactactacagaatgttctggaacaggaacaagagcaagtgctttatagcaggccaaatcgactcttgtctggtgtgccactgtacaaaggggacgtgccaacccaagataaatctgcagttacatctttgctggatggactgaaccaagccttcgaggaggtttcatcccagagtggaggggcaaagaggcagagtatacacttggagcagaagttgtatgatggagtctcagccacctctacttggttggatgacgttgaagaacgtttatttgttgccacagcacttttaccagaagaaacagagacttgtctcttcaaccaagagattcttgccaaagacattaaggaaatgtctgaagaaatggataagaacaaaaacttgttttcccaagcttttccagagaatggtgataatcgagatgttattgaagatactttgggttgtcttttgggcaggttatccttgctagactcagtagtgaatcaacgatgtcatcagatgaaagaaagacttcagcaaatactaaatttccagaatgatctgaaagtgctgtttacatcactggctgacaacaaatacatcattctgcaaaaactggcaaatgtgtttgaacagcccgtagcagaacaaatagaggcaatacaacaggctgaagatggactcaaagaatttgatgcaggaatcattgaattaaagaggcgtggtgacaagctacaggtcgagcagccgtccatgcaagaactctccaagctccaggacatgtatgatgagctgatgatgatcattggctcccggaggagtggtctgaatcagaaccttacactcaagagtcagtatgagagggccctacaagatctggctgacctgctagaaactggtcaggagaagatggcaggagaccagaaaatcatcgtgtcttccaaagaggaaatccagcaactacttgacaaacataaggaatactttcagggcctggaatctcatatgatcttgactgaaacactcttcagaaagataatcagctttgcagtccaaaaggaaacccagttccatacagagctgatggctcaggcttctgctgtactgaaacgggctcacaagaggggtgtggagctggagtacattctagagacgtggtcccatctggatgaggaccagcaggagctcagcagacagctggaggtggtggaaagcagcatcccaagcgtgggtctggtggaggagaacgaggacaggcttattgaccgcataacactctaccagcatttaaaatctagccttaatgaataccagcccaaattatatcaagtattagatgatgggaaacgacttctgatatccatcagctgctcagatctagaaagccaactaaatcaacttggagagtgctggctaagtaacaccaataaaatgtctaaggaacttcacagactggaaacaatattgaaacactggaccagatatcaaagtgaatctgcagatctaattcactggttacaatctgcaaaagaccggctagaattttggactcagcaatctgtgacagtcccacaagagctggaaatggtccgtgatcatctaaatgctttcctggagttttctaaagaagtggatgcccaatcttccctgaaatcatctgttctgagtactggaaatcagctccttcgactaaaaaaggtggacacagccacgctgcgctctgagctgtcgcgcattgatagccagtggactgacctgctaaccaatatcccagccgtccaggagaagctccaccagctccagatggataaactgccttcccgccatgccatttctgaagtcatgagttggatttctctaatggaaaatgttattcagaaggatgaagataatattaaaaattccataggttacaaggcaattcatgaataccttcagaaatataagggttttaagatagacattaactgtaaacagctgacagtggattttgtgaaccagtccgtgctacaaatcagcagtcaggatgtggaaagtaagcgtagtgataagactgattttgctgagcaacttggagcaatgaataaaagttggcaaattctgcaaggtctagtaactgagaagatccagctgttggaaggcttattggaatcttggtcagaatatgaaaataatgtacaatgtctgaaaacatggtttgaaacccaggaaaagagactaaaacaacagcatcgaattggagatcaggcttctgttcaaaatgcactgaaagactgtcaggatctggaagatttgattaaagcaaaagaaaaagaagtagagaaaattgagcagaatggacttgctttgattcagaacaagaaagaagacgtctctagcattgtcatgagcacactgcgagagctcggccaaacctgggcaaatttagatcacatggttggacaattaaagatactgctgaaatcagtgcttgaccaatggagtagtcacaaagtggcctttgacaagataaacagttacctcatggaggccagatactctctttcccgattccgtctgctgactggctccttagaagctgtgcaagttcaggtggacaatcttcagaatctccaagatgatctggaaaaacaggaaaggagcttacagaaatttggctctatcaccaaccaattattaaaagagtgtcacccacccgtgacagaaactcttaccaatacactgaaagaagtcaacatgagatggaataacttgctggaagagattgctgagcagctacagtccagcaaggccctacttcagctttggcaaagatacaaggactactccaaacagtgtgcttcgacagttcagcagcaggaggatcgaaccaatgagctgttgaaggcagccacaaacaaggacattgccgatgatgaggttgccacatggattcaagattgcaacgacctcctcaaaggactgggcacagttaaagattccctcttttttctccatgagctgggagagcaactgaagcaacaagtggatgcttccgcagcatcagctattcaatcggatcaactctctttgagtcaacacttgtgtgccctggagcaagctctctgcaaacagcagacttcattacaggctggagttcttgattatgaaacctttgccaagagtttagaagctttggaggcctggatagtggaagctgaagaaatactacaagggcaggaccctagccactcatctgacctctccacaatccaggaaaggatggaagaacttaagggacagatgttaaaattcagcagcatggctccagatttagaccgtctaaatgagcttggatataggttacccttgaatgataaggaaatcaaaagaatgcagaatctgaaccgccattggtctctgatctcctctcagactacagaaagattcagcaagttgcagtcatttttgctacaacatcagactttcttggaaaaatgtgaaacatggatggaattcctagttcagacagaacaaaagttagcagtagagatttcaggaaattatcagcaccttttggaacagcagagagcacacgagttgtttcaagccgagatgttcagtcgtcagcagattttgcactcaatcattattgatgggcaacgtcttctagaacaaggtcaagttgatgacagggatgaattcaacctgaaattgacactcctcagtaatcaatggcagggagtgattcgcagggcccagcagaggcgggggatcattgacagccagattcgccagtggcagcgctatagggagatggcagaaaagcttcgtaaatggttggttgaagtgtcctacctccccatgagtggtctcggaagtgttcctataccactgcaacaagcaaggaccctctttgatgaagtgcagttcaaagaaaaagtgtttctgcggcaacaaggcagctacatcctgactgtggaggctggcaagcaactccttctctcggcggacagtggcgctgaggccgccttgcaggccgaactcgctgaaatccaagagaaatggaaatcagccagcatgcggctggaagaacagaagaaaaaactagccttcttgttgaaagactgggaaaaatgtgagaaaggaatagcagattccctggagaaactacgaactttcaaaaagaagctttcgcagtctctcccggatcaccatgaagagctccatgcagaacaaatgcgttgcaaggaattagaaaatgcagttgggagctggacagatgacttgacccagttgagcctgctgaaggacaccctctctgcctatatcagtgctgatgatatctccattcttaatgaacgcgtagagcttctgcaaaggcagtgggaagaactatgccaccagctctccttaaggcggcagcaaataggtgaaagattgaatgaatgggcagtcttcagtgaaaagaacaaggaactctgtgagtggttgactcaaatggaaagcaaagtttctcagaatggagacattctcattgaagaaatgatagagaagctcaagaaggattatcaagaggaaattgctattgctcaagagaacaaaatacagctccaacaaatgggagaacgacttgctaaagccagccatgaaagcaaagcatctgagattgaatacaagctgggaaaggtcaacgaccggtggcagcatctcctggacctcattgcagccagggtgaagaagctgaaggagaccctggtagccgtgcagcagcttgataagaacatgagcagcctgaggacctggctcgctcacatcgagtcagagctggccaagccaatagtctacgattcctgtaactcggaagaaatacagagaaagcttaatgagcagcaggagcttcagagagacatagagaagcacagtacaggtgttgcatctgtcctcaacctgtgtgaagtcctgctgcacgactgtgacgcctgtgccactgatgccgagtgtgactctatacagcaggctacgagaaacctggaccggcggtggagaaacatttgtgctatgtccatggaaaggaggctgaaaatcgaagagacgtggcgattgtggcagaaatttctggatgactattcacgttttgaagattggctgaagtcttcagaaaggacagctgcttttcccagctcttctggggtgatctatacagttgccaaggaagaactaaagaaatttgaggctttccagcgacaggtccacgagtgcctgacgcagctggaactgatcaacaagcagtaccgccgcctggccagggagaaccgcactgattcagcatgtagcctcaaacagatggttcacgaaggcaaccagagatgggacaacctgcaaaagcgtgtcacctccatcttgcgcagactcaagcattttattggccagcgtgaggagtttgagactgcgcgggacagcattctggtctggctcacagagatggatctgcagctcactaatattgaacatttttctgagtgtgatgttcaagctaaaataaagcaactcaaggccttccagcaggaaatttcactgaaccacaataagattgagcagataattgcccaaggagaacagctgatagaaaagagtgagcccttggatgcagcgatcatcgaggaggaactagatgagctccgacggtactgccaggaggtcttcgggcgtgtggaaagataccataagaaactgatccgcctgcctctcccagacgatgagcacgacctctcagacagggagctggagctggaagactctgcagctctgtcggacctgcactggcacgaccgctctgcagacagcctgctttctccacagccttcctccaatctctccctctcgctcgctcagcccctccggagcgagcggtcaggacgagacaccccggctagtgtggactccatccccctggagtgggatcacgactatgacctcagtcgggacctggagtctgcaatgtccagagctctgccctctgaggatgaagaaggtcaggatgacaaagatttctacctccggggagctgttggcttatcagatgtaatgatccccgaaagccctgaggcctatgtaaaactcacagaaaatgcaatcaaaaatacctccggggaccacagtgccctagagtcacagatccgacaactgggcaaagccctggatgatagccgttttcagatacagcaaaccgaaaatatcattcgcagcaaaactcccacggggccggagctagacaccagctacaaaggctacatgaaactgctgggcgaatgcagtagcagtatagactccgtgaagagactggagcacaaactgaaggaggaagaggagagccttcctggctttgttaacctgcatagtaccgaaacccaaacggctggtgtgattgaccgatgggagcttctccaggcccaggcattgagcaaggagttgaggatgaagcagaacctccagaagtggcagcagtttaactcagacttgaacagcatctgggcctggctgggggacacggaggaggagttggaacagctccagcgtctggaactcagcactgacatccagaccatcgagctccagatcaaaaagctcaaggagctccagaaagctgtggaccaccgcaaagccatcatcctctccatcaatctctgcagccctgagttcacccaggctgacagcaaggagagccgggacctgcaggatcgcttgtcgcagatgaatgggcgctgggaccgagtgtgctctctgctggaggagtggcggggcctgctgcaggatgccctgatgcagtgccagggtttccatgaaatgagccatggtttgcttcttatgctggagaacattgacagaaggaaaaatgaaattgtccctattgattctaaccttgatgcagagatacttcaggaccatcacaaacagcttatgcaaataaagcatgagctgttggaatcccaactcagagtagcctctttgcaagacatgtcttgccaactactggtgaatgctgaaggaacagactgtttagaagccaaagaaaaagtccatgttattggaaatcggctcaaacttctcttgaaggaggtcagtcgtcatatcaaggaactggagaagttattagacgtgtcaagtagtcagcaggatttgtcttcctggtcttctgctgatgaactggacacctcagggtctgtgagtcccacatcaggaaggagcaccccaaacagacagaaaacgccacgaggcaagtgtagtctctcacagcctggaccctctgtcagcagtccacatagcaggtccacaaaaggtggctccgattcctccctttctgagccagggccaggtcggtccggccgcggcttcctgttcagagtcctccgagcagctcttccccttcagcttctcctgctcctcctcatcgggcttgcctgccttgtaccaatgtcagaggaagactacagctgtgccctctccaacaactttgcccggtcattccaccccatgctcagatacacgaatggccctcctccactctgaactaagcagatgccatctgcagaagtgctggtagcataaggaggatcgggtcataagcaatcccaaactaccaacaagaggaccttgatcttggcgaaagccctcggtgtggcagctttagccctcctccagatcacatgtgtgcaaattatggcttcagaggtggaagataaacagtgacgggggaacaaacagacaacaagaaggtttggaagaaatctggtttgagactctgaaccttagcactaaggagattgagtaaggacctccaaagttccccggactcatgaattctgggcccttggcccattctgtgcacagccaaggacttcagtagaccatctgggcagctttcccatggtgctgctccaaccatcagataaatgaccctcccaagcaccatgtcagtgtcgtacaatctaccaaccaaccagtgctgaagagattttagaaccttgtaacatacaatttttaagagcttatatggcagcttcctttttaccttgttttcctttggggcatgatgttttaacctttgctttagaagcacaagctgtaaatctaaaaggcacttttttttagaggtataaagaaaaactagatgtaataaataagatcatggaaggctttatgtgaaaaaagttgaatgttatagtaaaaaaaaaaagatatttatgtatgtacagtttgctaaagccaagttttgtttgtattgatttctttgcatttattatagatattataaaata

SEQ ID NO: 185314 - DNA, 4860 bp, Homo sapiens
  Payload ID: 16494
  Gene Symbol: SYNE1
  Gene Name: spectrin repeat containing, nuclear envelope 1
  Uniprot ID: Q8NF91
  ENST ID: ENST00000413186
  CDS Start-End: 1-4332
atggcaacctccagaggggcctcccggtgtcctcgggatatcgccaatgtgatgcagaggctgcaagatgagcaagagatagtacaaaaacgaactttcacaaaatggatcaactctcatctggccaagcggaaacctccaatggtggtggacgatctttttgaagacatgaaagatggtgttaaactgcttgcccttctggaggtcctgtctgggcagaaactgccttgtgaacaaggacgccggatgaagcgaatccatgctgtggctaacattggcacggcactcaagttcctcgaaggaagaaagattaaattagtcaacattaactccaccgatatagctgatggccgaccctcaatagttcttggattgatgtggaccattattctatatttccagattgaagagttgaccagcaacctgccccagctccagtctttgtccagcagcgcatcctccgtggacagcatagttagctctgagactcccagcccaccaagtaaacggaaggtgaccaccaagatccaaggaaatgctaagaaggctttattaaagtgggttcagtacacagctggcaagcagactggaatagaagtaaaagattttgggaagagttggagaagcggggttgcctttcattcagttattcatgccattcgaccggaattggtggacttggagacagtgaaaggcagatccaaccgagaaaatttggaggatgctttcactatcgccgaaacagaactggggatcccaagactgctagatcctgaagacgttgatgtggataaaccagatgagaaatctattatgacctatgtagcccagtttctgaaacattatcctgacatccacaatgcaagcactgatgggcaagaggatgatgaaatacttccaggtttcccatcttttgcaaattctgtacaaaattttaagagagaagacagagtaatttttaaggaaatgaaagtttggatagaacaatttgagagagatttgacaagagcacagatggtggaatcaaatttacaggataaatatcagtcatttaagcacttcagagttcaatatgaaatgaagaggaaacagattgaacatttaatacaaccattacacagagacggtaaattgtcacttgaccaagcattggtaaaacaatcttgggatagagtgacctccaggctctttgactggcatatacagcttgataaatctcttcctgcacctctgggcaccataggtgcctggctgtacagagcggaggtggccctgagagaggaaataaccgttcaacaggtccacgaggaaacagcaaacacgatacaacggaaacttgagcaacataaggatctgcttcaaaacacggatgcccacaaaagagcattccatgaaatctaccggaccaggtctgttaacgggattccagtgccacctgatcaattagaggacatggccgagaggtttcattttgtttcctccacatcagagctacacctaatgaaaatggaatttttagaattaaagtaccgtctgctctcactgctggttcttgcagagtcaaagctgaagtcttggatcattaagtacgggaggagagagtcagtggagcagcttctacaaaactacgtgtcttttatagaaaatagcaagttctttgaacaatatgaggtgacataccagatcttgaaacagacagctgagatgtatgtcaaagcagatggttcagtggaagaagctgagaatgtgatgaaattcatgaatgaaaccaccgctcagtggaggaatctctcagtagaagtgaggagtgtgaggagcatgctggaagaagtgatctctaactgggatcgctatggcaatacagtggctagtctgcaagcctggctagaggatgctgaaaaaatgctcaatcaatcagaaaatgccaaaaaggatttttttcgaaatttacctcattggattcagcagcatactgccatgaacgatgctggcaattttctaattgaaacctgtgatgagatggtttcccgtgacctgaagcagcaattactgttgctaaatgggcggtggagggagttgtttatggaagtcaagcaatatgctcaagctgatgagatggacagaatgaagaaggaatacacagactgtgttgttaccctgtctgcttttgcaacggaagcccataagaaactttctgaacccttagaagtctcttttatgaatgtcaagctattaattcaagacttggaggatattgagcagagggtgcctgtgatggatgcccaatacaagataattacaaagacagcacacctcattaccaaagaaagcccccaagaagaaggaaaagaaatgtttgcgaccatgtcaaagctcaaagagcagctaaccaaggtcaaagaatgttactccccactcctttatgagtctcagcagctgttgattccgttggaggaattagaaaagcagatgacgtccttttatgactcacttgggaaaatcaatgaaattatcacagttcttgagcgtgaggcacaatcgagtgccctttttaaacaaaaacatcaggaactgttagcttgtcaagaaaactgtaagaaaaccttgacacttattgagaaaggcagtcaaagtgttcaaaagtttgtgaccttgagcaacgtgttaaagcattttgatcagacgaggctacaaagacagattgcagatattcatgttgcttttcagagtatggtaaagaaaactggagattggaagaagcatgtggaaaccaacagtcgcttgatgaagaagtttgaggagtctcgagcagagttggagaaggtactgcggattgctcaggagggcctggaggaaaagggggatccagaggagctcctgcggagacacactgagtttttcagtcagctggatcagagggtgctcaatgctttcctgaaagcttgtgatgaactcaccgacatccttccagagcaggagcagcaggggctgcaggaagctgttcgaaagctccacaaacaatggaaggatcttcaaggagaagccccttatcatttgcttcatctgaagattgatgtggagaagaataggttcttagcctctgtagaagaatgcagaactgagctggatcgagagaccaagctgatgccccaggaaggcagtgaaaagataattaaagagcacagggttttcttcagtgacaaaggtcctcatcatctctgtgagaaaaggttacagctcatcgaggaactctgtgtgaaactcccagtgcgggacccagtaagggacacacctggaacctgtcacgtgactctcaaagagctcagagctgccattgacagcacctacaggaagctcatggaagacccagacaagtggaaggactacactagcagattctctgagttctcatcttggatatctacaaatgagacacaattaaaggggatcaagggtgaggccatcgatactgccaaccacggagaggttaaacgtgccgttgaagagatcagaaatggtgttaccaaaaggggtgagaccctcagctggctgaaatccaggctgaaagttttgacagaagtttcttctgagaatgaagcccaaaagcagggagatgagctggcaaaattatccagctctttcaaggctcttgtgacgctgctgtcagaggttgaaaagatgctaagcaattttggggactgtgtccagtacaaagaaatagtcaaaaattctctcgaagaattaatttctggctctaaagaagtccaggaacaagctgagaagatcttggatactgaaaatctgtttgaagcacagcagttacttcttcatcaccagcaaaagacaaagcggatctcagcaaagaagagagatgtgcagcagcagatcgcgcaggcgcagcagggagaaggggggctgcctgaccgaggccacgaggagctgcggaagctggagagcacactggatggcctggagcgcagccgggagaggcaggaacgccgcatccaggtcacattaagaaaatgggagcgatttgaaacaaacaaagaaacagtagtaagatacctttttcaaacaggttccagtcatgaacgcttcttgagttttagcagtttggaaagtttatcttcagaactggaacaaacaaaggagttttctaaacggacagaaagtattgcagtccaggctgagaaccttgtaaaggaagcttcagagataccgcttgggccccaaaataagcagctgcttcaacagcaggccaagtcaatcaaagaacaagtcaaaaaattagaagacacgcttgaagaagagtatgtgattgacaagtcctaaactttcttctctgagataaagtttcatacaatctttcctgtaccttgtattcaaaacactcttttaaaatctcaaagtgtctgtgtatttcagcatgttttgaggaaacaactcacagttcaaaagaaagtatcgctaatacagaaaccaatatctataacagagcccaaaaaatataaaggatgtgggttttgcatcttaaactgatcatgttcatgagaaagccatatctattctattctgtggcctttgtacattgtagagggaatcttgaaaaagaactaatatttaaaataatttttttactatattattctgctgtcaccatttagagcgaaaaggagatattttgttagtgtagattccaggcctaaatacacatcacatagaccatatatctccaacctgaagaagctcctggagcttgtttacagtgcctcggtattcaagttatcctgactaatatgctctttccagaaattaactttaaaatattttatttttaaacttttaatgtttgtttatctg

SEQ ID NO: 185315 - DNA, 776 bp, Homo sapiens
  Payload ID: 16494
  Gene Symbol: SYNE1
  Gene Name: spectrin repeat containing, nuclear envelope 1
  ENST ID: ENST00000540663
  CDS Start-End: 49-776
actacttctgtttccttttgatgctgctctgacaccccggtgggggaaatgtttcctcaggagctggcgcagaaaattaagggctaccaggagcagatcgcttctttgaattccaagtgcaagatgctgacgatgaaagccaagcacgccaccatgctgctgacggtgaccgaggtcgaggggctggcggaagggacagaggacctggatggggagctcctccccacgccttcggcccacccctctgtggtcatggacattgcatattaccaagccttgtctgctgagaggttgcagacagatgctgcaaaaattcaccccagcacatccgcatcccaggagttctatgaaccgggattggagccatccgctactgccaaactgggtgatttgcagcgttcttgggaaaccttaaagaatgtgatcagtgagaagcagcgcacactctatgaagctttggaacgccagcagaagtaccaggactccctccagtccatctctacgaagatggaggccattgagctgaaactcagtgagagcccagagcctggcaggagtccagaaagccagatggctgaacatcaggcattgatggatgagattctcatgctccaggatgaaatcaatgagctccagtcctctctcgcagaggagctggtatccgagtcttgtgaggccgaccctgcggagcagctggccttgcagtccacgctcactgtcttagccgagcgaatgtccaccatcaggatgaaagcctcggggaaacggcagctttt

SEQ ID NO: 185316 - DNA, 1907 bp, Homo sapiens
  Payload ID: 16494
  Gene Symbol: SYNE1
  Gene Name: spectrin repeat containing, nuclear envelope 1
  ENST ID: ENST00000495090
  CDS Start-End: 10-1848
aattattagatgcagttccagcatagtgttttaagtacaagcacccagctcctattcaaggatctgcttcaaaacacggatgcccacaaaagagcattccatgaaatctaccggaccaggtctgttaacgggattccagtgccacctgatcaattagaggacatggccgagaggtttcattttgtttcctccacatcagagctacacctaatgaaaatggaatttttagaattaaagtaccgtctgctctcactgctggttcttgcagagtcaaagctgaagtcttggatcattaagtacgggaggagagagtcagtggagcagcttctacaaaactacgtgtcttttatagaaaatagcaagttctttgaacaatatgaggtgacataccagatcttgaaacagacagctgagatgtatgtcaaagcagatggttcagtggaagaagctgagaatgtgatgaaattcatgaatgaaaccaccgctcagtggaggaatctctcagtagaagtgaggagtgtgaggagcatgctggaagaagtgatctctaactgggatcgctatggcaatacagtggctagtctgcaagcctggctagaggatgctgaaaaaatgctcaatcaatcagaaaatgccaaaaaggatttttttcgaaatttacctcattggattcagcagcatactgccatgaacgatgctggcaattttctaattgaaacctgtgatgagatggtttcccgtgacctgaagcagcaattactgttgctaaatgggcggtggagggagttgtttatggaagtcaagcaatatgctcaagctgatgagatggacagaatgaagaaggaatacacagactgtgttgttaccctgtctgcttttgcaacggaagcccataagaaactttctgaacccttagaagtctcttttatgaatgtcaagctattaattcaagacttggaggatattgagcagagggtgcctgtgatggatgcccaatacaagataattacaaagacagcacacctcattaccaaagaaagcccccaagaagaaggaaaagaaatgtttgcgaccatgtcaaagctcaaagagcagctaaccaaggtcaaagaatgttactccccactcctttatgagtctcagcagctgttgattccgttggaggaattagaaaagcagatgacgtccttttatgactcacttgggaaaatcaatgaaattatcacagttcttgagcgtgaggcacaatcgagtgccctttttaaacaaaaacatcaggaactgttagcttgtcaagaaaactgtaagaaaaccttgacacttattgagaaaggcagtcaaagtgttcaaaagtttgtgaccttgagcaacgtgttaaagcattttgatcagacgaggctacaaagacagattgcagatattcatgttgcttttcagagtatggtaaagaaaactggagattggaagaagcatgtggaaaccaacagtcgcttgatgaagaagtttgaggagtctcgagcagagttggagaaggtactgcggattgctcaggagggcctggaggaaaagggggatccagaggagctcctgcggagacacactgagtttttcagtcagctggatcagagggtgctcaatgctttcctgaaagcttgtgatgaactcaccgacatccttccagagcaggagcagcaggggctgcaggaagctgttcgaaagctccacaaacaatggaaggtgagtcaggacaggacggagacaccgtgcatcctcaatgaagggagaagcttgagcgtgttaaggtccaaatgtaagagaaatttagaaattcctggaaagtcactgtaactatttcgctcatttaaaaactcaaaaaactggacttaaataaaacctgataatatatg

SEQ ID NO: 185317 - DNA, 1798 bp, Homo sapiens
  Payload ID: 16494
  Gene Symbol: SYNE1
  Gene Name: spectrin repeat containing, nuclear envelope 1
  ENST ID: ENST00000474655
  CDS Start-End: 1-188
agttccagcatagtgttttaagtacaagcacccagctcctattcaaggatctgcttcaaaacacggatgcccacaaaagagcattccatgaaatctaccggaccaggtctgttaacgggattccagtgccacctgatcaattagaggacatggccgagagagtcaaagctgaagtcttggatcattaagtacgggaggagagagtcagtggagcagcttctacaaaactacgtgtcttttatagaaaatagcaagttctttgaacaatatgaggtgacataccagatcttgaaacagacagctgagatgtatgtcaaagcagatggttcagtggaagaagctgagaatgtgatgaaattcatgaatgaaaccaccgctcagtggaggaatctctcagtagaagtgaggagtgtgaggagcatgctggaagaagtgatctctaactgggatcgctatggcaatacagtggctagtctgcaagcctggctagaggatgctgaaaaaatgctcaatcaatcagaaaatgccaaaaaggatttttttcgaaatttacctcattggattcagcagcatactgccatgaacgatgctggcaattttctaattgaaacctgtgatgagatggtttcccgtgacctgaagcagcaattactgttgctaaatgggcggtggagggagttgtttatggaagtcaagcaatatgctcaagctgatgagatggacagaatgaagaaggaatacacagactgtgttgttaccctgtctgcttttgcaacggaagcccataagaaactttctgaacccttagaagtctcttttatgaatgtcaagctattaattcaagacttggaggatattgagcagagggtgcctgtgatggatgcccaatacaagataattacaaagacagcacacctcattaccaaagaaagcccccaagaagaaggaaaagaaatgtttgcgaccatgtcaaagctcaaagagcagctaaccaaggtcaaagaatgttactccccactcctttatgagtctcagcagctgttgattccgttggaggaattagaaaagcagatgacgtccttttatgactcacttgggaaaatcaatgaaattatcacagttcttgagcgtgaggcacaatcgagtgccctttttaaacaaaaacatcaggaactgttagcttgtcaagaaaactgtaagaaaaccttgacacttattgagaaaggcagtcaaagtgttcaaaagtttgtgaccttgagcaacgtgttaaagcattttgatcagacgaggctacaaagacagattgcagatattcatgttgcttttcagagtatggtaaagaaaactggagattggaagaagcatgtggaaaccaacagtcgcttgatgaagaagtttgaggagtctcgagcagagttggagaaggtactgcggattgctcaggagggcctggaggaaaagggggatccagaggagctcctgcggagacacactgagtttttcagtcagctggatcagagggtgctcaatgctttcctgaaagcttgtgatgaactcaccgacatccttccagagcaggagcagcaggggctgcaggaagctgttcgaaagctccacaaacaatggaaggtgagtcaggacaggacggagacaccgtgcatcctcaatgaagggagaagcttgagcgtgttaaggtccaaatgtaagagaaatttagaaattcctggaaagtcactgtaactatttcgctcatttaaaaactcaaaaaactggacttaaataaaacctgataatatat

SEQ ID NO: 185318 - DNA, 3768 bp, Homo sapiens
  Payload ID: 16494
  Gene Symbol: SYNE1
  Gene Name: spectrin repeat containing, nuclear envelope 1
  ENST ID: ENST00000539504
  CDS Start-End: 161-3019
cttgtcactgcccagtgtcatgttatcgggcagagactaccaacatttgtctacagtgagcattttcatacttctatacacagacaaggggaaactttcatccccacgcaggatatagctttttgctctgcagagtctaacttttgcaagtggaagcttcatggtggtggcggaggacctgagtgccctgaggatggcagaggacagctgtgtggatgcagatctcccagattgtaactgcgatgtcacaagggtgaagaagctgaaggagaccctggtagccgtgcagcagcttgataagaacatgagcagcctgaggacctggctcgctcacatcgagtcagagctggccaagccaatagtctacgattcctgtaactcggaagaaatacagagaaagcttaatgagcagcaggagcttcagagagacatagagaagcacagtacaggtgttgcatctgtcctcaacctgtgtgaagtcctgctgcacgactgtgacgcctgtgccactgatgccgagtgtgactctatacagcaggctacgagaaacctggaccggcggtggagaaacatttgtgctatgtccatggaaaggaggctgaaaatcgaagagacgtggcgattgtggcagaaatttctggatgactattcacgttttgaagattggctgaagtcttcagaaaggacagctgcttttcccagctcttctggggtgatctatacagttgccaaggaagaactaaagaaatttgaggctttccagcgacaggtccacgagtgcctgacgcagctggaactgatcaacaagcagtaccgccgcctggccagggagaaccgcactgattcagcatgtagcctcaaacagatggttcacgaaggcaaccagagatgggacaacctgcaaaagcgtgtcacctccatcttgcgcagactcaagcattttattggccagcgtgaggagtttgagactgcgcgggacagcattctggtctggctcacagagatggatctgcagctcactaatattgaacatttttctgagtgtgatgttcaagctaaaataaagcaactcaaggccttccagcaggaaatttcactgaaccacaataagattgagcagataattgcccaaggagaacagctgatagaaaagagtgagcccttggatgcagcgatcatcgaggaggaactagatgagctccgacggtactgccaggaggtcttcgggcgtgtggaaagataccataagaaactgatccgcctgcctctcccagacgatgagcacgacctctcagacagggagctggagctggaagactctgcagctctgtcggacctgcactggcacgaccgctctgcagacagcctgctttctccacagccttcctccaatctctccctctcgctcgctcagcccctccggagcgagcggtcaggacgagacaccccggctagtgtggactccatccccctggagtgggatcacgactatgacctcagtcgggacctggagtctgcaatgtccagagctctgccctctgaggatgaagaaggtcaggatgacaaagatttctacctccggggagctgttggcttatcaggggaccacagtgccctagagtcacagatccgacaactgggcaaagccctggatgatagccgttttcagatacagcaaaccgaaaatatcattcgcagcaaaactcccacggggccggagctagacaccagctacaaaggctacatgaaactgctgggcgaatgcagtagcagtatagactccgtgaagagactggagcacaaactgaaggaggaagaggagagccttcctggctttgttaacctgcatagtaccgaaacccaaacggctggtgtgattgaccgatgggagcttctccaggcccaggcattgagcaaggagttgaggatgaagcagaacctccagaagtggcagcagtttaactcagacttgaacagcatctgggcctggctgggggacacggaggaggagttggaacagctccagcgtctggaactcagcactgacatccagaccatcgagctccagatcaaaaagctcaaggagctccagaaagctgtggaccaccgcaaagccatcatcctctccatcaatctctgcagccctgagttcacccaggctgacagcaaggagagccgggacctgcaggatcgcttgtcgcagatgaatgggcgctgggaccgagtgtgctctctgctggaggagtggcggggcctgctgcaggatgccctgatgcagtgccagggtttccatgaaatgagccatggtttgcttcttatgctggagaacattgacagaaggaaaaatgaaattgtccctattgattctaaccttgatgcagagatacttcaggaccatcacaaacagcttatgcaaataaagcatgagctgttggaatcccaactcagagtagcctctttgcaagacatgtcttgccaactactggtgaatgctgaaggaacagactgtttagaagccaaagaaaaagtccatgttattggaaatcggctcaaacttctcttgaaggaggtcagtcgtcatatcaaggaactggagaagttattagacgtgtcaagtagtcagcaggatttgtcttcctggtcttctgctgatgaactggacacctcagggtctgtgagtcccacatcaggaaggagcaccccaaacagacagaaaacgccacgaggcaagtgtagtctctcacagcctggaccctctgtcagcagtccacatagcaggtccacaaaaggtggctccgattcctccctttctgagccagggccaggtcggtccggccgcggcttcctgttcagagtcctccgagcagctcttccccttcagcttctcctgctcctcctcatcgggcttgcctgccttgtaccaatgtcagaggaagactacagctgtgccctctccaacaactttgcccggtcattccaccccatgctcagatacacgaatggccctcctccactctgaactaagcagatgccatctgcagaagtgctggtagcataaggaggatcgggtcataagcaatcccaaactaccaacaagaggaccttgatcttggcgaaagccctcggtgtggcagctttagccctcctccagatcacatgtgtgcaaattatggcttcagaggtggaagataaacagtgacgggggaacaaacagacaacaagaaggtttggaagaaatctggtttgagactctgaaccttagcactaaggagattgagtaaggacctccaaagttccccggactcatgaattctgggcccttggcccattctgtgcacagccaaggacttcagtagaccatctgggcagctttcccatggtgctgctccaaccatcagataaatgaccctcccaagcaccatgtcagtgtcgtacaatctaccaaccaaccagtgctgaagagattttagaaccttgtaacatacaatttttaagagcttatatggcagcttcctttttaccttgttttcctttggggcatgatgttttaacctttgctttagaagcacaagctgtaaatctaaaaggcacttttttttagaggtataaagaaaaactagatgtaataaataagatcatggaaggctttatgtgaaaaaagttgaatgttatagtaaaaaaaaaaagatatttatgtatgtacagtttgctaaagccaagttttgtttgtattgatttctttgcatttattatagatattataaaata

SEQ ID NO: 185319 - DNA, 2850 bp, Homo sapiens
  Payload ID: 16494
  Gene Symbol: SYNE1
  Gene Name: spectrin repeat containing, nuclear envelope 1
  ENST ID: ENST00000537750
  CDS Start-End: 1005-2850
gaatgctaccaggcaacaccaagatctcttacaccacgagaaggacttgtggccaaagatacaaatggctccgcaatgtacagggtgcatacagtgcacctgaagaacctaaaagtggtttttagaatcatcataataaacagtcaagaattaaagatgtcaagcgctttctcaagaagtctaaactttatacataacattaaaaaagatctataaagcctgaccagtctccctcaaattaagttatttgctactgacttggcagccaaaacgatttaggatctttcggaagttgatgaaaaaggagccagcgggttttgctctttgctctgcatcacgcccttcctgggaccatcagggaacctcccagcctttcaggataggttccgctcagaaaggtcacccgggcagtggaaaccgtgggcaaaagttagctggcaggacagcgcagctcctccaggcagcggaggcagcgcgtcccggctctcagggacatttccttcccacctcgacccccgggaggtggtcccggtataaaggctcgctgagcgggtgggtcacagcacagctttgcagctgcggagaaacgcccaaggccgtgcatctccaggagggcggctgggctcccgcagtcctgcagaccgcgcccgatcccggcgacagggcgggcggacagccgcgcatccccggggtcccgccgagcctgggcgcagagagccgggaggaagcgttcgctcgcttcgccttgctgctgggaaactgaacgaggccgagagagaaggttcttgagttcatgtaagaggacagtcttaaaacggaagaagaaaaagaagcagttcagtctttgggagagctgcctccttgttgagtgctgcaaaggcctggaattcatttatgacagaatagatctagaaaagtccaagcatgttttctagagtggtgtagccctgtgctgcctccagtgaagagtctcttggtgttggcttcgtgcttccggagggaccatggcaacctccagaggggcctcccggtgtcctcgggatatcgccaatgtgatgcagaggctgcaagatgagcaagagatagtacaaaaacgaactttcacaaaatggatcaactctcatctggccaagcggaaacctccaatggtggtggacgatctttttgaagacatgaaagatggtgttaaactgcttgcccttctggaggtcctgtctgggcagaaactgccttgtgaacaaggacgccggatgaagcgaatccatgctgtggctaacattggcacggcactcaagttcctcgaaggaagaaagattaaattagtcaacattaactccaccgatatagctgatggccgaccctcaatagttcttggattgatgtggaccattattctatatttccagattgaagagttgaccagcaacctgccccagctccagtctttgtccagcagcgcatcctccgtggacagcatagttagctctgagactcccagcccaccaagtaaacggaaggtgaccaccaagatccaaggaaatgctaagaaggctttattaaagtgggttcagtacacagctggcaagcagactggaatagaagtaaaagattttgggaagagttggagaagcggggttgcctttcattcagttattcatgccattcgaccggaattggtggacttggagacagtgaaaggcagatccaaccgagaaaatttggaggatgctttcactatcgccgaaacagaactggggatcccaagactgctagatcctgaagacgttgatgtggataaaccagatgagaaatctattatgacctatgtagcccagtttctgaaacattatcctgacatccacaatgcaagcactgatgggcaagaggatgatagagaagacagagtaatttttaaggaaatgaaagtttggatagaacaatttgagagagatttgacaagagcacagatggtggaatcaaatttacaggataaatatcagtcatttaagcacttcagagttcaatatgaaatgaagaggaaacagattgaacatttaatacaaccattacacagagacggtaaattgtcacttgaccaagcattggtaaaacaatcttgggatagagtgacctccaggctctttgactggcatatacagcttgataaatctcttcctgcacctctgggcaccataggtgcctggctgtacagagcggaggtggccctgagagaggaaataaccgttcaacaggtccacgaggaaacagcaaacacgatacaacggaaacttgagcaacataaggatctgcttcaaaacacggatgcccacaaaagagcattccatgaaatctaccggaccaggtctgttaacgggattccagtgccacctgatcaattagaggacatggccgagaggtttcattttgtttcctccacatcagagctacacctaatgaaaatggaatttttagaattaaagtaccgtctgctctcactgctggttcttgcagagtcaaagctgaagtcttggatcattaagtacgggaggagagagtcagtggagcagcttctacaaaactacgtgtcttttatagaaaatagcaagttctttgaacaatatgaggtgacataccagatcttgaaacagacagctgagatgtatgtcaaagcagatggttcagtggaagaagctgagaatgtgatgaaattcatgaatgaaaccaccgctcagtggaggaatctctcagtagaagtgaggagtgtgaggagcatgctggaagaagtgatctctaactgggatcgctatggcaatacagtggctagtctgcaagcctggctagaggatgctg

SEQ ID NO: 185320 - DNA, 630 bp, Homo sapiens
  Payload ID: 16494
  Gene Symbol: SYNE1
  Gene Name: spectrin repeat containing, nuclear envelope 1
  ENST ID: ENST00000469439
  CDS Start-End: 1-622
caaagagaaagcgaaagggatccaggccaaagttacagctgcaaaagaagattggaaaaattttcattcaaatctccaccaaaaagaatctgctctagagaatctaaagatccaaatgaaggactttgaagtaagtgctgagcctatccaggactggctgagtaaaactgagaagatggtccatgaaagcagcaatcgcctctatgatctgccagcaaagaggagggagcagcagaagctccaggagaaagtgtcaagactggatagaatcgttgcagaacacaatcagttctctcttgggattaaagaattacaagactggatgacggatgcgattcacatgctggattcatactgccacccgacatccgacaaaagtgtgctggacagcaggacgctcaagctcgaggtgtgcatctttacacagaaatatctccaacctacagaatttgtttttctcaaaatttcccgtctccatccacctggggtgatgatgtcacattctctccatgataaatctcagatgctttgtgagtgcaacgctgtctgccttgggtgcacatgccagagaattcctgaatcatctgaccccggatgttttccaaaaaataaaataaaataaagcccgaa

SEQ ID NO: 185321 - DNA, 647 bp, Homo sapiens
  Payload ID: 16494
  Gene Symbol: SYNE1
  Gene Name: spectrin repeat containing, nuclear envelope 1
  ENST ID: ENST00000537033
  CDS Start-End: 62-647
gaagatgaacgctactacttctgtttccttttgatgctgctctgacaccccggtgggggaaatgtttcctcaggagctggcgcagaaaattaagggctaccaggagcagatcgcttctttgaattccaagtgcaagatgctgacgatgaaagccaagcacgccaccatgctgctgacggtgaccgaggtcgaggggctggcggaagggacagaggacctggatggggagctcctccccacgccttcggcccacccctctgtggtcatgatgactgcaggtcgctgtcacactttgctgtcaccggtcactgaggagtctggggaggagggaaccaacagtgagatttcctctccacctgcctgtcgctccccttcacctgtggctaatacagatgcttctgttaaccaggacattgcatattaccaagccttgtctgctgagaggttgcagacagatgctgcaaaaattcaccccagcacatccgcatcccaggagttctatgaaccgggattggagccatccgctactgccaaactgggtgatttgcagcgttcttgggaaaccttaaagaatgtgatcagtgagaagcagcgcacactctatgaagctttggaacgccagcagaagtaccaggactccctccagt

SEQ ID NO: 185322 - DNA, 2610 bp, Homo sapiens
  Payload ID: 16494
  Gene Symbol: SYNE1
  Gene Name: spectrin repeat containing, nuclear envelope 1
  ENST ID: ENST00000466159
  CDS Start-End: 153-2417
gctgcctccttgttgagtgctgcaaaggcctggaattcatttatgacagaatagatctagaaaagtccaagcatgttttctagagtggtgtagccctgtgctgcctccagtgaagagtctcttggtgttggcttcgtgcttccggagggaccatggcaacctccagaggggcctcccggtgtcctcgggatatcgccaatgtgatgcagaggctgcaagatgagcaagagatagtacaaaaacgaactttcacaaaatggatcaactctcatctggccaagcggaaacctccaatggtggtggacgatctttttgaagacatgaaagatggtgttaaactgcttgcccttctggaggtcctgtctgggcagaaactgccttgtgaacaaggacgccggatgaagcgaatccatgctgtggctaacattggcacggcactcaagttcctcgaaggaagaaagattaaattagtcaacattaactccaccgatatagctgatggccgaccctcaatagttcttggattgatgtggaccattattctatatttccagattgaagagttgaccagcaacctgccccagctccagtctttgtccagcagcgcatcctccgtggacagcatagttagctctgagactcccagcccaccaagtaaacggaaggtgaccaccaagatccaaggaaatgctaagaaggctttattaaagtgggttcagtacacagctggcaagcagactggaatagaagtaaaagattttgggaagagttggagaagcggggttgcctttcattcagttattcatgccattcgaccggaattggtggacttggagacagtgaaaggcagatccaaccgagaaaatttggaggatgctttcactatcgccgaaacagaactggggatcccaagactgctagatcctgaagacgttgatgtggataaaccagatgagaaatctattatgacctatgtagcccagtttctgaaacattatcctgacatccacaatgcaagcactgatgggcaagaggatgatgaaatacttccaggtttcccatcttttgcaaattctgtacaaaattttaagagagaagacagagtaatttttaaggaaatgaaagtttggatagaacaatttgagagagatttgacaagagcacagatggtggaatcaaatttacaggataaatatcagtcatttaagcacttcagagttcaatatgaaatgaagaggaaacagattgaacatttaatacaaccattacacagagacggtaaattgtcacttgaccaagcattggtaaaacaatcttgggatagagtgacctccaggctctttgactggcatatacagcttgataaatctcttcctgcacctctgggcaccataggtgcctggctgtacagagcggaggtggccctgagagaggaaataaccgttcaacaggtccacgaggaaacagcaaacacgatacaacggaaacttgagcaacataaggatctgcttcaaaacacggatgcccacaaaagagcattccatgaaatctaccggaccaggtctgttaacgggattccagtgccacctgatcaattagaggacatggccgagaggtttcattttgtttcctccacatcagagctacacctaatgaaaatggaatttttagaattaaagtaccgtctgctctcactgctggttcttgcagagtcaaagctgaagtcttggatcattaagtacgggaggagagagtcagtggagcagcttctacaaaactacgtgtcttttatagaaaatagcaagttctttgaacaatatgaggtgacataccagatcttgaaacagacagctgagatgtatgtcaaagcagatggttcagtggaagaagctgagaatgtgatgaaattcatgaatgaaaccaccgctcagtggaggaatctctcagtagaagtgaggagtgtgaggagcatgctggaagaagtgatctctaactgggatcgctatggcaatacagtggctagtctgcaagcctggctagaggatgctgaaaaaatgctcaatcaatcagaaaatgccaaaaaggatttttttcgaaatttacctcattggattcagcagcatactgccatgaacgatgctggcaattttctaattgaaacctgtgatgagatggtttcccgtgacctgaagcagcaattactgttgctaaatgggcggtggagggagttgtttatggaagtcaagcaatatgctcaagctgatgagatggacagaatgaagaaggaatacacagactgtgttgttaccctgtctgcttttgcaacggaagcccataagaaactttctgaacccttagaagtctcttttatgaatgtcaagctattaattcaagacttggaggtgaggggtttctgaatcaaaatgaaaagcctactctgttgtgagaggaaagatcagcaagtttattcagatcattgcaaaagctgtttctgtgtctcctgggcatcattttgacatgtctgtatgtcccaatttgcacctgtcagaaaaaaatgtattgaacataaaaaagacatgacttgatcatataaagtaacttcaaattgtt

SEQ ID NO: 185323 - DNA, 1754 bp, Homo sapiens
  Payload ID: 16494
  Gene Symbol: SYNE1
  Gene Name: spectrin repeat containing, nuclear envelope 1
  ENST ID: ENST00000610489
  CDS Start-End: 321-1754
tcgcttcgccttgctgctgggaaactgaacgaggccgagagagaaggttcttgagttcatgtaagaggacagtcttaaaacggaagaagaaaaagaagcagttcagtctttgggagagctgcctccttgttgagtgctgcaaaggcctggaattcatttatgacagaatagatctagaaaagtccaagcatgttttctagagtggtgtagccctgtgctgcctccagtgaagagtctcttggtgttggcttcgtgcttccggagggaccatggcaacctccagaggggcctcccggtgtcctcgggatatcgccaatgtgatgcagaggctgcaagatgagcaagagatagtacaaaaacgaactttcacaaaatggatcaactctcatctggccaagcggaaacctccaatggtggtggacgatctttttgaagacatgaaagatggtgttaaactgcttgcccttctggaggtcctgtctgggcagaaactgccttgtgaacaaggacgccggatgaagcgaatccatgctgtggctaacattggcacggcactcaagttcctcgaaggaagaaagtccatgcacagaggatcaccgattaaattagtcaacattaactccaccgatatagctgatggccgaccctcaatagttcttggattgatgtggaccattattctatatttccagattgaagagttgaccagcaacctgccccagctccagtctttgtccagcagcgcatcctccgtggacagcatagttagctctgagactcccagcccaccaagtaaacggaaggtgaccaccaagatccaaggaaatgctaagaaggctttattaaagtgggttcagtacacagctggcaagcagactggaatagaagtaaaagattttgggaagagttggagaagcggggttgcctttcattcagttattcatgccattcgaccggaattggtggacttggagacagtgaaaggcagatccaaccgagaaaatttggaggatgctttcactatcgccgaaacagaactggggatcccaagactgctagatcctgaagacgttgatgtggataaaccagatgagaaatctattatgacctatgtagcccagtttctgaaacattatcctgacatccacaatgcaagcactgatgggcaagaggatgatgaaatacttccaggtttcccatcttttgcaaattctgtacaaaattttaagagagaagacagagtaatttttaaggaaatgaaagtttggatagaacaatttgagagagatttgacaagagcacagatggtggaatcaaatttacaggataaatatcagtcatttaagcacttcagagttcaatatgaaatgaagaggaaacagattgaacatttaatacaaccattacacagagacggtaaattgtcacttgaccaagcattggtaaaacaatcttgggatagagtgacctccaggctctttgactggcatatacagcttgataaatctcttcctgcacctctgggcaccataggtgcctggctgtacagagcggaggtggccctgagagaggaaataaccgttcaacaggtccacgaggaaacagcaaacacgatacaacggaaacttgagcaacataagaaaatagaagcaatcagaaaagaattgccaccagctcccacggccacatcaacccacctacgcaattgcatctgtgcccgaatacacgctcttcacttctgttactatgggtga

SEQ ID NO: 185324 - DNA, 21777 bp, Homo sapiens
  Payload ID: 16495
  Gene Symbol: SYNE2
  Gene Name: spectrin repeat containing, nuclear envelope 2
  Uniprot ID: Q8WXH0
  ENST ID: ENST00000344113
  CDS Start-End: 213-20870
gccaaggagcggagcgcgctcagctgcgcccagagccttcggccggacctgaaaaagcgagagggagagcgagcaaaaggcgcgatccagagagccaggcaagcggggcgccgacctcgggcggccccggcccgcgcccttgcccctcggccgggcggacgttcacttcttcaactgagatggacatgatataatctccattgagtcaaagaatggcatctagtcctgagcttcccaccgaagatgaacagggttcctggggcatcgacgatctccatatttcattgcaagctgaacaggaagacacccagaagaaagccttcacgtgctggataaactcacagttggccaggcacacttctccctcagttatatccgacctattcacagacattaaaaaggggcatgtcctcctggatctgctagaagtactttctgggcaacagttgcctcgggataaaggatctaataccttccagtgtagaatcaatatagaacatgccttgacattcctaagaaaccgatcaattaagctaataaatattcatgttactgatatcattgatggaaacccatccattatccttggcctaatttggacaattatcctgcactttcatattgagaagcttgcccagactctttcttgcaattacaatcagccttccctggatgatgtgagtgtggttgactcatctcctgcctcaagtcctccagctaagaaatgctctaaagtgcaagcaagatggcaaatgtctgcaagaaaggcccttcttttgtgggctcaggaacaatgcgccacctatgagtctgtcaatgtgaccgattttaagtcaagttggagaaatgggatggcttttttggccatcattcatgccttgcgaccagacctaattgacatgaagagtgtgaagcatagatccaacaaagacaatctgagagaggccttcagaattgcagaacaagaattaaaaatccccagattgctggaaccagaagatgtggatgttgttgatcctgatgaaaagtccatcatgacctatgtggcacagtttctgcagtattccaaagatgcccctgggactggagaggaggctcagggaaaggtgaaagatgctatgggctggttaactctgcaaaaggaaaaactacagaagttgctaaaggattcagagaatgatacctactttaaaaagtataatagcctgctgtcctttatggagtcattcaatgaagaaaaaaagtcctttttggatgtcctgtcaataaaacgggatctggatgagctggacaaggatcatttacagttgagagaagcctgggatggcctcgatcaccagattaatgcatggaaaataaagctaaattatgccttgcccccacccctccatcaaactgaagcttggctccaggaggtagaagagcttatggatgaagatttgtcagcctcccaggatcactctcaagccgtgactctgatacaagagaaaatgactttattcaagagcctgatggatagatttgagcatcattcgaacattctccttacctttgaaaataaggatgaaaatcacttgccattggtaccacctaacaaattggaggaaatgaaaagacgaatcaacaacattttggagaaaaaatttattctacttctagaatttcattactacaagtgcttagttcttggtttggtagatgaagtgaaatcaaaattggatatttggaacattaaatatgggagcagagaatctgtggaattattgctggaagactggcataaatttattgaagaaaaagaattcctagctcgacttgatacttcttttcaaaaatgtggagaaatttataagaatttggctggagaatgtcagaatattaataaacagtatatgatggtgaaatctgatgtttgtatgtatagaaaaaatatatataatgtgaagtccactctacaaaaagtgctggcatgttgggctacttatgtggaaaaccttcgcttactaagggcttgctttgaggagacaaagaaggaagaaattaaagaggtaccctttgagacactagcccagtggaatctagaacacgctactttaaatgaagcaggaaatttcttagtcgaagtcagcaatgatgtggttggatcatctatttctaaagaactgagaaggctgaataaaagatggagaaagttggtttcaaaaactcaacttgaaatgaacctgccactgatgataaaaaaacaggatcagcccacttttgacaattctggaaatattctatctaaagaagagaaagcaactgttgagttttcaacagatatgtcagtagaacttcctgaaaattataatcaaaatataaaggctggagagaaacatgaaaaagaaaatgaagaattcacagggcaactaaaagtggctaaagatgttgaaaaactcattggacaagtggaaatctgggaggcagaagccaaatctgttttggatcaagatgatgtggacacctcaatggaagaatctttgaagcatcttattgccaaaggctctatgtttgatgagcttatggcaagaagtgaagatatgttacaaatggatatacaaaatatttcaagccaggagtcctttcaacatgttctcacaactgggcttcaggcaaagattcaagaagctaaagagaaagtccagatcaatgtggtaaaactcattgcagcgttgaagaacttaactgacgtttcaccagatttggacatcaggctgaagatggaagaatcccagaaggaacttgaatcatatatgatgagggctcagcagttactggggcaaagagagagccccggtgaactcatttcaaaacacaaggaagcactaataatttctaatacaaaaagtctggccaagtatttgaaagctgttgaagaactaaaaaataatgtaactgaggacataaagatgtctttagaagaaaagagtagagatgtctgtgccaaatgggagtctcttcatcatgaactgtctttatatgttcaacaactaaaaatagatattgaaaaaggaaagcttagtgacaatattttaaaacttgaaaagcaaataaataaagaaaagaaacttatccgtagaggaaggaccaagggtctcatcaaagaacatgaggcctgcttttctgaggaaggctgcctgtaccagcttaatcaccacatggaagtcctgagggagctgtgtgaagagctgccttcacagaagagtcaacaagaagtgaagagactactcaaagattatgaacaaaagatagaaagacttctgaaatgtgcttccgagattcatatgacactgcagcccacagcgggaggcacgtcgaaaaacgaggggaccatcaccacatctgagaatagaggaggggatccccacagtgaggcaccatttgcaaaatcagataatcagccatcaactgaaaaggcaatggaacccactatgaagtttagcctggcatcagtgttaaggcctctgcaagaagaaagcattatggaaaaggattacagtgcatctataaatagtttactagagaggtatgatacatacagagatattcttgaacaccacctgcaaaacaacaaattcaggattacttctgatttctctagtgaagaggacaggagtagttcttgtctgcaggctaaactgacagatctacaggtcataaaaaatgaaactgatgctcgctggaaagagtttgaaattatttcattgaagttagaaaatcatgtgaatgacataaaaaagccttttgtaattaaggaaagagacacactaaaggaaagagaaagagagcttcagatgactcttaataccagaatggaatctttagagacagcactgcggcttgtgttacctgtagagaaggcatcacttcttctctgtggctcggacctgcctctccataaaatggccatccagggatttcatctcattgatgctgatcgcatctatcaacacctaaggaatatccaagattccatagcaaaacagattgaaatatgtaaccgcttagaagagccaggcaactttgtattaaaggagttacacccatttgatctacacgcaatgcagaatattatactgaaatacaaaacacaatttgaaggaatgaaccacagggtgcagaggagtgaagatactctcaaagctctggaagactttttggcgtctctcagaacagctaaactctctgctgagcccgttacagacctttcagcctcagatacacaggtggcacaagaaaatacgttgacagtaaaaaataaagagggagaaattcatctgatgaaagacaaggccaaacatttggataaatgtttgaagatgctcgatatgagctttaaagatgctgaacggggtgatgacacctcctgtgaaaacctgcttgatgctttttcaataaagttatctgagacacatggctatggggtacaggaggaattcactgaggaaaacaaattactagaggcttgtattttcaaaaataatgaactccttaaaaatattcaagatgtgcagagtcaaatcagtaaaattggtcttaaggatcctactgttccagctgtgaaacatcggaaaaaatcattaatcagactggataaggttctagatgaatatgaagaagagaagagacatttacaagaaatggctaattctcttccacacttcaaagatggcagagaaaaaaccgtgaatcaacagtgccaaaatacagtagtcttgtgggagaataccaaagccttggtcaccgaatgtcttgaacaatgtgggagagttttggagctcttaaaacaatatcagaattttaaaagcatcttgacaactttgattcaaaaagaagagagtgtcatctccctgcaggcttcgtacatgggaaaggagaacctgaagaaaaggatagcagagattgaaattgtcaaagaagaatttaatgagcatttagaagttgtagacaagataaaccaggtctgcaaaaatctacaattttatctaaataaaatgaaaacttttgaagagcccccttttgaaaaagaggctaatattattgtggatagatggcttgatataaatgagaagacagaagattactatgaaaatcttggtcgagctctagctttgtgggacaaactttttaacttaaaaaatgtcattgatgagtggacagaaaaggcccttcaaaaaatggaattacatcaattgactgaagaggacagagaaaggctgaaggaagaattacaagtccatgaacaaaaaacttcagaattttctagaagagtggctgaaatacagtttttgctccaaagcagtgaaatacctcttgaattgcaggtcatggagtcctctattttgaacaagatggaacatgtacagaagtgcttaacaggagaatccaactgccatgcactcagtggcagcactgctgagctaagggaggatctcgaccaagccaagacccagatcgggatgactgaatccctcttaaaagccctgtctccttctgacagcttggagatcttcactaaactagaggagatacaacagcagattctacagcaaaaacacagtatgatattacttgagaatcaaataggttgtctgactcctgaactctctgaattgaaaaagcaatatgaaagtgtcagtgatttatttaataccaaaaaaagtgttttgcaagatcacttttctaagttattgaatgatcaatgcaagaactttaatgactggttcagcaacattaaagtgaaccttaaggagtgttttgaatcatcagaaacaaaaaagagtgtggaacaaaagctacaaaaactttctgatttcttgactcttgaaggaagaaacagtaaaataaagcaggtggacagcgtactgaagcatgtgaagaagcatctgcccaaagcacatgtgaaggagcttatcagttggctcgtgggtcaggaattcgaattagaaaaaatggagtccatatgccaggctcgagcaaaggagcttgaagactccttgcagcagctactgagactccaggatgaccatagaaacctgaggaagtggttgactaatcaagaagagaaatggaaaggaatggaagaaccaggggagaaaactgagctgttctgccaagctttagctagaaagagggaacagtttgaatctgtggcccaattgaacaactctttgaaggaatatgggtttactgaagaagaagaaataataatggaagcaacatgtttgatggatagataccagacattactgagacaactaagtgaaatcgaggaagaggataagttactacccacagaggaccagagctttaatgatcttgcacatgatgtaattcattggataaaagagattaaagagtcccttatggttttgaattcatccgaaggcaaaatgccacttgaggaaagaatccaaaaaatcaaggaaatcattttgctgaagcctgaaggggatgccagaatagagaccatcatgaagcaggctgagagcagcgaggccccgctggttcagaagaccctcactgacatcagcaaccagtgggacaacacactccatttagctagcacctacctaagccatcaagaaaagcttctactagaaggagagaaatatttacaaagtaaggaggatctgagattaatgctcatagaactaaagaagaaacaggaagcaggctttgctctacaacatggtctgcaggagaagaaagctcagttaaagatttataagaaattcctcaagaaagcccaagatttgacatccttgctaaaggagttaaaatctcagggaaactacctcttggagtgcactaaaaatcccagcttcagtgaagagccttggctggaaataaagcatctacacgaaagtcttcttcaacaactgcaggattctgtgcaaaacttggacggtcacgttcgagaacatgattcataccaggtttgcgtcacagacctgaatactacattggacaatttctccaaggaatttgtcagtttttctgataagcctgtggatcaaatagcggttgaggaaaaattgcagaaactgcaggaactagagaatagactcagtttacaagatggcacattaaagaagattttagctttagcaaaatccgtcaagcaaaatacatcttcagtggggcagaagattattaaagatgatataaaatcacttcagtgtaaacaaaaagatttggaaaacaggcttgcatctgctaagcaggagatggaatgttgtctcaacagcattctcaaatcaaaacgctcaacagaaaagaaaggaaagtttactctgccaggcagagagaagcaggccacttctgatgtgcaggagtctactcaggaatcagctgcagtggaaaagttggaggaagactgggaaataaacaaggattcagctgtggaaatggctatgtcaaaacaactttctcttaatgctcaagaaagcatgaaaaacactgaagatgagcggaaagtcaatgagctgcaaaatcaacctttagaattagatactatgttaagaaatgaacaattagaagagatagagaaattatatacccagttggaagcaaagaaagcagccattaagccactggaacaaacagaatgtcttaacaaaacagaaactggggccttggttctccacaatataggatattcggcacagcatttggacaatttgcttcaggcacttattactttgaagaaaaacaaagaaagccaatattgtgtcctcagagattttcaggaataccttgctgcagttgaatcttcaatgaaagccttgttgacagacaaggaaagtcttaaagtaggaccactggacagtgtaacgtatctggacaaaattaaaaaattcatagcatccatagaaaaagagaaagattctttaggcaacttgaaaatcaaatgggagaatttatcaaaccacgtgactgacatggataagaaattgttggaaagccagattaagcaacttgaacatggttgggaacaagtggaacagcagattcaaaagaagtattctcagcaggtagtggaatatgatgaatttacaaccctcatgaataaggtacaggacactgagatttctctgcaacagcagcagcaacatctacagttaaggctgaagtctccagaagaacgggcagggaaccaaagcatgattgccttgaccactgacctccaggctaccaagcatggattttctgttttaaaggggcaagctgaacttcagatgaagaggatttggggagaaaaagaaaagaagaatttggaggatggaataaataacttgaagaaacaatgggaaacattggagccattacacttagaagcagaaaatcagattaagaagtgtgacataaggaacaagatgaaagagactatcttatgggccaagaatttgttgggtgaacttaatccctccattccccttctcccagatgacattctttcacagatcagaaagtgcaaagtgacacatgatggcattctagctaggcagcagtctgtggaatcgttggctgaagaggtcaaagataaggttcctagccttacaacctatgagggcagtgatttaaataataccctagaggacttacggaatcaataccaaatgctggttttaaaatcaactcaaagatcacagcaattagaatttaagttggaagaaagaagcaatttttttgctataataaggaagtttcaacttatggttcaagaaagtgaaacactgataattcccagggtggagacagctgccacggaagctgaactaaaacatcaccatgttactttggaggcatctcagaaggaattgcaagaaattgacagtggaatctcaacacatcttcaggagctaacaaacatctatgaggagctgaatgtgtttgaaagattatttctggaagatcagttgaaaaatcttaagattaggaccaacagaatacaaagattcattcagaatacatgtaatgaagtggaacacaagataaagttttgcagacaattccatgaaaaaacatcagcgcttcaggaggaggctgacagtatacagcgcaatgaactattacttaatcaagaagtaaataaaggtgttaaagaggagatctataatcttaaagacagactcaccgctattaagtgttgcatcttacaggtattgaaacttaaaaaagtgtttgactatattggactaaactgggatttttcacaacttgaccaattacaaacccaagtatttgaaaaagaaaaggaacttgaagaaaaaattaagcagttggacacatttgaggaagaacatggcaaatatcaggcattattaagtaaaatgagagctattgatttgcaaattaagaaaatgactgaagtagtactaaaagctcctgatagctctccggaaagcagacggctcaatgcccaaattttaagtcagagaattgagaaagccaagtgtttatgtgatgagataataaagaaattaaatgaaaataagacctttgatgactcattcaaggagaaagaaatactacaaataaagctgaatgcagaagaaaatgataagttatacaaagttctccaaaacatggtattagaactctcaccaaaagaattggatgaaaagaattgtcaggacaaactagaaacttccttacatgttttaaatcagataaaatctcaattacagcagccattacttataaatttggaaattaaacatattcaaaatgaaaaggacaattgtgaagcatttcaggagcaagtttgggcagaaatgtgtagtattaaagctgtgactgctattgagaaacaaagagaagaaaactcttctgaagcgagtgatgtggagacaaaactacgtgagtttgaagatcttcagatgcagcttaacacaagcattgatttgcgcacaaatgtcttgaatgatgcttatgaaaatctaacacgctataaagaagcagtcaccagggcagtggagagcatcacttccctcgaagccatcattataccctacagagtagatgttggtaatccagaagaatctttagagatgcctcttcgaaaacaagaggaattggaatccacagtagcacacatccaggacctcactgagaaactgggaatgatatccagccccgaagccaaactacaacttcagtatactttacaggaactagtttctaagaactcagcaatgaaggaagctttcaaagcacaggaaactgaggcagaaaggtatcttgagaattacaaatgctatagaaaaatggaagaggatatttacactaacctcagcaaaatggagacagttcttggacagtccatgtcctcgttgccactgtcttacagagaagctttagagcgcttggaacagagcaaggccttggtgtcaaatcttatatcaaccaaagaagagttaatgaaactacgacagatccttagactcttgagactcaggtgcacagaaaatgatggcatatgtttgctcaagattgtgtcggctctgtgggagaaatggctgagtttgctggaagctgctaaagagtgggagatgtggtgcgaagaactgaagcaggaatggaaatttgtcagtgaagaaattgaacgagaggcaattattttagataatcttcaggaagaactccctgaaatttccaaaacaaaagaggcagccaccacagaggaactctctgagctgctagactgtttatgccaatatggagagaacgtggagaagcaacagctgttactgactctacttcttcagcgcatcagaagtatccagaatgttcctgaaagctcaggggctgtggaaactgttccagcatttcaagaaattacttctatgaaagaacgatgcaacaagcttcttcagaaagttcagaaaaataaagaattggtgcagactgaaatccaagaaagacattccttcacaaaagagataattgctttgaagaatttctttcaacagaccacaacttcattccaaaatatggcattccaggatcacccagaaaagtcagaacaatttgaggagcttcaaagcatccttaagaaagggaaactaacttttgagaatattatggaaaaactgcgaatcaagtattccgaaatgtacaccatagtccctgcagagattgaatcccaggtggaagaatgcagaaaagctttagaagacatagatgagaagattagcaatgaagtcttaaaaagctcaccatcatatgcaatgaggagaaaaatagaagaaattaacaatgggcttcataatgttgaaaagatgttgcagcagaaaagcaaaaatattgagaaagctcaagaaattcaaaagaaaatgtgggacgagttagatctatggcattccaaactaaatgagctggattctgaagttcaggacattgttgaacaggacccaggacaggctcaagaatggatggataacttgatgattcctttccagcagtatcagcaagtatcacagagagcagagtgtagaacctcacagttgaataaggccacagttaagatggaggaatatagtgaccttctgaagagcactgaggcttggatagaaaataccagtcatttgctggccaatcctgctgactatgactctttgaggacactgagtcaccatgctagcactgtgcagatggctttggaagattcagaacagaagcacaatcttttacattcaatctttatggatctagaagacctgtcaataatttttgaaacagatgaattaacccaatccatacaagagttaagtaatcaagtaacagctttacaacaaaaaataatggaaagccttccacagattcagcgaatggctgatgatgtggttgctattgaatctgaagtaaaatcaatggaaaaaagagtttcaaaaatcaaaactatcctattatcaaaagaaatatttgatttttcacctgaagaacatctcaaacatggggaggtcatacttgaaaatatacgtcccatgaagaaaaccattgctgagatagtgtcttaccaagtggaactgaggttgccccaaacaggaatgaaacctctgcctgtgtttcagcggacaaatcagcttttacaagatataaaactattggaaaatgtgactcaagaacaaaatgagttattaaaggtagtcataaaacagaccaatgaatgggatgaagaaatagaaaatttgaaacagatcttaaataattattcagctcagttctcccttgaacatatgtcaccagaccaagctgacaagctgccacaactacagggagaaatcgaacgtatggagaaacagattctgagtttgaaccagagaaaagaagacctgttggtggacttgaaggccaccgtactaaaccttcaccagcatttgaagcaagaacaagaaggagtagaaagagataggctgccagctgtaacatcagaggaaggtggagtggcagagagggatgcttctgagcggaagttgaacagaagaggctccatgtcttacctggcagcagtcgaggaagaggtggaagaaagttccgtgaagagcgataatggagatgagaaggcagagccatcgcctcagtcttggtcttcactttggaagcatgacaaggacatggaagaagacagagcttcctcatcctctggaacaattgttcaggaagcatatgggaaaataagcacctctgataattccatggcacaaatcctcacaccagactcactaaacactgagcaaggcccagaatgttccctaaggcccaaccaaacagaagagggcaccacacctcctattgaggctgacactctggactcttctgacgcgcaaggaggtttggagcccagggtggagaaaactaggccggagcccacagaagtcctgcatgcctgcaagacccaggtggccgagctggagctgtggctgcaacaagccaacgtggcagttgagccggaaacattaaacgcagacatgcagcaggtgctggaacagcagctggtagggtgccaggctatgctaacagagattgagcacaaggttgcctttctgttagagacttgcaaagatcagggcctgggagataatggagccactcaacatgaggctgaagcgctttccctgaaactgaaaacagtgaagtgcaatttagaaaaagtccagatgatgcttcaggagaagcacagtgaagatcagcatcctaccattctaaagaaatcctcagagccagagcatcaagaagctctccaaccagttaacctttctgaattggaatccattgtaactgaaaggccacaattcagcagacaaaaagatttccagcagcaacaggttctggagttaaaaccaatggaacagaaagatttcatcaaattcatagaatttaatgctaagaaaatgtggccccagtattgccaacatgataacgatacaactcaggaatcatctgcaagcaaccaggcatccagccctgaaaatgacgttccagactcgatcttgtcaccccagggccaaaatggagataagtggcaatatctgcatcatgaactctcatcaaaaataaagctcccactccctcagcttgtggagcctcaggtttccacaaatatgggtattctacccagcgtgactatgtataactttagatacccaacaactgaagaactgaaaacctataccacccaacttgaagacctgcgccaagaagcaagtaaccttcagacacaggaaaatatgacagaagaagcatatatcaatttggataaaaaattgtttgaactattcctgaccctcagtcagtgcctcagcagtgtggaggagatgctggagatgcccagactttacagggaggatggttctggccagcaggtgcactacgagacgctggctcttgagttgaagaaactttatttagcgctaagtgacaagaagggtgatcttttgaaagccatgacttggcctggcgagaacaccaacttgctccttgaatgttttgacaaccttcaagtctgcctggagcacactcaggctgcagctgtctgtagaagcaagtccctgaaagctggcctcgattacaaccgcagttaccagaatgaaataaagagattatatcatcagctcattaagagtaagacatctttacaacagtctttgaatgaaatcagtgggcagagtgttgctgaacagcttcagaaagcagatgcatatacagtggagctggagaacgccgagagccgagtggccaaactaagagatgaaggggagaggcttcatttaccttatgctttactccaggaggtttacaaattagaggatgtacttgacagtatgtggggaatgctaagagccaggtacacagaactcagcagccctttcgtcactgagagccagcaagatgctttgttgcaaggcatggtggaactggtgaagattgggaaggaaaagcttgctcatggccacttaaaacaaaccaaaagtaaagtggcgttacaggctcaaatagaaaatcacaaggtttttttccagaagcttgttgctgacatgttgttgatccaagcatactctgccaaaatacttccttctttattgcaaaacagagagacattttgggcagaacaagtaacagaagttaaaatactagaagaaaagtcacgccaatgtggtatgaagctgcagagtttgttgcagaaatgggaagaatttgatgaaaactatgcatctcttgaaaaggacctggaaattcttatatctacattgccctctgtgagtttggtggaagaaacagaggaaagattagtggaaaggatttcattttaccagcaaataaaaagaaacattggtggaaaacacgcccggctttaccaaactctgaacgaaggcaaacagttggtggcgtctgtgagctgtcctgaattagagggccagatcgcaaaactggaagagcagtggttgtccctgaacaagaaaattgaccatgagctccacaggctgcaagctcttctcaagcatctgctcagttataacagagattcggatcagttaaccaagtggttggaatcttcccagcatactctgaattactggaaagaacagtccctcaatgtgtctcaggacttggatacaatcagaagcaacatcaacaatttttttgagttttcaaaagaagttgatgaaaaatcctccttgaagactgccgttatcagtatcgggaaccagcttcttcacctgaaagaaactgatacagctacactgagagcttctttagcacagtttgaacaaaaatggacaatgctcataactcaacttccagatattcaagaaaaacttcaccagcttcaaatggagaaattgccgtctcgtaaagcaatcacagaaatgattagctggatgaacaatgtggagcatcaaacttcagatgaagactccgtgcattcaccaagttctgcatctcaagttaaacatcttcttcagaagcacaaggagtttagaatggaaatggactataaacagtggatagttgacttcgttaaccagtcattacttcagctaagcacctgtgatgtagaaagcaagcgctatgaaagaacggagtttgcagagcacctgggggagatgaaccgccagtggcaccgtgtacatggaatgctgaatagaaagatacaacatttagaacaacttctagaaagtatcactgagagtgaaaataaaatacagatcttgaacaactggctggaagcacaagaagagagactgaaaactttacaaaaacctgaaagtgtgatctcagtgcagaagctgctcctggactgtcaggatatagaaaatcaacttgcaattaaatccaaagcactagatgagttgaaacaaagttatctgactttggagagtggggcagtgccattgttagaagatacagcatcccgaattgatgagttatttcaaaagagaagcagtgttctcactcaggtcaatcagctcaaaacctccatgcagtcagttttacaggagtggaagatttatgatcaactctatgatgaagtgaatatgatgacaatccgattctggtactgcatggaacacagcaagcctgtggtgttatcattggagaccttgagatgccaggtggagaaccttcagtctctgcaagatgaagctgagagcagtgaagggagttgggagaaactccaggaggttatcggcaaactcaaaggtctctgcccctctgttgctgaaataatcgaagagaaatgccaaaatactcataaaaggtggactcaggtgaaccaagccattgcagaccagttgcagaaggcccagagtctgctccagctctggaaggcctatagcaatgctcatggtgaagctgccgcaaggctgaagcagcaggaagcaaagtttcaacagctcgcaaacatcagcatgtctggaaacaacctggcagagatcctgcccccagccctgcaggacataaaggagctgcagcatgatgtgcagaaaacaaaagaagcctttctccaaaattccagtgtcctggatcgactcccacaacccgcagagtccagcacccacatgctcctcccgggccccctgcactctctccagagggctgcttatttggaaaagatgctgcttgtgaaagcaaatgaatttgagtttgttctctcacagtttaaggattttggagtccggctggaatctttaaaaggtcttattatgcatgaagaagagaatttggatagacttcaccaacaggaaaaagaaaatcctgactcattcctgaatcatgtgctggcactgacagcccaatcacctgatattgaacatttgaatgaagtgagcctcaagctcccacttagtgacgtagctgtgaagacgttacaaaatatgaaccggcaatggattcgggccacggccacggcactggagcgctgcagtgagcttcagggaattggattgaatgaaaagtttctttattgctgtgaaaagtggatccaacttttggagaagatagaagaagcactcaaagtggatgtggctaacagccttcctgagctcctggagcagcagaaaacctataagatgttagaagctgaagtttctataaaccagacaattgctgattcctatgtcacccagtccttacaactcctggacacaacagaaatagagaacagaccagaatttattacagaattctcaaagctgacggatcggtggcagaatgctgtccagggtgttcggcagaggaagggtgacgttgatgggctggtgaggcagtggcaagatttcactacttctgtggagaacttgtttcgcttcctcactgacaccagccacctgctatctgcagtgaagggccaggagcgcttcagcctctaccaaaccagaagtctgatccatgagctgaagaataaagaaattcattttcaaaggaggcgaactacctgtgccctaaccttggaagctggagaaaagttactgctcacaactgacctgaaaactaaagagtctgtgggtaggagaatcagtcaacttcaggacagctggaaagacatggagccccagctggcagagatgattaagcagttccagagcactgtagagacctgggaccagtgtgaaaagaaaatcaaggagttgaaaagcaggctgcaagttttaaaggcacaaagtgaagatcctcttccagagcttcacgaggacctccataacgaaaaagagctgattaaggaactagaacagtctttggctagctggactcagaacttgaaagaacttcaaactatgaaggcggacttaacccggcacgttctcgtggaagatgtgatggttttgaaggagcaaatagagcatttgcacagacaatgggaggacctctgcttaagggtggccatacgtaaacaggagattgaagacagactcaatacatgggttgtattcaatgaaaaaaataaagagttgtgtgcctggctggtgcagatggaaaacaaagttctacagacagcggacattagtattgaagaaatgattgaaaagttacagaaggactgcatggaagaaataaacttgtttagtgaaaacaagttacagttaaagcagatgggtgaccagttgatcaaggccagcaacaaatcaagagcagctgagatcgatgacaagctcaacaaaattaacgatcgttggcaacatctttttgatgtcatcggatcaagggtgaagaagctgaaggagacctttgcttttattcagcagttggacaaaaacatgagcaaccttcgcacctggttggctcgaattgagtctgagctttccaagcctgttgtttatgatgtctgcgatgatcaagagatccagaagaggctcgctgagcagcaggatctacagcgagatattgaacaacacagcgcaggggtggagtccgtgtttaacatctgtgacgtcctactgcacgactccgatgcctgtgcaaatgagaccgagtgtgactcgatccagcagaccaccaggagcctggacagacgctggaggaacatttgtgccatgtccatggagcggcgcatgaaaatcgaggagacgtggcgcctgtggcagaagtttttagacgactattctcgctttgaggactggctcaagtcagctgagaggacggcagcctgcccaaattcctcagaggtgttgtacacgagtgccaaagaggaactgaagaggtttgaggcctttcagcggcagattcatgagcggctcactcagctggagctcatcaacaagcagtaccggcggctggcccgggagaaccgcacagacacggccagcaggctgaagcagatggtccacgagggcaaccagcgctgggacaaccttcagaggcgggtcacagccgtcctgcggagactcaggcatttcaccaaccagagggaagaatttgagggcaccagggagagcattctggtgtggctcacagagatggacctgcagctgaccaacgtggagcacttctcagagagtgacgccgatgacaagatgcgccaactgaatggcttccaacaggaaattacattaaataccaacaagattgatcagctcattgtgtttggggagcagctgattcagaagagcgagcccctggatgctgtgctgattgaggatgagctggaggaactccaccgctactgccaggaggtgtttggaagggtctcccggttccaccggcggctcacctcctgcactccgggcttggaagatgaaaaggaggcctctgagaatgaaacagacatggaagaccccagagaaatccagactgattcttggcgtaaacggggagagagcgaggaaccgtcatctcctcagtccctgtgtcatctagtggccccagggcacgagcggtctggctgcgagacccctgtcagcgtggactccatccccctggagtgggaccacacaggcgacgtggggggctcctcctctcacgaagaggacgaggagggcccatactacagcgcactgtcaggtaaatccatttcggatggccactcgtggcatgttcccgacagcccttcctgtcccgagcatcactacaagcaaatggaaggtgacaggaatgttccacctgttccccctgcgtccagcaccccttataaaccaccctatggaaagctactattacctccaggcacggatggtggcaaagaaggcccgcgagtcctgaatggcaacccacagcaggaagacgggggactggccggtatcacagagcagcagtcaggtgccttcgacagatgggagatgattcaagcacaggagcttcacaataagctcaaaataaaacaaaatttgcaacagctgaactctgatatcagcgccatcactacttggctgaaaaaaactgaagcagagctggaaatgttaaagatggcaaagcctccctctgatatccaggaaatagaactgagagtgaagagactgcaggagatactgaaagcctttgacacttacaaggcattagtggtctctgtcaacgtgagcagcaaggaatttctgcaaaccgagagccccgaatccacagagctccaaagtagactccgccagctgagcctgctctgggaagcagcacagggcgcagtggacagctggagagggggcttacgacagtcgctcatgcagtgccaggacttccaccagttgagtcaaaatctgctgctgtggttagcgagtgccaagaaccggaggcagaaggctcatgtcaccgatccaaaggcagacccccgggctctcctagagtgtcggagggaactaatgcaactggaaaaggagctggtagaacgtcaacctcaagtggacatgttacaggagatttcaaacagccttctcattaagggacatggagaagactgtattgaagctgaagaaaaggtgcatgttattgagaagaaactcaaacagttacgggagcaagtgtcccaagatttaatggccttgcagggaacccagaacccagcctcacccctgcccagcttcgacgaggtagactcgggggaccagcctcctgcaacatccgtgccagctccccgagcaaagcagttcagagcagtgagaactacagaaggcgaggaggagacagagagcagggtccccggcagcacacggccacagcgctccttcctctcaagggtggtccgggcagccctacccctgcagctgctcctcctgctgctgctgctcctggcctgcctgctgccctcctccgaagaagactacagctgcactcaggccaacaactttgcccggtccttttaccccatgctgaggtacaccaatgggccaccccccacatagagggcatagctggccacagtgctacaccacctgcctgattgccaagggtgcccagcacgtggccccagaccaatctgagtgacttagtgttggcaaggtcccgggacctgtgcagacttcttctgggcttacccagcacgggctccctggagcccagggcagctttcagattgtgttcctccccaggagcagggaacctgtgtggcaggtgccccgggtattttggcagaactagttgattagtttagggatctctggaaatgtcagtttcctgaagagccaagcactttgtgaattctggtttgtttgtaaaacagcattattataatgtaggtatggtcaatgagcagtggtgtccatcacatatattatagaagcaagcgaggacattccaccctagaaatggttcagaaactcataggcacccttagctgatggaaacaatcaatcatatttaatacgcttagaatcagttttactccaatcagctggcaattttgagctgccggttatacaccaaaatgttctgttcagtacctagctctgctcttttatattgctttaaatttttaaagaaattgtattgcatggatgtggttatttgtgcatattttttaacaatgcccaatctgtatgaataatgtaaacttcgatttttttttaaaaaaattagattttagctggagcttttgactaatgtaaagtaaatgccaaactaccgacttgatagggatgtttttgtaagttaattttctaagactttttcacatccaaagtgatgctttgctttgggttttaactgtttggccacggcgggggtgggggcggggggttggtacagaaacttgaagctgtttgtgatatgtacaactcagatgtttctcattaaaaaacaaaattagccaga

SEQ ID NO: 185325 - DNA, 1132 bp, Homo sapiens
  Payload ID: 16495
  Gene Symbol: SYNE2
  Gene Name: spectrin repeat containing, nuclear envelope 2
  Uniprot ID: Q8WXH0
  ENST ID: ENST00000341472
  CDS Start-End: 204-1061
cggagcgcgctcagctgcgcccagagccttcggccggacctgaaaaagcgagagggagagcgagcaaaaggcgcgatccagagagccaggcaagcggggcgccgacctcgggcggccccggcccgcgcccttgcccctcggccgggcggacgttcacttcttcaactgagatggacatgatataatctccattgagtcaaagaatggcatctagtcctgagcttcccaccgaagatgaacagggttcctggggcatcgacgatctccatatttcattgcaagctgaacaggaagacacccagaagaaagccttcacgtgctggataaactcacagttggccaggcacacttctccctcagttatatccgacctattcacagacattaaaaaggggcatgtcctcctggatctgctagaagtactttctgggcaacagttgcctcgggataaaggatctaataccttccagtgtagaatcaatatagaacatgccttgacattcctaagaaaccgatcaattaagctaataaatattcatgttactgatatcattgatggaaacccatccattatccttggcctaatttggacaattatcctgcactttcatattgagaagcttgcccagactctttcttgcaattacaatcagccttccctggatgatgtgagtgtggttgactcatctcctgcctcaagtcctccagctaagaaatgctctaaagtgcaagcaagatggcaaatgtctgcaagaaaggcccttcttttgtgggctcaggaacaatgcgccacctatgagtctgtcaatgtgaccgattttaagtcaagttggagaaatgggatggcttttttggccatcattcatgccttgcgaccagacctaattgacatgaagagtgtgaagcatagatccaacaaagacaatctgagagaggccttcagaattgcagaacaagaattaaaaatccccagattgctggaaccagaagatgcctggagaagttctgcactttacagaatttatatgcctggcacagtgtcttgtgccagctacttgtgaggctgagattggaggactgtttgaggccaggagtttgagaccagactggacaacatagagagaccctgtct

SEQ ID NO: 185326 - DNA, 21555 bp, Homo sapiens
  Payload ID: 16495
  Gene Symbol: SYNE2
  Gene Name: spectrin repeat containing, nuclear envelope 2
  ENST ID: ENST00000357395
  CDS Start-End: 213-20687
gccaaggagcggagcgcgctcagctgcgcccagagccttcggccggacctgaaaaagcgagagggagagcgagcaaaaggcgcgatccagagagccaggcaagcggggcgccgacctcgggcggccccggcccgcgcccttgcccctcggccgggcggacgttcacttcttcaactgagatggacatgatataatctccattgagtcaaagaatggcatctagtcctgagcttcccaccgaagatgaacagggttcctggggcatcgacgatctccatatttcattgcaagctgaacaggaagacacccagaagaaagccttcacgtgctggataaactcacagttggccaggcacacttctccctcagttatatccgacctattcacagacattaaaaaggggcatgtcctcctggatctgctagaagtactttctgggcaacagttgcctcgggataaaggatctaataccttccagtgtagaatcaatatagaacatgccttgacattcctaagaaaccgatcaattaagctaataaatattcatgttactgatatcattgatggaaacccatccattatccttggcctaatttggacaattatcctgcactttcatattgagaagcttgcccagactctttcttgcaattacaatcagccttccctggatgatgtgagtgtggttgactcatctcctgcctcaagtcctccagctaagaaatgctctaaagtgcaagcaagatggcaaatgtctgcaagaaaggcccttcttttgtgggctcaggaacaatgcgccacctatgagtctgtcaatgtgaccgattttaagtcaagttggagaaatgggatggcttttttggccatcattcatgccttgcgaccagacctaattgacatgaagagtgtgaagcatagatccaacaaagacaatctgagagaggccttcagaattgcagaacaagaattaaaaatccccagattgctggaaccagaagatgtggatgttgttgatcctgatgaaaagtccatcatgacctatgtggcacagtttctgcagtattccaaagatgcccctgggactggagaggaggctcagggaaaggtgaaagatgctatgggctggttaactctgcaaaaggaaaaactacagaagttgctaaaggattcagagaatgatacctactttaaaaagtataatagcctgctgtcctttatggagtcattcaatgaagaaaaaaagtcctttttggatgtcctgtcaataaaacgggatctggatgagctggacaaggatcatttacagttgagagaagcctgggatggcctcgatcaccagattaatgcatggaaaataaagctaaattatgccttgcccccacccctccatcaaactgaagcttggctccaggaggtagaagagcttatggatgaagatttgtcagcctcccaggatcactctcaagccgtgactctgatacaagagaaaatgactttattcaagagcctgatggatagatttgagcatcattcgaacattctccttacctttgaaaataaggatgaaaatcacttgccattggtaccacctaacaaattggaggaaatgaaaagacgaatcaacaacattttggagaaaaaatttattctacttctagaatttcattactacaagtgcttagttcttggtttggtagatgaagtgaaatcaaaattggatatttggaacattaaatatgggagcagagaatctgtggaattattgctggaagactggcataaatttattgaagaaaaagaattcctagctcgacttgatacttcttttcaaaaatgtggagaaatttataagaatttggctggagaatgtcagaatattaataaacagtatatgatggtgaaatctgatgtttgtatgtatagaaaaaatatatataatgtgaagtccactctacaaaaagtgctggcatgttgggctacttatgtggaaaaccttcgcttactaagggcttgctttgaggagacaaagaaggaagaaattaaagaggtaccctttgagacactagcccagtggaatctagaacacgctactttaaatgaagcaggaaatttcttagtcgaagtcagcaatgatgtggttggatcatctatttctaaagaactgagaaggctgaataaaagatggagaaagttggtttcaaaaactcaacttgaaatgaacctgccactgatgataaaaaaacaggatcagcccacttttgacaattctggaaatattctatctaaagaagagaaagcaactgttgagttttcaacagatatgtcagtagaacttcctgaaaattataatcaaaatataaaggctggagagaaacatgaaaaagaaaatgaagaattcacagggcaactaaaagtggctaaagatgttgaaaaactcattggacaagtggaaatctgggaggcagaagccaaatctgttttggatcaagatgatgtggacacctcaatggaagaatctttgaagcatcttattgccaaaggctctatgtttgatgagcttatggcaagaagtgaagatatgttacaaatggatatacaaaatatttcaagccaggagtcctttcaacatgttctcacaactgggcttcaggcaaagattcaagaagctaaagagaaagtccagatcaatgtggtaaaactcattgcagcgttgaagaacttaactgacgtttcaccagatttggacatcaggctgaagatggaagaatcccagaaggaacttgaatcatatatgatgagggctcagcagttactggggcaaagagagagccccggtgaactcatttcaaaacacaaggaagcactaataatttctaatacaaaaagtctggccaagtatttgaaagctgttgaagaactaaaaaataatgtaactgaggacataaagatgtctttagaagaaaagagtagagatgtctgtgccaaatgggagtctcttcatcatgaactgtctttatatgttcaacaactaaaaatagatattgaaaaaggaaagcttagtgacaatattttaaaacttgaaaagcaaataaataaagaaaagaaacttatccgtagaggaaggaccaagggtctcatcaaagaacatgaggcctgcttttctgaggaaggctgcctgtaccagcttaatcaccacatggaagtcctgagggagctgtgtgaagagctgccttcacagaagagtcaacaagaagtgaagagactactcaaagattatgaacaaaagatagaaagacttctgaaatgtgcttccgagattcatatgacactgcagcccacagcgggaggcacgtcgaaaaacgaggggaccatcaccacatctgagaatagaggaggggatccccacagtgaggcaccatttgcaaaatcagataatcagccatcaactgaaaaggcaatggaacccactatgaagtttagcctggcatcagtgttaaggcctctgcaagaagaaagcattatggaaaaggattacagtgcatctataaatagtttactagagaggtatgatacatacagagatattcttgaacaccacctgcaaaacaacaaattcaggattacttctgatttctctagtgaagaggacaggagtagttcttgtctgcaggctaaactgacagatctacaggtcataaaaaatgaaactgatgctcgctggaaagagtttgaaattatttcattgaagttagaaaatcatgtgaatgacataaaaaagccttttgtaattaaggaaagagacacactaaaggaaagagaaagagagcttcagatgactcttaataccagaatggaatctttagagacagcactgcggcttgtgttacctgtagagaaggcatcacttcttctctgtggctcggacctgcctctccataaaatggccatccagggatttcatctcattgatgctgatcgcatctatcaacacctaaggaatatccaagattccatagcaaaacagattgaaatatgtaaccgcttagaagagccaggcaactttgtattaaaggagttacacccatttgatctacacgcaatgcagaatattatactgaaatacaaaacacaatttgaaggaatgaaccacagggtgcagaggagtgaagatactctcaaagctctggaagactttttggcgtctctcagaacagctaaactctctgctgagcccgttacagacctttcagcctcagatacacaggtggcacaagaaaatacgttgacagtaaaaaataaagagggagaaattcatctgatgaaagacaaggccaaacatttggataaatgtttgaagatgctcgatatgagctttaaagatgctgaacggggtgatgacacctcctgtgaaaacctgcttgatgctttttcaataaagttatctgagacacatggctatggggtacaggaggaattcactgaggaaaacaaattactagaggcttgtattttcaaaaataatgaactccttaaaaatattcaagatgtgcagagtcaaatcagtaaaattggtcttaaggatcctactgttccagctgtgaaacatcggaaaaaatcattaatcagactggataaggttctagatgaatatgaagaagagaagagacatttacaagaaatggctaattctcttccacacttcaaagatggcagagaaaaaaccgtgaatcaacagtgccaaaatacagtagtcttgtgggagaataccaaagccttggtcaccgaatgtcttgaacaatgtgggagagttttggagctcttaaaacaatatcagaattttaaaagcatcttgacaactttgattcaaaaagaagagagtgtcatctccctgcaggcttcgtacatgggaaaggagaacctgaagaaaaggatagcagagattgaaattgtcaaagaagaatttaatgagcatttagaagttgtagacaagataaaccaggtctgcaaaaatctacaattttatctaaataaaatgaaaacttttgaagagcccccttttgaaaaagaggctaatattattgtggatagatggcttgatataaatgagaagacagaagattactatgaaaatcttggtcgagctctagctttgtgggacaaactttttaacttaaaaaatgtcattgatgagtggacagaaaaggcccttcaaaaaatggaattacatcaattgactgaagaggacagagaaaggctgaaggaagaattacaagtccatgaacaaaaaacttcagaattttctagaagagtggctgaaatacagtttttgctccaaagcagtgaaatacctcttgaattgcaggtcatggagtcctctattttgaacaagatggaacatgtacagaagtgcttaacaggagaatccaactgccatgcactcagtggcagcactgctgagctaagggaggatctcgaccaagccaagacccagatcgggatgactgaatccctcttaaaagccctgtctccttctgacagcttggagatcttcactaaactagaggagatacaacagcagattctacagcaaaaacacagtatgatattacttgagaatcaaataggttgtctgactcctgaactctctgaattgaaaaagcaatatgaaagtgtcagtgatttatttaataccaaaaaaagtgttttgcaagatcacttttctaagttattgaatgatcaatgcaagaactttaatgactggttcagcaacattaaagtgaaccttaaggagtgttttgaatcatcagaaacaaaaaagagtgtggaacaaaagctacaaaaactttctgatttcttgactcttgaaggaagaaacagtaaaataaagcaggtggacagcgtactgaagcatgtgaagaagcatctgcccaaagcacatgtgaaggagcttatcagttggctcgtgggtcaggaattcgaattagaaaaaatggagtccatatgccaggctcgagcaaaggagcttgaagactccttgcagcagctactgagactccaggatgaccatagaaacctgaggaagtggttgactaatcaagaagagaaatggaaaggaatggaagaaccaggggagaaaactgagctgttctgccaagctttagctagaaagagggaacagtttgaatctgtggcccaattgaacaactctttgaaggaatatgggtttactgaagaagaagaaataataatggaagcaacatgtttgatggatagataccagacattactgagacaactaagtgaaatcgaggaagaggataagttactacccacagaggaccagagctttaatgatcttgcacatgatgtaattcattggataaaagagattaaagagtcccttatggttttgaattcatccgaaggcaaaatgccacttgaggaaagaatccaaaaaatcaaggaaatcattttgctgaagcctgaaggggatgccagaatagagaccatcatgaagcaggctgagagcagcgaggccccgctggttcagaagaccctcactgacatcagcaaccagtgggacaacacactccatttagctagcacctacctaagccatcaagaaaagcttctactagaaggagagaaatatttacaaagtaaggaggatctgagattaatgctcatagaactaaagaagaaacaggaagcaggctttgctctacaacatggtctgcaggagaagaaagctcagttaaagatttataagaaattcctcaagaaagcccaagatttgacatccttgctaaaggagttaaaatctcagggaaactacctcttggagtgcactaaaaatcccagcttcagtgaagagccttggctggaaataaagcatctacacgaaagtcttcttcaacaactgcaggattctgtgcaaaacttggacggtcacgttcgagaacatgattcataccaggtttgcgtcacagacctgaatactacattggacaatttctccaaggaatttgtcagtttttctgataagcctgtggatcaaatagcggttgaggaaaaattgcagaaactgcaggaactagagaatagactcagtttacaagatggcacattaaagaagattttagctttagcaaaatccgtcaagcaaaatacatcttcagtggggcagaagattattaaagatgatataaaatcacttcagtgtaaacaaaaagatttggaaaacaggcttgcatctgctaagcaggagatggaatgttgtctcaacagcattctcaaatcaaaacgctcaacagaaaagaaaggaaagtttactctgccaggcagagagaagcaggccacttctgatgtgcaggagtctactcaggaatcagctgcagtggaaaagttggaggaagactgggaaataaacaagaattttgttgaaaatgtgatggcagtttccaaaaattgccatcatagcatgtatatatttgaatccattgtcaagaatttcatttcagatgaaatgcaggattcagctgtggaaatggctatgtcaaaacaactttctcttaatgctcaagaaagcatgaaaaacactgaagatgagcggaaagtcaatgagctgcaaaatcaacctttagaattagatactatgttaagaaatgaacaattagaagagatagagaaattatatacccagttggaagcaaagaaagcagccattaagccactggaacaaacagaatgtcttaacaaaacagaaactggggccttggttctccacaatataggatattcggcacagcatttggacaatttgcttcaggcacttattactttgaagaaaaacaaagaaagccaatattgtgtcctcagagattttcaggaataccttgctgcagttgaatcttcaatgaaagccttgttgacagacaaggaaagtcttaaagtaggaccactggacagtgtaacgtatctggacaaaattaaaaaattcatagcatccatagaaaaagagaaagattctttaggcaacttgaaaatcaaatgggagaatttatcaaaccacgtgactgacatggataagaaattgttggaaagccagattaagcaacttgaacatggttgggaacaagtggaacagcagattcaaaagaagtattctcagcaggtagtggaatatgatgaatttacaaccctcatgaataaggtacaggacactgagatttctctgcaacagcagcagcaacatctacagttaaggctgaagtctccagaagaacgggcagggaaccaaagcatgattgccttgaccactgacctccaggctaccaagcatggattttctgttttaaaggggcaagctgaacttcagatgaagaggatttggggagaaaaagaaaagaagaatttggaggatggaataaataacttgaagaaacaatgggaaacattggagccattacacttagaagcagaaaatcagattaagaagtgtgacataaggaacaagatgaaagagactatcttatgggccaagaatttgttgggtgaacttaatccctccattccccttctcccagatgacattctttcacagatcagaaagtgcaaagtgacacatgatggcattctagctaggcagcagtctgtggaatcgttggctgaagaggtcaaagataaggttcctagccttacaacctatgagggcagtgatttaaataataccctagaggacttacggaatcaataccaaatgctggttttaaaatcaactcaaagatcacagcaattagaatttaagttggaagaaagaagcaatttttttgctataataaggaagtttcaacttatggttcaagaaagtgaaacactgataattcccagggtggagacagctgccacggaagctgaactaaaacatcaccatgttactttggaggcatctcagaaggaattgcaagaaattgacagtggaatctcaacacatcttcaggagctaacaaacatctatgaggagctgaatgtgtttgaaagattatttctggaagatcagttgaaaaatcttaagattaggaccaacagaatacaaagattcattcagaatacatgtaatgaagtggaacacaagataaagttttgcagacaattccatgaaaaaacatcagcgcttcaggaggaggctgacagtatacagcgcaatgaactattacttaatcaagaagtaaataaaggtgttaaagaggagatctataatcttaaagacagactcaccgctattaagtgttgcatcttacaggtattgaaacttaaaaaagtgtttgactatattggactaaactgggatttttcacaacttgaccaattacaaacccaagtatttgaaaaagaaaaggaacttgaagaaaaaattaagcagttggacacatttgaggaagaacatggcaaatatcaggcattattaagtaaaatgagagctattgatttgcaaattaagaaaatgactgaagtagtactaaaagctcctgatagctctccggaaagcagacggctcaatgcccaaattttaagtcagagaattgagaaagccaagtgtttatgtgatgagataataaagaaattaaatgaaaataagacctttgatgactcattcaaggagaaagaaatactacaaataaagctgaatgcagaagaaaatgataagttatacaaagttctccaaaacatggtattagaactctcaccaaaagaattggatgaaaagaattgtcaggacaaactagaaacttccttacatgttttaaatcagataaaatctcaattacagcagccattacttataaatttggaaattaaacatattcaaaatgaaaaggacaattgtgaagcatttcaggagcaagtttgggcagaaatgtgtagtattaaagctgtgactgctattgagaaacaaagagaagaaaactcttctgaagcgagtgatgtggagacaaaactacgtgagtttgaagatcttcagatgcagcttaacacaagcattgatttgcgcacaaatgtcttgaatgatgcttatgaaaatctaacacgctataaagaagcagtcaccagggcagtggagagcatcacttccctcgaagccatcattataccctacagagtagatgttggtaatccagaagaatctttagagatgcctcttcgaaaacaagaggaattggaatccacagtagcacacatccaggacctcactgagaaactgggaatgatatccagccccgaagccaaactacaacttcagtatactttacaggaactagtttctaagaactcagcaatgaaggaagctttcaaagcacaggaaactgaggcagaaaggtatcttgagaattacaaatgctatagaaaaatggaagaggatatttacactaacctcagcaaaatggagacagttcttggacagtccatgtcctcgttgccactgtcttacagagaagctttagagcgcttggaacagagcaaggccttggtgtcaaatcttatatcaaccaaagaagagttaatgaaactacgacagatccttagactcttgagactcaggtgcacagaaaatgatggcatatgtttgctcaagattgtgtcggctctgtgggagaaatggctgagtttgctggaagctgctaaagagtgggagatgtggtgcgaagaactgaagcaggaatggaaatttgtcagtgaagaaattgaacgagaggcaattattttagataatcttcaggaagaactccctgaaatttccaaaacaaaagaggcagccaccacagaggaactctctgagctgctagactgtttatgccaatatggagagaacgtggagaagcaacagctgttactgactctacttcttcagcgcatcagaagtatccagaatgttcctgaaagctcaggggctgtggaaactgttccagcatttcaagaaattacttctatgaaagaacgatgcaacaagcttcttcagaaagttcagaaaaataaagaattggtgcagactgaaatccaagaaagacattccttcacaaaagagataattgctttgaagaatttctttcaacagaccacaacttcattccaaaatatggcattccaggatcacccagaaaagtcagaacaatttgaggagcttcaaagcatccttaagaaagggaaactaacttttgagaatattatggaaaaactgcgaatcaagtattccgaaatgtacaccatagtccctgcagagattgaatcccaggtggaagaatgcagaaaagctttagaagacatagatgagaagattagcaatgaagtcttaaaaagctcaccatcatatgcaatgaggagaaaaatagaagaaattaacaatgggcttcataatgttgaaaagatgttgcagcagaaaagcaaaaatattgagaaagctcaagaaattcaaaagaaaatgtgggacgagttagatctatggcattccaaactaaatgagctggattctgaagttcaggacattgttgaacaggacccaggacaggctcaagaatggatggataacttgatgattcctttccagcagtatcagcaagtatcacagagagcagagtgtagaacctcacagttgaataaggccacagttaagatggaggaatatagtgaccttctgaagagcactgaggcttggatagaaaataccagtcatttgctggccaatcctgctgactatgactctttgaggacactgagtcaccatgctagcactgtgcagatggctttggaagattcagaacagaagcacaatcttttacattcaatctttatggatctagaagacctgtcaataatttttgaaacagatgaattaacccaatccatacaagagttaagtaatcaagtaacagctttacaacaaaaaataatggaaagccttccacagattcagcgaatggctgatgatgtggttgctattgaatctgaagtaaaatcaatggaaaaaagagtttcaaaaatcaaaactatcctattatcaaaagaaatatttgatttttcacctgaagaacatctcaaacatggggaggtcatacttgaaaatatacgtcccatgaagaaaaccattgctgagatagtgtcttaccaagtggaactgaggttgccccaaacaggaatgaaacctctgcctgtgtttcagcggacaaatcagcttttacaagatataaaactattggaaaatgtgactcaagaacaaaatgagttattaaaggtagtcataaaacagaccaatgaatgggatgaagaaatagaaaatttgaaacagatcttaaataattattcagctcagttctcccttgaacatatgtcaccagaccaagctgacaagctgccacaactacagggagaaatcgaacgtatggagaaacagattctgagtttgaaccagagaaaagaagacctgttggtggacttgaaggccaccgtactaaaccttcaccagcatttgaagcaagaacaagaaggagtagaaagagataggctgccagctgtaacatcagaggaaggtggagtggcagagagggatgcttctgagcggaagttgaacagaagaggctccatgtcttacctggcagcagtcgaggaagaggtggaagaaagttccgtgaagagcgatcatgacaaggacatggaagaagacagagcttcctcatcctctggaacaattgttcaggaagcatatgggaaaataagcacctctgataattccatggcacaaatcctcacaccagactcactaaacactgagcaaggcccagaatgttccctaaggcccaaccaaacagaagagggcaccacacctcctattgaggctgacactctggactcttctgacgcgcaaggaggtttggagcccagggtggagaaaactaggccggagcccacagaagtcctgcatgcctgcaagacccaggtggccgagctggagctgtggctgcaacaagccaacgtggcagttgagccggaaacattaaacgcagacatgcagcaggtgctggaacagcagctggtagggtgccaggctatgctaacagagattgagcacaaggttgcctttctgttagagacttgcaaagatcagggcctgggagataatggagccactcaacatgaggctgaagcgctttccctgaaactgaaaacagtgaagtgcaatttagaaaaagtccagatgatgcttcaggagaagcacagtgaagatcagcatcctaccattctaaagaaatcctcagagccagagcatcaagaagctctccaaccagttaacctttctgaattggaatccattgtaactgaaaggccacaattcagcagacaaaaagatttccagcagcaacaggttctggagttaaaaccaatggaacagaaagatttcatcaaattcatagaatttaatgctaagaaaatgtggccccagtattgccaacatgataacgatacaactcaggaatcatctgcaagatacccaacaactgaagaactgaaaacctataccacccaacttgaagacctgcgccaagaagcaagtaaccttcagacacaggaaaatatgacagaagaagcatatatcaatttggataaaaaattgtttgaactattcctgaccctcagtcagtgcctcagcagtgtggaggagatgctggagatgcccagactttacagggaggatggttctggccagcaggtgcactacgagacgctggctcttgagttgaagaaactttatttagcgctaagtgacaagaagggtgatcttttgaaagccatgacttggcctggcgagaacaccaacttgctccttgaatgttttgacaaccttcaagtctgcctggagcacactcaggctgcagctgtctgtagaagcaagtccctgaaagctggcctcgattacaaccgcagttaccagaaagcagatgcatatacagtggagctggagaacgccgagagccgagtggccaaactaagagatgaaggggagaggcttcatttaccttatgctttactccaggaggtttacaaattagaggatgtacttgacagtatgtggggaatgctaagagccaggtacacagaactcagcagccctttcgtcactgagagccagcaagatgctttgttgcaaggcatggtggaactggtgaagattgggaaggaaaagcttgctcatggccacttaaaacaaaccaaaagtaaagtggcgttacaggctcaaatagaaaatcacaaggtttttttccagaagcttgttgctgacatgttgttgatccaagcatactctgccaaaatacttccttctttattgcaaaacagagagacattttgggcagaacaagtaacagaagttaaaatactagaagaaaagtcacgccaatgtggtatgaagctgcagagtttgttgcagaaatgggaagaatttgatgaaaactatgcatctcttgaaaaggacctggaaattcttatatctacattgccctctgtgagtttggtggaagaaacagaggaaagattagtggaaaggatttcattttaccagcaaataaaaagaaacattggtggaaaacacgcccggctttaccaaactctgaacgaaggcaaacagttggtggcgtctgtgagctgtcctgaattagagggccagatcgcaaaactggaagagcagtggttgtccctgaacaagaaaattgaccatgagctccacaggctgcaagctcttctcaagcatctgctcaggtcagcctttttgggggtttataacagagattcggatcagttaaccaagtggttggaatcttcccagcatactctgaattactggaaagaacagtccctcaatgtgtctcaggacttggatacaatcagaagcaacatcaacaatttttttgagttttcaaaagaagttgatgaaaaatcctccttgaagactgccgttatcagtatcgggaaccagcttcttcacctgaaagaaactgatacagctacactgagagcttctttagcacagtttgaacaaaaatggacaatgctcataactcaacttccagatattcaagaaaaacttcaccagcttcaaatggagaaattgccgtctcgtaaagcaatcacagaaatgattagctggatgaacaatgtggagcatcaaacttcagatgaagactccgtgcattcaccaagttctgcatctcaagttaaacatcttcttcagaagcacaaggagtttagaatggaaatggactataaacagtggatagttgacttcgttaaccagtcattacttcagctaagcacctgtgatgtagaaagcaagcgctatgaaagaacggagtttgcagagcacctgggggagatgaaccgccagtggcaccgtgtacatggaatgctgaatagaaagatacaacatttagaacaacttctagaaagtatcactgagagtgaaaataaaatacagatcttgaacaactggctggaagcacaagaagagagactgaaaactttacaaaaacctgaaagtgtgatctcagtgcagaagctgctcctggactgtcaggatatagaaaatcaacttgcaattaaatccaaagcactagatgagttgaaacaaagttatctgactttggagagtggggcagtgccattgttagaagatacagcatcccgaattgatgagttatttcaaaagagaagcagtgttctcactcaggtcaatcagctcaaaacctccatgcagtcagttttacaggagtggaagatttatgatcaactctatgatgaagtgaatatgatgacaatccgattctggtactgcatggaacacagcaagcctgtggtgttatcattggagaccttgagatgccaggtggagaaccttcagtctctgcaagatgaagctgagagcagtgaagggagttgggagaaactccaggaggttatcggcaaactcaaaggtctctgcccctctgttgctgaaataatcgaagagaaatgccaaaatactcataaaaggtggactcaggtgaaccaagccattgcagaccagttgcagaaggcccagagtctgctccagctctggaaggcctatagcaatgctcatggtgaagctgccgcaaggctgaagcagcaggaagcaaagtttcaacagctcgcaaacatcagcatgtctggaaacaacctggcagagatcctgcccccagccctgcaggacataaaggagctgcagcatgatgtgcagaaaacaaaagaagcctttctccaaaattccagtgtcctggatcgactcccacaacccgcagagtccagcacccacatgctcctcccgggccccctgcactctctccagagggctgcttatttggaaaagatgctgcttgtgaaagcaaatgaatttgagaatcatgtgctggcactgacagcccaatcacctgatattgaacatttgaatgaagtgagcctcaagctcccacttagtgacgtagctgtgaagacgttacaaaatatgaaccggcaatggattcgggccacggccacggcactggagcgctgcagtgagcttcagggaattggattgaatgaaaagtttctttattgctgtgaaaagtggatccaacttttggagaagatagaagaagcactcaaagtggatgtggctaacagccttcctgagctcctggagcagcagaaaacctataagatgttagaagctgaagtttctataaaccagacaattgctgattcctatgtcacccagtccttacaactcctggacacaacagaaatagagaacagaccagaatttattacagaattctcaaagctgacggatcggtggcagaatgctgtccagggtgttcggcagaggaagggtgacgttgatgggctgaacgcccatgtagccaggtgtggtggcgcatctcttaaaaaacaggaccttcgctactctctgcacactgcctgcggagcggccctgctctgcaggagcagtcacggagctaataaagaaattcattttcaaaggaggcgaactacctgtgccctaaccttggaagctggagaaaagttactgctcacaactgacctgaaaactaaagagtctgtgggtaggagaatcagtcaacttcaggacagctggaaagacatggagccccagctggcagagatgattaagcagttccagagcactgtagagacctgggaccagtgtgaaaagaaaatcaaggagttgaaaagcaggctgcaagttttaaaggcacaaagtgaagatcctcttccagagcttcacgaggacctccataacgaaaaagagctgattaaggtggccatacgtaaacaggagattgaagacagactcaatacatgggttgtattcaatgaaaaaaataaagagttgtgtgcctggctggtgcagatggaaaacaaagttctacagacagcggacattagtattgaagaaatgattgaaaagttacagaagagaacagttggaagagaggaggttccagagagatgggagtgtgagaccattgtcagtgggcatggtaccgaggagagttgctttctctccattagaaagtttcaccagggaaggggcttacatatccttacatgtcagctgataccccaagactgcatggaagaaataaacttgtttagtgaaaacaagttacagttaaagcagatgggtgaccagttgatcaaggccagcaacaaatcaagagcagctgagatcgatgacaagctcaacaaaattaacgatcgttggcaacatctttttgatgtcatcggatcaagtatggcagatcagacaaactccaggtggatgttttttcagtggccacgtggcatacagcgaaccgtcacttggccttgggaccacttgtgcagctgtgcttccactggccacacgggtcctttccatagcagtgtgctcagatgttttgaacaacacatagaatttggaatatacaggagaacctataaggtgaataaagaattgggaggtgataaaaacggacagagatgccccataatctacccgcatgggctggttcaatgtatacggctgggtgaacccctcatactgaagcgggtgaagaagctgaaggagacctttgcttttattcagcagttggacaaaaacatgagcaaccttcgcacctggttggctcgaattgagtctgagctttccaagcctgttgtttatgatgtctgcgatgatcaagagatccagaagaggctcgctgagcagcaggatctacagcgagatattgaacaacacagcgcaggggtggagtccgtgtttaacatctgtgacgtcctactgcacgactccgatgcctgtgcaaatgagaccgagtgtgactcgatccagcagaccaccaggagcctggacagacgctggaggaacatttgtgccatgtccatggagcggcgcatgaaaatcgaggagacgtggcgcctgtggcagaagtttttagacgactattctcgctttgaggactggctcaagtcagctgagaggacggcagcctgcccaaattcctcagaggtgttgtacacgagtgccaaagaggaactgaagaggtttgagcggcagattcatgagcggctcactcagctggagctcatcaacaagcagtaccggcggctggcccgggagaaccgcacagacacggccagcaggctgaagcagatggtccacgagggcaaccagcgctgggacaaccttcagaggcgggtcacagccgtcctgcggagactcaggcatttcaccaaccagagggaagaatttgagggcaccagggagagcattctggtgtggctcacagagatggacctgcagctgaccaacgtggagcacttctcagagagtgacgccgatgacaagatgcgccaactgaatggcttccaacaggaaattacattaaataccaacaagattgatcagctcattgtgtttggggagcagctgattcagaagagcgagcccctggatgctgtgctgattgaggatgagctggaggaactccaccgctactgccaggagggcttggaagatgaaaaggaggcctctgagaatgaaacagacatggaagaccccagagaaatccagactgattcttggcgtaaacggggagagagcgaggaaccgtcatctcctcagtccctgtgtcatctagtggccccagggcacgagcggtctggctgcgagacccctgtcagcgtggactccatccccctggagtgggaccacacaggcgacgtggggggctcctcctctcacgaagaggacgaggagggcccatactacagcgcactgtcaggtaaatccatttcggatggccactcgtggcatgttcccgacagcccttcctgtcccgagcatcactacaagcaaatggaaggtgacaggaatgttccacctgttccccctgcgtccagcaccccttataaaccaccctatgtaagtcttaacttcactgggagtacagcctatgtctgtgccttcgacagatgggagatgattcaagcacaggagcttcacaataagctcaaaataaaacaaaatttgcaacagctgaactctgatatcagcgccatcactacttggctgaaaaaaactgaagcagagctggaaatgttaaagatggcaaagcctccctctgatatccaggaaatagaactgagagtgaagagactgcaggagatactgaaagcctttgacacttacaaggcattagtggtctctgtcaacgtgagcagcaaggaatttctgcaaaccgagagccccgaatccacagagctccaaagtagactccgccagctgagcctgctctgggaagcagcacagggcgcagtggacagctggagagggggcttacgacagtcgctcatgcagtgccaggacttccaccagttgagtcaaaatctgctgctgtggttagcgagtgccaagaaccggaggcagaaggctcatgtcaccgatccaaaggcagacccccgggctctcctagagtgtcggagggaactaatgcaactggaaaaggagctggtagaacgtcaacctcaagtggacatgttacaggagatttcaaacagccttctcattaagggacatggagaagactgtattgaagctgaagaaaaggtgcatgttattgagaagaaactcaaacagttacgggagcaagtgtcccaagatttaatggccttgcagggaacccagaacccagcctcacccctgcccagcttcgacgaggtagactcgggggaccagcctcctgcaacatccgtgccagctccccgagcaaagtttctttacccagcagttcagagcagtgagaactacagaaggcgaggaggagacagagagcagggtccccggcagcacacggccacagcgctccttcctctcaagggtggtccgggcagccctacccctgcagctgctcctcctgctgctgctgctcctggcctgcctgctgccctcctccgaagaagactacagctgcactcaggccaacaactttgcccggtccttttaccccatgctgaggtacaccaatgggccaccccccacatagagggcatagctggccacagtgctacaccacctgcctgattgccaagggtgcccagcacgtggccccagaccaatctgagtgacttagtgttggcaaggtcccgggacctgtgcagacttcttctgggcttacccagcacgggctccctggagcccagggcagctttcagattgtgttcctccccaggagcagggaacctgtgtggcaggtgccccgggtattttggcagaactagttgattagtttagggatctctggaaatgtcagtttcctgaagagccaagcactttgtgaattctggtttgtttgtaaaacagcattattataatgtaggtatggtcaatgagcagtggtgtccatcacatatattatagaagcaagcgaggacattccaccctagaaatggttcagaaactcataggcacccttagctgatggaaacaatcaatcatatttaatacgcttagaatcagttttactccaatcagctggcaattttgagctgccggttatacaccaaaatgttctgttcagtacctagctctgctcttttatattgctttaaatttttaaagaaattgtattgcatggatgtggttatttgtgcatattttttaacaatgcccaatctgtatgaataatgtaaacttcgatttttttttaaaaaaattagattttagctggagcttttgactaatgtaaagtaaatgccaaactaccgacttgatagggatgtttttgtaagttaattttctaagactttttcacatccaaagtgatgctttgctttgggttttaactgtttggccacggcgggggtgggggcggggggttggtacagaaacttgaagctgtttgtgatatgtacaactcagatgtttctcattaaaaaacaaaattagccag

SEQ ID NO: 185327 - DNA, 21842 bp, Homo sapiens
  Payload ID: 16495
  Gene Symbol: SYNE2
  Gene Name: spectrin repeat containing, nuclear envelope 2
  Uniprot ID: Q8WXH0
  ENST ID: ENST00000358025
  CDS Start-End: 213-20936
gccaaggagcggagcgcgctcagctgcgcccagagccttcggccggacctgaaaaagcgagagggagagcgagcaaaaggcgcgatccagagagccaggcaagcggggcgccgacctcgggcggccccggcccgcgcccttgcccctcggccgggcggacgttcacttcttcaactgagatggacatgatataatctccattgagtcaaagaatggcatctagtcctgagcttcccaccgaagatgaacagggttcctggggcatcgacgatctccatatttcattgcaagctgaacaggaagacacccagaagaaagccttcacgtgctggataaactcacagttggccaggcacacttctccctcagttatatccgacctattcacagacattaaaaaggggcatgtcctcctggatctgctagaagtactttctgggcaacagttgcctcgggataaaggatctaataccttccagtgtagaatcaatatagaacatgccttgacattcctaagaaaccgatcaattaagctaataaatattcatgttactgatatcattgatggaaacccatccattatccttggcctaatttggacaattatcctgcactttcatattgagaagcttgcccagactctttcttgcaattacaatcagccttccctggatgatgtgagtgtggttgactcatctcctgcctcaagtcctccagctaagaaatgctctaaagtgcaagcaagatggcaaatgtctgcaagaaaggcccttcttttgtgggctcaggaacaatgcgccacctatgagtctgtcaatgtgaccgattttaagtcaagttggagaaatgggatggcttttttggccatcattcatgccttgcgaccagacctaattgacatgaagagtgtgaagcatagatccaacaaagacaatctgagagaggccttcagaattgcagaacaagaattaaaaatccccagattgctggaaccagaagatgtggatgttgttgatcctgatgaaaagtccatcatgacctatgtggcacagtttctgcagtattccaaagatgcccctgggactggagaggaggctcagggaaaggtgaaagatgctatgggctggttaactctgcaaaaggaaaaactacagaagttgctaaaggattcagagaatgatacctactttaaaaagtataatagcctgctgtcctttatggagtcattcaatgaagaaaaaaagtcctttttggatgtcctgtcaataaaacgggatctggatgagctggacaaggatcatttacagttgagagaagcctgggatggcctcgatcaccagattaatgcatggaaaataaagctaaattatgccttgcccccacccctccatcaaactgaagcttggctccaggaggtagaagagcttatggatgaagatttgtcagcctcccaggatcactctcaagccgtgactctgatacaagagaaaatgactttattcaagagcctgatggatagatttgagcatcattcgaacattctccttacctttgaaaataaggatgaaaatcacttgccattggtaccacctaacaaattggaggaaatgaaaagacgaatcaacaacattttggagaaaaaatttattctacttctagaatttcattactacaagtgcttagttcttggtttggtagatgaagtgaaatcaaaattggatatttggaacattaaatatgggagcagagaatctgtggaattattgctggaagactggcataaatttattgaagaaaaagaattcctagctcgacttgatacttcttttcaaaaatgtggagaaatttataagaatttggctggagaatgtcagaatattaataaacagtatatgatggtgaaatctgatgtttgtatgtatagaaaaaatatatataatgtgaagtccactctacaaaaagtgctggcatgttgggctacttatgtggaaaaccttcgcttactaagggcttgctttgaggagacaaagaaggaagaaattaaagaggtaccctttgagacactagcccagtggaatctagaacacgctactttaaatgaagcaggaaatttcttagtcgaagtcagcaatgatgtggttggatcatctatttctaaagaactgagaaggctgaataaaagatggagaaagttggtttcaaaaactcaacttgaaatgaacctgccactgatgataaaaaaacaggatcagcccacttttgacaattctggaaatattctatctaaagaagagaaagcaactgttgagttttcaacagatatgtcagtagaacttcctgaaaattataatcaaaatataaaggctggagagaaacatgaaaaagaaaatgaagaattcacagggcaactaaaagtggctaaagatgttgaaaaactcattggacaagtggaaatctgggaggcagaagccaaatctgttttggatcaagatgatgtggacacctcaatggaagaatctttgaagcatcttattgccaaaggctctatgtttgatgagcttatggcaagaagtgaagatatgttacaaatggatatacaaaatatttcaagccaggagtcctttcaacatgttctcacaactgggcttcaggcaaagattcaagaagctaaagagaaagtccagatcaatgtggtaaaactcattgcagcgttgaagaacttaactgacgtttcaccagatttggacatcaggctgaagatggaagaatcccagaaggaacttgaatcatatatgatgagggctcagcagttactggggcaaagagagagccccggtgaactcatttcaaaacacaaggaagcactaataatttctaatacaaaaagtctggccaagtatttgaaagctgttgaagaactaaaaaataatgtaactgaggacataaagatgtctttagaagaaaagagtagagatgtctgtgccaaatgggagtctcttcatcatgaactgtctttatatgttcaacaactaaaaatagatattgaaaaaggaaagcttagtgacaatattttaaaacttgaaaagcaaataaataaagaaaagaaacttatccgtagaggaaggaccaagggtctcatcaaagaacatgaggcctgcttttctgaggaaggctgcctgtaccagcttaatcaccacatggaagtcctgagggagctgtgtgaagagctgccttcacagaagagtcaacaagaagtgaagagactactcaaagattatgaacaaaagatagaaagacttctgaaatgtgcttccgagattcatatgacactgcagcccacagcgggaggcacgtcgaaaaacgaggggaccatcaccacatctgagaatagaggaggggatccccacagtgaggcaccatttgcaaaatcagataatcagccatcaactgaaaaggcaatggaacccactatgaagtttagcctggcatcagtgttaaggcctctgcaagaagaaagcattatggaaaaggattacagtgcatctataaatagtttactagagaggtatgatacatacagagatattcttgaacaccacctgcaaaacaacaaattcaggattacttctgatttctctagtgaagaggacaggagtagttcttgtctgcaggctaaactgacagatctacaggtcataaaaaatgaaactgatgctcgctggaaagagtttgaaattatttcattgaagttagaaaatcatgtgaatgacataaaaaagccttttgtaattaaggaaagagacacactaaaggaaagagaaagagagcttcagatgactcttaataccagaatggaatctttagagacagcactgcggcttgtgttacctgtagagaaggcatcacttcttctctgtggctcggacctgcctctccataaaatggccatccagggatttcatctcattgatgctgatcgcatctatcaacacctaaggaatatccaagattccatagcaaaacagattgaaatatgtaaccgcttagaagagccaggcaactttgtattaaaggagttacacccatttgatctacacgcaatgcagaatattatactgaaatacaaaacacaatttgaaggaatgaaccacagggtgcagaggagtgaagatactctcaaagctctggaagactttttggcgtctctcagaacagctaaactctctgctgagcccgttacagacctttcagcctcagatacacaggtggcacaagaaaatacgttgacagtaaaaaataaagagggagaaattcatctgatgaaagacaaggccaaacatttggataaatgtttgaagatgctcgatatgagctttaaagatgctgaacggggtgatgacacctcctgtgaaaacctgcttgatgctttttcaataaagttatctgagacacatggctatggggtacaggaggaattcactgaggaaaacaaattactagaggcttgtattttcaaaaataatgaactccttaaaaatattcaagatgtgcagagtcaaatcagtaaaattggtcttaaggatcctactgttccagctgtgaaacatcggaaaaaatcattaatcagactggataaggttctagatgaatatgaagaagagaagagacatttacaagaaatggctaattctcttccacacttcaaagatggcagagaaaaaaccgtgaatcaacagtgccaaaatacagtagtcttgtgggagaataccaaagccttggtcaccgaatgtcttgaacaatgtgggagagttttggagctcttaaaacaatatcagaattttaaaagcatcttgacaactttgattcaaaaagaagagagtgtcatctccctgcaggcttcgtacatgggaaaggagaacctgaagaaaaggatagcagagattgaaattgtcaaagaagaatttaatgagcatttagaagttgtagacaagataaaccaggtctgcaaaaatctacaattttatctaaataaaatgaaaacttttgaagagcccccttttgaaaaagaggctaatattattgtggatagatggcttgatataaatgagaagacagaagattactatgaaaatcttggtcgagctctagctttgtgggacaaactttttaacttaaaaaatgtcattgatgagtggacagaaaaggcccttcaaaaaatggaattacatcaattgactgaagaggacagagaaaggctgaaggaagaattacaagtccatgaacaaaaaacttcagaattttctagaagagtggctgaaatacagtttttgctccaaagcagtgaaatacctcttgaattgcaggtcatggagtcctctattttgaacaagatggaacatgtacagaagtgcttaacaggagaatccaactgccatgcactcagtggcagcactgctgagctaagggaggatctcgaccaagccaagacccagatcgggatgactgaatccctcttaaaagccctgtctccttctgacagcttggagatcttcactaaactagaggagatacaacagcagattctacagcaaaaacacagtatgatattacttgagaatcaaataggttgtctgactcctgaactctctgaattgaaaaagcaatatgaaagtgtcagtgatttatttaataccaaaaaaagtgttttgcaagatcacttttctaagttattgaatgatcaatgcaagaactttaatgactggttcagcaacattaaagtgaaccttaaggagtgttttgaatcatcagaaacaaaaaagagtgtggaacaaaagctacaaaaactttctgatttcttgactcttgaaggaagaaacagtaaaataaagcaggtggacagcgtactgaagcatgtgaagaagcatctgcccaaagcacatgtgaaggagcttatcagttggctcgtgggtcaggaattcgaattagaaaaaatggagtccatatgccaggctcgagcaaaggagcttgaagactccttgcagcagctactgagactccaggatgaccatagaaacctgaggaagtggttgactaatcaagaagagaaatggaaaggaatggaagaaccaggggagaaaactgagctgttctgccaagctttagctagaaagagggaacagtttgaatctgtggcccaattgaacaactctttgaaggaatatgggtttactgaagaagaagaaataataatggaagcaacatgtttgatggatagataccagacattactgagacaactaagtgaaatcgaggaagaggataagttactacccacagaggaccagagctttaatgatcttgcacatgatgtaattcattggataaaagagattaaagagtcccttatggttttgaattcatccgaaggcaaaatgccacttgaggaaagaatccaaaaaatcaaggaaatcattttgctgaagcctgaaggggatgccagaatagagaccatcatgaagcaggctgagagcagcgaggccccgctggttcagaagaccctcactgacatcagcaaccagtgggacaacacactccatttagctagcacctacctaagccatcaagaaaagcttctactagaaggagagaaatatttacaaagtaaggaggatctgagattaatgctcatagaactaaagaagaaacaggaagcaggctttgctctacaacatggtctgcaggagaagaaagctcagttaaagatttataagaaattcctcaagaaagcccaagatttgacatccttgctaaaggagttaaaatctcagggaaactacctcttggagtgcactaaaaatcccagcttcagtgaagagccttggctggaaataaagcatctacacgaaagtcttcttcaacaactgcaggattctgtgcaaaacttggacggtcacgttcgagaacatgattcataccaggtttgcgtcacagacctgaatactacattggacaatttctccaaggaatttgtcagtttttctgataagcctgtggatcaaatagcggttgaggaaaaattgcagaaactgcaggaactagagaatagactcagtttacaagatggcacattaaagaagattttagctttagcaaaatccgtcaagcaaaatacatcttcagtggggcagaagattattaaagatgatataaaatcacttcagtgtaaacaaaaagatttggaaaacaggcttgcatctgctaagcaggagatggaatgttgtctcaacagcattctcaaatcaaaacgctcaacagaaaagaaaggaaagtttactctgccaggcagagagaagcaggccacttctgatgtgcaggagtctactcaggaatcagctgcagtggaaaagttggaggaagactgggaaataaacaaggattcagctgtggaaatggctatgtcaaaacaactttctcttaatgctcaagaaagcatgaaaaacactgaagatgagcggaaagtcaatgagctgcaaaatcaacctttagaattagatactatgttaagaaatgaacaattagaagagatagagaaattatatacccagttggaagcaaagaaagcagccattaagccactggaacaaacagaatgtcttaacaaaacagaaactggggccttggttctccacaatataggatattcggcacagcatttggacaatttgcttcaggcacttattactttgaagaaaaacaaagaaagccaatattgtgtcctcagagattttcaggaataccttgctgcagttgaatcttcaatgaaagccttgttgacagacaaggaaagtcttaaagtaggaccactggacagtgtaacgtatctggacaaaattaaaaaattcatagcatccatagaaaaagagaaagattctttaggcaacttgaaaatcaaatgggagaatttatcaaaccacgtgactgacatggataagaaattgttggaaagccagattaagcaacttgaacatggttgggaacaagtggaacagcagattcaaaagaagtattctcagcaggtagtggaatatgatgaatttacaaccctcatgaataaggtacaggacactgagatttctctgcaacagcagcagcaacatctacagttaaggctgaagtctccagaagaacgggcagggaaccaaagcatgattgccttgaccactgacctccaggctaccaagcatggattttctgttttaaaggggcaagctgaacttcagatgaagaggatttggggagaaaaagaaaagaagaatttggaggatggaataaataacttgaagaaacaatgggaaacattggagccattacacttagaagcagaaaatcagattaagaagtgtgacataaggaacaagatgaaagagactatcttatgggccaagaatttgttgggtgaacttaatccctccattccccttctcccagatgacattctttcacagatcagaaagtgcaaagtgacacatgatggcattctagctaggcagcagtctgtggaatcgttggctgaagaggtcaaagataaggttcctagccttacaacctatgagggcagtgatttaaataataccctagaggacttacggaatcaataccaaatgctggttttaaaatcaactcaaagatcacagcaattagaatttaagttggaagaaagaagcaatttttttgctataataaggaagtttcaacttatggttcaagaaagtgaaacactgataattcccagggtggagacagctgccacggaagctgaactaaaacatcaccatgttactttggaggcatctcagaaggaattgcaagaaattgacagtggaatctcaacacatcttcaggagctaacaaacatctatgaggagctgaatgtgtttgaaagattatttctggaagatcagttgaaaaatcttaagattaggaccaacagaatacaaagattcattcagaatacatgtaatgaagtggaacacaagataaagttttgcagacaattccatgaaaaaacatcagcgcttcaggaggaggctgacagtatacagcgcaatgaactattacttaatcaagaagtaaataaaggtgttaaagaggagatctataatcttaaagacagactcaccgctattaagtgttgcatcttacaggtattgaaacttaaaaaagtgtttgactatattggactaaactgggatttttcacaacttgaccaattacaaacccaagtatttgaaaaagaaaaggaacttgaagaaaaaattaagcagttggacacatttgaggaagaacatggcaaatatcaggcattattaagtaaaatgagagctattgatttgcaaattaagaaaatgactgaagtagtactaaaagctcctgatagctctccggaaagcagacggctcaatgcccaaattttaagtcagagaattgagaaagccaagtgtttatgtgatgagataataaagaaattaaatgaaaataagacctttgatgactcattcaaggagaaagaaatactacaaataaagctgaatgcagaagaaaatgataagttatacaaagttctccaaaacatggtattagaactctcaccaaaagaattggatgaaaagaattgtcaggacaaactagaaacttccttacatgttttaaatcagataaaatctcaattacagcagccattacttataaatttggaaattaaacatattcaaaatgaaaaggacaattgtgaagcatttcaggagcaagtttgggcagaaatgtgtagtattaaagctgtgactgctattgagaaacaaagagaagaaaactcttctgaagcgagtgatgtggagacaaaactacgtgagtttgaagatcttcagatgcagcttaacacaagcattgatttgcgcacaaatgtcttgaatgatgcttatgaaaatctaacacgctataaagaagcagtcaccagggcagtggagagcatcacttccctcgaagccatcattataccctacagagtagatgttggtaatccagaagaatctttagagatgcctcttcgaaaacaagaggaattggaatccacagtagcacacatccaggacctcactgagaaactgggaatgatatccagccccgaagccaaactacaacttcagtatactttacaggaactagtttctaagaactcagcaatgaaggaagctttcaaagcacaggaaactgaggcagaaaggtatcttgagaattacaaatgctatagaaaaatggaagaggatatttacactaacctcagcaaaatggagacagttcttggacagtccatgtcctcgttgccactgtcttacagagaagctttagagcgcttggaacagagcaaggccttggtgtcaaatcttatatcaaccaaagaagagttaatgaaactacgacagatccttagactcttgagactcaggtgcacagaaaatgatggcatatgtttgctcaagattgtgtcggctctgtgggagaaatggctgagtttgctggaagctgctaaagagtgggagatgtggtgcgaagaactgaagcaggaatggaaatttgtcagtgaagaaattgaacgagaggcaattattttagataatcttcaggaagaactccctgaaatttccaaaacaaaagaggcagccaccacagaggaactctctgagctgctagactgtttatgccaatatggagagaacgtggagaagcaacagctgttactgactctacttcttcagcgcatcagaagtatccagaatgttcctgaaagctcaggggctgtggaaactgttccagcatttcaagaaattacttctatgaaagaacgatgcaacaagcttcttcagaaagttcagaaaaataaagaattggtgcagactgaaatccaagaaagacattccttcacaaaagagataattgctttgaagaatttctttcaacagaccacaacttcattccaaaatatggcattccaggatcacccagaaaagtcagaacaatttgaggagcttcaaagcatccttaagaaagggaaactaacttttgagaatattatggaaaaactgcgaatcaagtattccgaaatgtacaccatagtccctgcagagattgaatcccaggtggaagaatgcagaaaagctttagaagacatagatgagaagattagcaatgaagtcttaaaaagctcaccatcatatgcaatgaggagaaaaatagaagaaattaacaatgggcttcataatgttgaaaagatgttgcagcagaaaagcaaaaatattgagaaagctcaagaaattcaaaagaaaatgtgggacgagttagatctatggcattccaaactaaatgagctggattctgaagttcaggacattgttgaacaggacccaggacaggctcaagaatggatggataacttgatgattcctttccagcagtatcagcaagtatcacagagagcagagtgtagaacctcacagttgaataaggccacagttaagatggaggaatatagtgaccttctgaagagcactgaggcttggatagaaaataccagtcatttgctggccaatcctgctgactatgactctttgaggacactgagtcaccatgctagcactgtgcagatggctttggaagattcagaacagaagcacaatcttttacattcaatctttatggatctagaagacctgtcaataatttttgaaacagatgaattaacccaatccatacaagagttaagtaatcaagtaacagctttacaacaaaaaataatggaaagccttccacagattcagcgaatggctgatgatgtggttgctattgaatctgaagtaaaatcaatggaaaaaagagtttcaaaaatcaaaactatcctattatcaaaagaaatatttgatttttcacctgaagaacatctcaaacatggggaggtcatacttgaaaatatacgtcccatgaagaaaaccattgctgagatagtgtcttaccaagtggaactgaggttgccccaaacaggaatgaaacctctgcctgtgtttcagcggacaaatcagcttttacaagatataaaactattggaaaatgtgactcaagaacaaaatgagttattaaaggtagtcataaaacagaccaatgaatgggatgaagaaatagaaaatttgaaacagatcttaaataattattcagctcagttctcccttgaacatatgtcaccagaccaagctgacaagctgccacaactacagggagaaatcgaacgtatggagaaacagattctgagtttgaaccagagaaaagaagacctgttggtggacttgaaggccaccgtactaaaccttcaccagcatttgaagcaagaacaagaaggagtagaaagagataggctgccagctgtaacatcagaggaaggtggagtggcagagagggatgcttctgagcggaagttgaacagaagaggctccatgtcttacctggcagcagtcgaggaagaggtggaagaaagttccgtgaagagcgataatggagatgagaaggcagagccatcgcctcagtcttggtcttcactttggaagcatgacaaggacatggaagaagacagagcttcctcatcctctggaacaattgttcaggaagcatatgggaaaataagcacctctgataattccatggcacaaatcctcacaccagactcactaaacactgagcaaggcccagaatgttccctaaggcccaaccaaacagaagagggcaccacacctcctattgaggctgacactctggactcttctgacgcgcaaggaggtttggagcccagggtggagaaaactaggccggagcccacagaagtcctgcatgcctgcaagacccaggtggccgagctggagctgtggctgcaacaagccaacgtggcagttgagccggaaacattaaacgcagacatgcagcaggtgctggaacagcagctggtagggtgccaggctatgctaacagagattgagcacaaggttgcctttctgttagagacttgcaaagatcagggcctgggagataatggagccactcaacatgaggctgaagcgctttccctgaaactgaaaacagtgaagtgcaatttagaaaaagtccagatgatgcttcaggagaagcacagtgaagatcagcatcctaccattctaaagaaatcctcagagccagagcatcaagaagctctccaaccagttaacctttctgaattggaatccattgtaactgaaaggccacaattcagcagacaaaaagatttccagcagcaacaggttctggagttaaaaccaatggaacagaaagatttcatcaaattcatagaatttaatgctaagaaaatgtggccccagtattgccaacatgataacgatacaactcaggaatcatctgcaagcaaccaggcatccagccctgaaaatgacgttccagactcgatcttgtcaccccagggccaaaatggagataagtggcaatatctgcatcatgaactctcatcaaaaataaagctcccactccctcagcttgtggagcctcaggtttccacaaatatgggtattctacccagcgtgactatgtataactttagatacccaacaactgaagaactgaaaacctataccacccaacttgaagacctgcgccaagaagcaagtaaccttcagacacaggaaaatatgacagaagaagcatatatcaatttggataaaaaattgtttgaactattcctgaccctcagtcagtgcctcagcagtgtggaggagatgctggagatgcccagactttacagggaggatggttctggccagcaggtgcactacgagacgctggctcttgagttgaagaaactttatttagcgctaagtgacaagaagggtgatcttttgaaagccatgacttggcctggcgagaacaccaacttgctccttgaatgttttgacaaccttcaagtctgcctggagcacactcaggctgcagctgtctgtagaagcaagtccctgaaagctggcctcgattacaaccgcagttaccagaatgaaataaagagattatatcatcagctcattaagagtaagacatctttacaacagtctttgaatgaaatcagtgggcagagtgttgctgaacagcttcagaaagcagatgcatatacagtggagctggagaacgccgagagccgagtggccaaactaagagatgaaggggagaggcttcatttaccttatgctttactccaggaggtttacaaattagaggatgtacttgacagtatgtggggaatgctaagagccaggtacacagaactcagcagccctttcgtcactgagagccagcaagatgctttgttgcaaggcatggtggaactggtgaagattgggaaggaaaagcttgctcatggccacttaaaacaaaccaaaagtaaagtggcgttacaggctcaaatagaaaatcacaaggtttttttccagaagcttgttgctgacatgttgttgatccaagcatactctgccaaaatacttccttctttattgcaaaacagagagacattttgggcagaacaagtaacagaagttaaaatactagaagaaaagtcacgccaatgtggtatgaagctgcagagtttgttgcagaaatgggaagaatttgatgaaaactatgcatctcttgaaaaggacctggaaattcttatatctacattgccctctgtgagtttggtggaagaaacagaggaaagattagtggaaaggatttcattttaccagcaaataaaaagaaacattggtggaaaacacgcccggctttaccaaactctgaacgaaggcaaacagttggtggcgtctgtgagctgtcctgaattagagggccagatcgcaaaactggaagagcagtggttgtccctgaacaagaaaattgaccatgagctccacaggctgcaagctcttctcaagcatctgctcagttataacagagattcggatcagttaaccaagtggttggaatcttcccagcatactctgaattactggaaagaacagtccctcaatgtgtctcaggacttggatacaatcagaagcaacatcaacaatttttttgagttttcaaaagaagttgatgaaaaatcctccttgaagactgccgttatcagtatcgggaaccagcttcttcacctgaaagaaactgatacagctacactgagagcttctttagcacagtttgaacaaaaatggacaatgctcataactcaacttccagatattcaagaaaaacttcaccagcttcaaatggagaaattgccgtctcgtaaagcaatcacagaaatgattagctggatgaacaatgtggagcatcaaacttcagatgaagactccgtgcattcaccaagttctgcatctcaagttaaacatcttcttcagaagcacaaggagtttagaatggaaatggactataaacagtggatagttgacttcgttaaccagtcattacttcagctaagcacctgtgatgtagaaagcaagcgctatgaaagaacggagtttgcagagcacctgggggagatgaaccgccagtggcaccgtgtacatggaatgctgaatagaaagatacaacatttagaacaacttctagaaagtatcactgagagtgaaaataaaatacagatcttgaacaactggctggaagcacaagaagagagactgaaaactttacaaaaacctgaaagtgtgatctcagtgcagaagctgctcctggactgtcaggatatagaaaatcaacttgcaattaaatccaaagcactagatgagttgaaacaaagttatctgactttggagagtggggcagtgccattgttagaagatacagcatcccgaattgatgagttatttcaaaagagaagcagtgttctcactcaggtcaatcagctcaaaacctccatgcagtcagttttacaggagtggaagatttatgatcaactctatgatgaagtgaatatgatgacaatccgattctggtactgcatggaacacagcaagcctgtggtgttatcattggagaccttgagatgccaggtggagaaccttcagtctctgcaagatgaagctgagagcagtgaagggagttgggagaaactccaggaggttatcggcaaactcaaaggtctctgcccctctgttgctgaaataatcgaagagaaatgccaaaatactcataaaaggtggactcaggtgaaccaagccattgcagaccagttgcagaaggcccagagtctgctccagctctggaaggcctatagcaatgctcatggtgaagctgccgcaaggctgaagcagcaggaagcaaagtttcaacagctcgcaaacatcagcatgtctggaaacaacctggcagagatcctgcccccagccctgcaggacataaaggagctgcagcatgatgtgcagaaaacaaaagaagcctttctccaaaattccagtgtcctggatcgactcccacaacccgcagagtccagcacccacatgctcctcccgggccccctgcactctctccagagggctgcttatttggaaaagatgctgcttgtgaaagcaaatgaatttgagtttgttctctcacagtttaaggattttggagtccggctggaatctttaaaaggtcttattatgcatgaagaagagaatttggatagacttcaccaacaggaaaaagaaaatcctgactcattcctgaatcatgtgctggcactgacagcccaatcacctgatattgaacatttgaatgaagtgagcctcaagctcccacttagtgacgtagctgtgaagacgttacaaaatatgaaccggcaatggattcgggccacggccacggcactggagcgctgcagtgagcttcagggaattggattgaatgaaaagtttctttattgctgtgaaaagtggatccaacttttggagaagatagaagaagcactcaaagtggatgtggctaacagccttcctgagctcctggagcagcagaaaacctataagatgttagaagctgaagtttctataaaccagacaattgctgattcctatgtcacccagtccttacaactcctggacacaacagaaatagagaacagaccagaatttattacagaattctcaaagctgacggatcggtggcagaatgctgtccagggtgttcggcagaggaagggtgacgttgatgggctggtgaggcagtggcaagatttcactacttctgtggagaacttgtttcgcttcctcactgacaccagccacctgctatctgcagtgaagggccaggagcgcttcagcctctaccaaaccagaagtctgatccatgagctgaagaataaagaaattcattttcaaaggaggcgaactacctgtgccctaaccttggaagctggagaaaagttactgctcacaactgacctgaaaactaaagagtctgtgggtaggagaatcagtcaacttcaggacagctggaaagacatggagccccagctggcagagatgattaagcagttccagagcactgtagagacctgggaccagtgtgaaaagaaaatcaaggagttgaaaagcaggctgcaagttttaaaggcacaaagtgaagatcctcttccagagcttcacgaggacctccataacgaaaaagagctgattaaggaactagaacagtctttggctagctggactcagaacttgaaagaacttcaaactatgaaggcggacttaacccggcacgttctcgtggaagatgtgatggttttgaaggagcaaatagagcatttgcacagacaatgggaggacctctgcttaagggtggccatacgtaaacaggagattgaagacagactcaatacatgggttgtattcaatgaaaaaaataaagagttgtgtgcctggctggtgcagatggaaaacaaagttctacagacagcggacattagtattgaagaaatgattgaaaagttacagaaggactgcatggaagaaataaacttgtttagtgaaaacaagttacagttaaagcagatgggtgaccagttgatcaaggccagcaacaaatcaagagcagctgagatcgatgacaagctcaacaaaattaacgatcgttggcaacatctttttgatgtcatcggatcaagggtgaagaagctgaaggagacctttgcttttattcagcagttggacaaaaacatgagcaaccttcgcacctggttggctcgaattgagtctgagctttccaagcctgttgtttatgatgtctgcgatgatcaagagatccagaagaggctcgctgagcagcaggatctacagcgagatattgaacaacacagcgcaggggtggagtccgtgtttaacatctgtgacgtcctactgcacgactccgatgcctgtgcaaatgagaccgagtgtgactcgatccagcagaccaccaggagcctggacagacgctggaggaacatttgtgccatgtccatggagcggcgcatgaaaatcgaggagacgtggcgcctgtggcagaagtttttagacgactattctcgctttgaggactggctcaagtcagctgagaggacggcagcctgcccaaattcctcagaggtgttgtacacgagtgccaaagaggaactgaagaggtttgaggcctttcagcggcagattcatgagcggctcactcagctggagctcatcaacaagcagtaccggcggctggcccgggagaaccgcacagacacggccagcaggctgaagcagatggtccacgagggcaaccagcgctgggacaaccttcagaggcgggtcacagccgtcctgcggagactcaggcatttcaccaaccagagggaagaatttgagggcaccagggagagcattctggtgtggctcacagagatggacctgcagctgaccaacgtggagcacttctcagagagtgacgccgatgacaagatgcgccaactgaatggcttccaacaggaaattacattaaataccaacaagattgatcagctcattgtgtttggggagcagctgattcagaagagcgagcccctggatgctgtgctgattgaggatgagctggaggaactccaccgctactgccaggaggtgtttggaagggtctcccggttccaccggcggctcacctcctgcactccgggcttggaagatgaaaaggaggcctctgagaatgaaacagacatggaagaccccagagaaatccagactgattcttggcgtaaacggggagagagcgaggaaccgtcatctcctcagtccctgtgtcatctagtggccccagggcacgagcggtctggctgcgagacccctgtcagcgtggactccatccccctggagtgggaccacacaggcgacgtggggggctcctcctctcacgaagaggacgaggagggcccatactacagcgcactgtcagatgtagaaatccctgaaaatcctgaggcatatcttaaaatgaccacaaaaactttgaaagcgtcttctggtaaatccatttcggatggccactcgtggcatgttcccgacagcccttcctgtcccgagcatcactacaagcaaatggaaggtgacaggaatgttccacctgttccccctgcgtccagcaccccttataaaccaccctatggaaagctactattacctccaggcacggatggtggcaaagaaggcccgcgagtcctgaatggcaacccacagcaggaagacgggggactggccggtatcacagagcagcagtcaggtgccttcgacagatgggagatgattcaagcacaggagcttcacaataagctcaaaataaaacaaaatttgcaacagctgaactctgatatcagcgccatcactacttggctgaaaaaaactgaagcagagctggaaatgttaaagatggcaaagcctccctctgatatccaggaaatagaactgagagtgaagagactgcaggagatactgaaagcctttgacacttacaaggcattagtggtctctgtcaacgtgagcagcaaggaatttctgcaaaccgagagccccgaatccacagagctccaaagtagactccgccagctgagcctgctctgggaagcagcacagggcgcagtggacagctggagagggggcttacgacagtcgctcatgcagtgccaggacttccaccagttgagtcaaaatctgctgctgtggttagcgagtgccaagaaccggaggcagaaggctcatgtcaccgatccaaaggcagacccccgggctctcctagagtgtcggagggaactaatgcaactggaaaaggagctggtagaacgtcaacctcaagtggacatgttacaggagatttcaaacagccttctcattaagggacatggagaagactgtattgaagctgaagaaaaggtgcatgttattgagaagaaactcaaacagttacgggagcaagtgtcccaagatttaatggccttgcagggaacccagaacccagcctcacccctgcccagcttcgacgaggtagactcgggggaccagcctcctgcaacatccgtgccagctccccgagcaaagttcagagcagtgagaactacagaaggcgaggaggagacagagagcagggtccccggcagcacacggccacagcgctccttcctctcaagggtggtccgggcagccctacccctgcagctgctcctcctgctgctgctgctcctggcctgcctgctgccctcctccgaagaagactacagctgcactcaggccaacaactttgcccggtccttttaccccatgctgaggtacaccaatgggccaccccccacatagagggcatagctggccacagtgctacaccacctgcctgattgccaagggtgcccagcacgtggccccagaccaatctgagtgacttagtgttggcaaggtcccgggacctgtgcagacttcttctgggcttacccagcacgggctccctggagcccagggcagctttcagattgtgttcctccccaggagcagggaacctgtgtggcaggtgccccgggtattttggcagaactagttgattagtttagggatctctggaaatgtcagtttcctgaagagccaagcactttgtgaattctggtttgtttgtaaaacagcattattataatgtaggtatggtcaatgagcagtggtgtccatcacatatattatagaagcaagcgaggacattccaccctagaaatggttcagaaactcataggcacccttagctgatggaaacaatcaatcatatttaatacgcttagaatcagttttactccaatcagctggcaattttgagctgccggttatacaccaaaatgttctgttcagtacctagctctgctcttttatattgctttaaatttttaaagaaattgtattgcatggatgtggttatttgtgcatattttttaacaatgcccaatctgtatgaataatgtaaacttcgatttttttttaaaaaaattagattttagctggagcttttgactaatgtaaagtaaatgccaaactaccgacttgatagggatgtttttgtaagttaattttctaagactttttcacatccaaagtgatgctttgctttgggttttaactgtttggccacggcgggggtgggggcggggggttggtacagaaacttgaagctgtttgtgatatgtacaactcagatgtttctcattaaaaaacaaaattagccag

SEQ ID NO: 185328 - DNA, 11095 bp, Homo sapiens
  Payload ID: 16495
  Gene Symbol: SYNE2
  Gene Name: spectrin repeat containing, nuclear envelope 2
  Uniprot ID: Q8WXH0
  ENST ID: ENST00000394768
  CDS Start-End: 379-10191
tgctgcttgcagctttttagatcaggactgcaatggagatacaattaaatcctaaaggtactttagaagcagggggtgttgtaatgtcttttctagataatggtgtgacactatgaagagatatcaagtttaattcttacaaattagaaagcatcatctgactaaactgagtgtctctggggcttaatcagcttgtatcactagtggggttttgtcatgcaaactgcactcctttaaatcataaggatgtgctggaaggctgctttcactttttagaattaaacttttcccccagtctcgtgagtattgcaactctcttaatgcttttaggagcttcaaagcatccttaagaaagggaaactaacttttgagaatattatggaaaaactgcgaatcaagtattccgaaatgtacaccatagtccctgcagagattgaatcccaggtggaagaatgcagaaaagctttagaagacatagatgagaagattagcaatgaagtcttaaaaagctcaccatcatatgcaatgaggagaaaaatagaagaaattaacaatgggcttcataatgttgaaaagatgttgcagcagaaaagcaaaaatattgagaaagctcaagaaattcaaaagaaaatgtgggacgagttagatctatggcattccaaactaaatgagctggattctgaagttcaggacattgttgaacaggacccaggacaggctcaagaatggatggataacttgatgattcctttccagcagtatcagcaagtatcacagagagcagagtgtagaacctcacagttgaataaggccacagttaagatggaggaatatagtgaccttctgaagagcactgaggcttggatagaaaataccagtcatttgctggccaatcctgctgactatgactctttgaggacactgagtcaccatgctagcactgtgcaggattccaagtgttttagaagtggaccaagaccaaatatttatgtttcttattatgttacagttatacagatggctttggaagattcagaacagaagcacaatcttttacattcaatctttatggatctagaagacctgtcaataatttttgaaacagatgaattaacccaatccatacaagagttaagtaatcaagtaacagctttacaacaaaaaataatggaaagccttccacagattcagcgaatggctgatgatgtggttgctattgaatctgaagtaaaatcaatggaaaaaagagtttcaaaaatcaaaactatcctattatcaaaagaaatatttgatttttcacctgaagaacatctcaaacatggggaggtcatacttgaaaatatacgtcccatgaagaaaaccattgctgagatagtgtcttaccaagtggaactgaggttgccccaaacaggaatgaaacctctgcctgtgtttcagcggacaaatcagcttttacaagatataaaactattggaaaatgtgactcaagaacaaaatgagttattaaaggtagtcataaaacagaccaatgaatgggatgaagaaatagaaaatttgaaacagatcttaaataattattcagctcagttctcccttgaacatatgtcaccagaccaagctgacaagctgccacaactacagggagaaatcgaacgtatggagaaacagattctgagtttgaaccagagaaaagaagacctgttggtggacttgaaggccaccgtactaaaccttcaccagcatttgaagcaagaacaagaaggagtagaaagagataggctgccagctgtaacatcagaggaaggtggagtggcagagagggatgcttctgagcggaagttgaacagaagaggctccatgtcttacctggcagcagtcgaggaagaggtggaagaaagttccgtgaagagcgataatggagatgagaaggcagagccatcgcctcagtcttggtcttcactttggaagcatgacaaggacatggaagaagacagagcttcctcatcctctggaacaattgttcaggaagcatatgggaaaataagcacctctgataattccatggcacaaatcctcacaccagactcactaaacactgagcaaggcccagaatgttccctaaggcccaaccaaacagaagagggcaccacacctcctattgaggctgacactctggactcttctgacgcgcaaggaggtttggagcccagggtggagaaaactaggccggagcccacagaagtcctgcatgcctgcaagacccaggtggccgagctggagctgtggctgcaacaagccaacgtggcagttgagccggaaacattaaacgcagacatgcagcaggtgctggaacagcagctggtagggtgccaggctatgctaacagagattgagcacaaggttgcctttctgttagagacttgcaaagatcagggcctgggagataatggagccactcaacatgaggctgaagcgctttccctgaaactgaaaacagtgaagtgcaatttagaaaaagtccagatgatgcttcaggagaagcacagtgaagatcagcatcctaccattctaaagaaatcctcagagccagagcatcaagaagctctccaaccagttaacctttctgaattggaatccattgtaactgaaaggccacaattcagcagacaaaaagatttccagcagcaacaggttctggagttaaaaccaatggaacagaaagatttcatcaaattcatagaatttaatgctaagaaaatgtggccccagtattgccaacatgataacgatacaactcaggaatcatctgcaagcaaccaggcatccagccctgaaaatgacgttccagactcgatcttgtcaccccagggccaaaatggagataagtggcaatatctgcatcatgaactctcatcaaaaataaagctcccactccctcagcttgtggagcctcaggtttccacaaatatgggtattctacccagcgtgactatgtataactttagatacccaacaactgaagaactgaaaacctataccacccaacttgaagacctgcgccaagaagcaagtaaccttcagacacaggaaaatatgacagaagaagcatatatcaatttggataaaaaattgtttgaactattcctgaccctcagtcagtgcctcagcagtgtggaggagatgctggagatgcccagactttacagggaggatggttctggccagcaggtgcactacgagacgctggctcttgagttgaagaaactttatttagcgctaagtgacaagaagggtgatcttttgaaagccatgacttggcctggcgagaacaccaacttgctccttgaatgttttgacaaccttcaagtctgcctggagcacactcaggctgcagctgtctgtagaagcaagtccctgaaagctggcctcgattacaaccgcagttaccagaatgaaataaagagattatatcatcagctcattaagagtaagacatctttacaacagtctttgaatgaaatcagtgggcagagtgttgctgaacagcttcagaaagcagatgcatatacagtggagctggagaacgccgagagccgagtggccaaactaagagatgaaggggagaggcttcatttaccttatgctttactccaggaggtttacaaattagaggatgtacttgacagtatgtggggaatgctaagagccaggtacacagaactcagcagccctttcgtcactgagagccagcaagatgctttgttgcaaggcatggtggaactggtgaagattgggaaggaaaagcttgctcatggccacttaaaacaaaccaaaagtaaagtggcgttacaggctcaaatagaaaatcacaaggtttttttccagaagcttgttgctgacatgttgttgatccaagcatactctgccaaaatacttccttctttattgcaaaacagagagacattttgggcagaacaagtaacagaagttaaaatactagaagaaaagtcacgccaatgtggtatgaagctgcagagtttgttgcagaaatgggaagaatttgatgaaaactatgcatctcttgaaaaggacctggaaattcttatatctacattgccctctgtgagtttggtggaagaaacagaggaaagattagtggaaaggatttcattttaccagcaaataaaaagaaacattggtggaaaacacgcccggctttaccaaactctgaacgaaggcaaacagttggtggcgtctgtgagctgtcctgaattagagggccagatcgcaaaactggaagagcagtggttgtccctgaacaagaaaattgaccatgagctccacaggctgcaagctcttctcaagcatctgctcagttataacagagattcggatcagttaaccaagtggttggaatcttcccagcatactctgaattactggaaagaacagtccctcaatgtgtctcaggacttggatacaatcagaagcaacatcaacaatttttttgagttttcaaaagaagttgatgaaaaatcctccttgaagactgccgttatcagtatcgggaaccagcttcttcacctgaaagaaactgatacagctacactgagagcttctttagcacagtttgaacaaaaatggacaatgctcataactcaacttccagatattcaagaaaaacttcaccagcttcaaatggagaaattgccgtctcgtaaagcaatcacagaaatgattagctggatgaacaatgtggagcatcaaacttcagatgaagactccgtgcattcaccaagttctgcatctcaagttaaacatcttcttcagaagcacaaggagtttagaatggaaatggactataaacagtggatagttgacttcgttaaccagtcattacttcagctaagcacctgtgatgtagaaagcaagcgctatgaaagaacggagtttgcagagcacctgggggagatgaaccgccagtggcaccgtgtacatggaatgctgaatagaaagatacaacatttagaacaacttctagaaagtatcactgagagtgaaaataaaatacagatcttgaacaactggctggaagcacaagaagagagactgaaaactttacaaaaacctgaaagtgtgatctcagtgcagaagctgctcctggactgtcaggatatagaaaatcaacttgcaattaaatccaaagcactagatgagttgaaacaaagttatctgactttggagagtggggcagtgccattgttagaagatacagcatcccgaattgatgagttatttcaaaagagaagcagtgttctcactcaggtcaatcagctcaaaacctccatgcagtcagttttacaggagtggaagatttatgatcaactctatgatgaagtgaatatgatgacaatccgattctggtactgcatggaacacagcaagcctgtggtgttatcattggagaccttgagatgccaggtggagaaccttcagtctctgcaagatgaagctgagagcagtgaagggagttgggagaaactccaggaggttatcggcaaactcaaaggtctctgcccctctgttgctgaaataatcgaagagaaatgccaaaatactcataaaaggtggactcaggtgaaccaagccattgcagaccagttgcagaaggcccagagtctgctccagctctggaaggcctatagcaatgctcatggtgaagctgccgcaaggctgaagcagcaggaagcaaagtttcaacagctcgcaaacatcagcatgtctggaaacaacctggcagagatcctgcccccagccctgcaggacataaaggagctgcagcatgatgtgcagaaaacaaaagaagcctttctccaaaattccagtgtcctggatcgactcccacaacccgcagagtccagcacccacatgctcctcccgggccccctgcactctctccagagggctgcttatttggaaaagatgctgcttgtgaaagcaaatgaatttgagtttgttctctcacagtttaaggattttggagtccggctggaatctttaaaaggtcttattatgcatgaagaagagaatttggatagacttcaccaacaggaaaaagaaaatcctgactcattcctgaatcatgtgctggcactgacagcccaatcacctgatattgaacatttgaatgaagtgagcctcaagctcccacttagtgacgtagctgtgaagacgttacaaaatatgaaccggcaatggattcgggccacggccacggcactggagcgctgcagtgagcttcagggaattggattgaatgaaaagtttctttattgctgtgaaaagtggatccaacttttggagaagatagaagaagcactcaaagtggatgtggctaacagccttcctgagctcctggagcagcagaaaacctataagatgttagaagctgaagtttctataaaccagacaattgctgattcctatgtcacccagtccttacaactcctggacacaacagaaatagagaacagaccagaatttattacagaattctcaaagctgacggatcggtggcagaatgctgtccagggtgttcggcagaggaagggtgacgttgatgggctggtgaggcagtggcaagatttcactacttctgtggagaacttgtttcgcttcctcactgacaccagccacctgctatctgcagtgaagggccaggagcgcttcagcctctaccaaaccagaagtctgatccatgagctgaagaataaagaaattcattttcaaaggaggcgaactacctgtgccctaaccttggaagctggagaaaagttactgctcacaactgacctgaaaactaaagagtctgtgggtaggagaatcagtcaacttcaggacagctggaaagacatggagccccagctggcagagatgattaagcagttccagagcactgtagagacctgggaccagtgtgaaaagaaaatcaaggagttgaaaagcaggctgcaagttttaaaggcacaaagtgaagatcctcttccagagcttcacgaggacctccataacgaaaaagagctgattaaggaactagaacagtctttggctagctggactcagaacttgaaagaacttcaaactatgaaggcggacttaacccggcacgttctcgtggaagatgtgatggttttgaaggagcaaatagagcatttgcacagacaatgggaggacctctgcttaagggtggccatacgtaaacaggagattgaagacagactcaatacatgggttgtattcaatgaaaaaaataaagagttgtgtgcctggctggtgcagatggaaaacaaagttctacagacagcggacattagtattgaagaaatgattgaaaagttacagaaggactgcatggaagaaataaacttgtttagtgaaaacaagttacagttaaagcagatgggtgaccagttgatcaaggccagcaacaaatcaagagcagctgagatcgatgacaagctcaacaaaattaacgatcgttggcaacatctttttgatgtcatcggatcaagggtgaagaagctgaaggagacctttgcttttattcagcagttggacaaaaacatgagcaaccttcgcacctggttggctcgaattgagtctgagctttccaagcctgttgtttatgatgtctgcgatgatcaagagatccagaagaggctcgctgagcagcaggatctacagcgagatattgaacaacacagcgcaggggtggagtccgtgtttaacatctgtgacgtcctactgcacgactccgatgcctgtgcaaatgagaccgagtgtgactcgatccagcagaccaccaggagcctggacagacgctggaggaacatttgtgccatgtccatggagcggcgcatgaaaatcgaggagacgtggcgcctgtggcagaagtttttagacgactattctcgctttgaggactggctcaagtcagctgagaggacggcagcctgcccaaattcctcagaggtgttgtacacgagtgccaaagaggaactgaagaggtttgaggcctttcagcggcagattcatgagcggctcactcagctggagctcatcaacaagcagtaccggcggctggcccgggagaaccgcacagacacggccagcaggctgaagcagatggtccacgagggcaaccagcgctgggacaaccttcagaggcgggtcacagccgtcctgcggagactcaggcatttcaccaaccagagggaagaatttgagggcaccagggagagcattctggtgtggctcacagagatggacctgcagctgaccaacgtggagcacttctcagagagtgacgccgatgacaagatgcgccaactgaatggcttccaacaggaaattacattaaataccaacaagattgatcagctcattgtgtttggggagcagctgattcagaagagcgagcccctggatgctgtgctgattgaggatgagctggaggaactccaccgctactgccaggaggtgtttggaagggtctcccggttccaccggcggctcacctcctgcactccgggcttggaagatgaaaaggaggcctctgagaatgaaacagacatggaagaccccagagaaatccagactgattcttggcgtaaacggggagagagcgaggaaccgtcatctcctcagtccctgtgtcatctagtggccccagggcacgagcggtctggctgcgagacccctgtcagcgtggactccatccccctggagtgggaccacacaggcgacgtggggggctcctcctctcacgaagaggacgaggagggcccatactacagcgcactgtcaggtaaatccatttcggatggccactcgtggcatgttcccgacagcccttcctgtcccgagcatcactacaagcaaatggaaggtgacaggaatgttccacctgttccccctgcgtccagcaccccttataaaccaccctatggaaagctactattacctccaggcacggatggtggcaaagaaggcccgcgagtcctgaatggcaacccacagcaggaagacgggggactggccggtatcacagagcagcagtcaggtgccttcgacagatgggagatgattcaagcacaggagcttcacaataagctcaaaataaaacaaaatttgcaacagctgaactctgatatcagcgccatcactacttggctgaaaaaaactgaagcagagctggaaatgttaaagatggcaaagcctccctctgatatccaggaaatagaactgagagtgaagagactgcaggagatactgaaagcctttgacacttacaaggcattagtggtctctgtcaacgtgagcagcaaggaatttctgcaaaccgagagccccgaatccacagagctccaaagtagactccgccagctgagcctgctctgggaagcagcacagggcgcagtggacagctggagagggggcttacgacagtcgctcatgcagtgccaggacttccaccagttgagtcaaaatctgctgctgtggttagcgagtgccaagaaccggaggcagaaggctcatgtcaccgatccaaaggcagacccccgggctctcctagagtgtcggagggaactaatgcaactggaaaaggagctggtagaacgtcaacctcaagtggacatgttacaggagatttcaaacagccttctcattaagggacatggagaagactgtattgaagctgaagaaaaggtgcatgttattgagaagaaactcaaacagttacgggagcaagtgtcccaagatttaatggccttgcagggaacccagaacccagcctcacccctgcccagcttcgacgaggtagactcgggggaccagcctcctgcaacatccgtgccagctccccgagcaaagcagttcagagcagtgagaactacagaaggcgaggaggagacagagagcagggtccccggcagcacacggccacagcgctccttcctctcaagggtggtccgggcagccctacccctgcagctgctcctcctgctgctgctgctcctggcctgcctgctgccctcctccgaagaagactacagctgcactcaggccaacaactttgcccggtccttttaccccatgctgaggtacaccaatgggccaccccccacatagagggcatagctggccacagtgctacaccacctgcctgattgccaagggtgcccagcacgtggccccagaccaatctgagtgacttagtgttggcaaggtcccgggacctgtgcagacttcttctgggcttacccagcacgggctccctggagcccagggcagctttcagattgtgttcctccccaggagcagggaacctgtgtggcaggtgccccgggtattttggcagaactagttgattagtttagggatctctggaaatgtcagtttcctgaagagccaagcactttgtgaattctggtttgtttgtaaaacagcattattataatgtaggtatggtcaatgagcagtggtgtccatcacatatattatagaagcaagcgaggacattccaccctagaaatggttcagaaactcataggcacccttagctgatggaaacaatcaatcatatttaatacgcttagaatcagttttactccaatcagctggcaattttgagctgccggttatacaccaaaatgttctgttcagtacctagctctgctcttttatattgctttaaatttttaaagaaattgtattgcatggatgtggttatttgtgcatattttttaacaatgcccaatctgtatgaataatgtaaacttcgatttttttttaaaaaaattagattttagctggagcttttgactaatgtaaagtaaatgccaaactaccgacttgatagggatgtttttgtaagttaattttctaagactttttcacatccaaagtgatgctttgctttgggttttaactgtttggccacggcgggggtgggggcggggggttggtacagaaacttgaagctgtttgtgatatgtacaactcagatgtttctcattaaaaaacaaaattagcc

SEQ ID NO: 185329 - DNA, 2669 bp, Homo sapiens
  Payload ID: 16495
  Gene Symbol: SYNE2
  Gene Name: spectrin repeat containing, nuclear envelope 2
  Uniprot ID: Q8WXH0
  ENST ID: ENST00000458046
  CDS Start-End: 93-1763
gcagaagcctatgagttgattaattctaacaactggatactgtggtttagggcttggaagatgaaaaggaggcctctgagaatgaaacagacatggaagaccccagagaaatccagactgattcttggcgtaaacggggagagagcgaggaaccgtcatctcctcagtccctgtgtcatctagtggccccagggcacgagcggtctggctgcgagacccctgtcagcgtggactccatccccctggagtgggaccacacaggcgacgtggggggctcctcctctcacgaagaggacgaggagggcccatactacagcgcactgtcagatgtagaaatccctgaaaatcctgaggcatatcttaaaatgaccacaaaaactttgaaagcgtcttctggtaaatccatttcggatggccactcgtggcatgttcccgacagcccttcctgtcccgagcatcactacaagcaaatggaaggtgacaggaatgttccacctgttccccctgcgtccagcaccccttataaaccaccctatggaaagctactattacctccaggcacggatggtggcaaagaaggcccgcgagtcctgaatggcaacccacagcaggaagacgggggactggccggtatcacagagcagcagtcaggtgccttcgacagatgggagatgattcaagcacaggagcttcacaataagctcaaaataaaacaaaatttgcaacagctgaactctgatatcagcgccatcactacttggctgaaaaaaactgaagcagagctggaaatgttaaagatggcaaagcctccctctgatatccaggaaatagaactgagagtgaagagactgcaggagatactgaaagcctttgacacttacaaggcattagtggtctctgtcaacgtgagcagcaaggaatttctgcaaaccgagagccccgaatccacagagctccaaagtagactccgccagctgagcctgctctgggaagcagcacagggcgcagtggacagctggagagggggcttacgacagtcgctcatgcagtgccagggctctaagacacggccgcgctctgatgtgttgttttttaaggacttccaccagttgagtcaaaatctgctgctgtggttagcgagtgccaagaaccggaggcagaaggctcatgtcaccgatccaaaggcagacccccgggctctcctagagtgtcggagggaactaatgcaactggaaaaggagctggtagaacgtcaacctcaagtggacatgttacaggagatttcaaacagccttctcattaagggacatggagaagactgtattgaagctgaagaaaaggtgcatgttattgagaagaaactcaaacagttacgggagcaagtgtcccaagatttaatggccttgcagggaacccagaacccagcctcacccctgcccagcttcgacgaggtagactcgggggaccagcctcctgcaacatccgtgccagctccccgagcaaagcagttcagagcagtgagaactacagaaggcgaggaggagacagagagcagggtccccggcagcacacggccacagcgctccttcctctcaagggtggtccgggcagccctacccctgcagctgctcctcctgctgctgctgctcctggcctgcctgctgccctcctccgaagaagactacagctgcactcaggccaacaactttgcccggtccttttaccccatgctgaggtacaccaatgggccaccccccacatagagggcatagctggccacagtgctacaccacctgcctgattgccaagggtgcccagcacgtggccccagaccaatctgagtgacttagtgttggcaaggtcccgggacctgtgcagacttcttctgggcttacccagcacgggctccctggagcccagggcagctttcagattgtgttcctccccaggagcagggaacctgtgtggcaggtgccccgggtattttggcagaactagttgattagtttagggatctctggaaatgtcagtttcctgaagagccaagcactttgtgaattctggtttgtttgtaaaacagcattattataatgtaggtatggtcaatgagcagtggtgtccatcacatatattatagaagcaagcgaggacattccaccctagaaatggttcagaaactcataggcacccttagctgatggaaacaatcaatcatatttaatacgcttagaatcagttttactccaatcagctggcaattttgagctgccggttatacaccaaaatgttctgttcagtacctagctctgctcttttatattgctttaaatttttaaagaaattgtattgcatggatgtggttatttgtgcatattttttaacaatgcccaatctgtatgaataatgtaaacttcgatttttttttaaaaaaattagattttagctggagcttttgactaatgtaaagtaaatgccaaactaccgacttgatagggatgtttttgtaagttaattttctaagactttttcacatccaaagtgatgctttgctttgggttttaactgtttggccacggcgggggtgggggcggggggttggtacagaaacttgaagctgtttgtgatatgtacaactcagatgtttctcattaaaaaacaaaattagccag

SEQ ID NO: 185330 - DNA, 3084 bp, Homo sapiens
  Payload ID: 16495
  Gene Symbol: SYNE2
  Gene Name: spectrin repeat containing, nuclear envelope 2
  Uniprot ID: Q8WXH0
  ENST ID: ENST00000441438
  CDS Start-End: 891-2180
cgtgtctacctctgccttctgtggacaccatgcgccttggtccttgtgtcatggtgtatttacactgccgtactcacccataactgcgtgctccttacaaaaccccatccaagccagagccgtctcgatgccaaccccctctcctcccttcaggcctgtgcagagggaatttttcatggtgcctgttttgatgatttttttctccatctaactgaagtcctttggcatgggccaagctttcttcatggtggcttggtttggaactgtttccttgctttactgggatcccctggtggaaaggggtggggggttggggcggtaaagggtgctgatgatttgccacaggagggaaaaaaccttcctttccttgatttgcagctctaatcctcatccttagccccatccctatctgccatggtgggtcggggagagccctgaggagccttttggttcccaagtccatcttgatgttcactcttcccctcactcctgagaggccttctgccatcttggtccccagacccggccttgccactcagtgtccctaccactcgagaccctggctccaaaacgccactcatcccacagcaaatcatgttggtcgtgctccgttgtgtacccatctagtgaaggcacagtgttgctgagttgcatgactcatctcattctcttctgggacatactgacattttgcaaacatgcatgctttgcaaggaaagctgcagaactcattttcatactgtaacctgatgccatgtcacccgtgacccgttcagtaggagagaatagactgtcgcttgctgtctttcgtttcaggtaaatccatttcggatggccactcgtggcatgttcccgacagcccttcctgtcccgagcatcactacaagcaaatggaaggtgacaggaatgttccacctgttccccctgcgtccagcaccccttataaaccaccctatggaaagctactattacctccaggcacggatggtggcaaagaaggcccgcgagtcctgaatggcaacccacagcaggaagacgggggactggccggtatcacagagcagcagtcaggtgccttcgacagatgggagatgattcaagcacaggagcttcacaataagctcaaaataaaacaaaatttgcaacagctgaactctgatatcagcgccatcactacttggctgaaaaaaactgaagcagagctggaaatgttaaagatggcaaagcctccctctgatatccaggaaatagaactgagagtgaagagactgcaggagatactgaaagcctttgacacttacaaggcattagtggtctctgtcaacgtgagcagcaaggaatttctgcaaaccgagagccccgaatccacagagctccaaagtagactccgccagctgagcctgctctgggaagcagcacagggcgcagtggacagctggagagggggcttacgacagtcgctcatgcagtgccagggctctaagacacggccgcgctctgatgtgttgttttttaaggacttccaccagttgagtcaaaatctgctgctgtggttagcgagtgccaagaaccggaggcagaaggctcatgtcaccgatccaaaggcagacccccgggctctcctagagtgtcggagggaactaatgcaactggaaaaggagctggtagaacgtcaacctcaagtggacatgttacaggagatttcaaacagccttctcattaagggacatggagaagactgtattgaagctgaagaaaaggtgcatgttattgagaagaaactcaaacagttacgggagcaagtgtcccaagatttaatggccttgcagggaacccagaacccagcctcacccctgcccagcttcgacgaggtagactcgggggaccagcctcctgcaacatccgtgccagctccccgagcaaagttcagagcagtgagaactacagaaggcgaggaggagacagagagcagggtccccggcagcacacggccacagcgctccttcctctcaagggtggtccgggcagccctacccctgcagctgctcctcctgctgctgctgctcctggcctgcctgctgccctcctccgaagaagactacagctgcactcaggccaacaactttgcccggtccttttaccccatgctgaggtacaccaatgggccaccccccacatagagggcatagctggccacagtgctacaccacctgcctgattgccaagggtgcccagcacgtggccccagaccaatctgagtgacttagtgttggcaaggtcccgggacctgtgcagacttcttctgggcttacccagcacgggctccctggagcccagggcagctttcagattgtgttcctccccaggagcagggaacctgtgtggcaggtgccccgggtattttggcagaactagttgattagtttagggatctctggaaatgtcagtttcctgaagagccaagcactttgtgaattctggtttgtttgtaaaacagcattattataatgtaggtatggtcaatgagcagtggtgtccatcacatatattatagaagcaagcgaggacattccaccctagaaatggttcagaaactcataggcacccttagctgatggaaacaatcaatcatatttaatacgcttagaatcagttttactccaatcagctggcaattttgagctgccggttatacaccaaaatgttctgttcagtacctagctctgctcttttatattgctttaaatttttaaagaaattgtattgcatggatgtggttatttgtgcatattttttaacaatgcccaatctgtatgaataatgtaaacttcgatttttttttaaaaaaattagattttagctggagcttttgactaatgtaaagtaaatgccaaactaccgacttgatagggatgtttttgtaagttaattttctaagactttttcacatccaaagtgatgctttgctttgggttttaactgtttggccacggcgggggtgggggcggggggttggtacagaaacttgaagctgtttgtgatatgtacaactcagatgtttctcattaaaaaacaaaattagcc

SEQ ID NO: 185331 - DNA, 3277 bp, Homo sapiens
  Payload ID: 16495
  Gene Symbol: SYNE2
  Gene Name: spectrin repeat containing, nuclear envelope 2
  ENST ID: ENST00000554805
  CDS Start-End: 367-2373
cagggtctcccccactaaaccgtgcgggtgtcaggggataaaagaagtgcaaaagcacaggcttggaggggatggcttgtgttaagttgctttgctcccatcagaatcgaggagacgtggcgcctgtggcagaagtttttagacgactattctcgctttgaggactggctcaagtcagctgagaggacggcagcctgcccaaattcctcagaggtgttgtacacgagtgccaaagaggaactgaagaggtttgaggcctttcagcggcagattcatgagcggctcactcagctggagctcatcaacaagcagtaccggcggctggcccgggagaaccgcacagacacggccagcaggctgaagcagatggtccacgagggcaaccagcgctgggacaaccttcagaggcgggtcacagccgtcctgcggagactcaggcatttcaccaaccagagggaagaatttgagggcaccagggagagcattctggtgtggctcacagagatggacctgcagctgaccaacgtggagcacttctcagagagtgacgccgatgacaagatgcgccaactgaatggcttccaacaggaaattacattaaataccaacaagattgatcagctcattgtgtttggggagcagctgattcagaagagcgagcccctggatgctgtgctgattgaggatgagctggaggaactccaccgctactgccaggaggtgtttggaagggtctcccggttccaccggcggctcacctcctgcactccgggcttggaagatgaaaaggaggcctctgagaatgaaacagacatggaagaccccagagaaatccagactgattcttggcgtaaacggggagagagcgaggaaccgtcatctcctcagtccctgtgtcatctagtggccccagggcacgagcggtctggctgcgagacccctgtcagcgtggactccatccccctggagtgggaccacacaggcgacgtggggggctcctcctctcacgaagaggacgaggagggcccatactacagcgcactgtcaggtaaatccatttcggatggccactcgtggcatgttcccgacagcccttcctgtcccgagcatcactacaagcaaatggaaggtgacaggaatgttccacctgttccccctgcgtccagcaccccttataaaccaccctatggaaagctactattacctccaggcacggatggtggcaaagaaggcccgcgagtcctgaatggcaacccacagcaggaagacgggggactggccggtatcacagagcagcagtcaggtgccttcgacagatgggagatgattcaagcacaggagcttcacaataagctcaaaataaaacaaaatttgcaacagctgaactctgatatcagcgccatcactacttggctgaaaaaaactgaagcagagctggaaatgttaaagatggcaaagcctccctctgatatccaggaaatagaactgagagtgaagagactgcaggagatactgaaagcctttgacacttacaaggcattagtggtctctgtcaacgtgagcagcaaggaatttctgcaaaccgagagccccgaatccacagagctccaaagtagactccgccagctgagcctgctctgggaagcagcacagggcgcagtggacagctggagagggggcttacgacagtcgctcatgcagtgccaggacttccaccagttgagtcaaaatctgctgctgtggttagcgagtgccaagaaccggaggcagaaggctcatgtcaccgatccaaaggcagacccccgggctctcctagagtgtcggagggaactaatgcaactggaaaaggagctggtagaacgtcaacctcaagtggacatgttacaggagatttcaaacagccttctcattaagggacatggagaagactgtattgaagctgaagaaaaggtgcatgttattgagaagaaactcaaacagttacgggagcaagtgtcccaagatttaatggccttgcagggaacccagaacccagcctcacccctgcccagcttcgacgaggtagactcgggggaccagcctcctgcaacatccgtgccagctccccgagcaaagcagttcagagcagtgagaactacagaaggcgaggaggagacagagagcagggtccccggcagcacacggccacagcgctccttcctctcaagggtggtccgggcagccctacccctgcagctgctcctcctgctgctgctgctcctggcctgcctgctgccctcctccgaagaagactacagctgcactcaggccaacaactttgcccggtccttttaccccatgctgaggtacaccaatgggccaccccccacatagagggcatagctggccacagtgctacaccacctgcctgattgccaagggtgcccagcacgtggccccagaccaatctgagtgacttagtgttggcaaggtcccgggacctgtgcagacttcttctgggcttacccagcacgggctccctggagcccagggcagctttcagattgtgttcctccccaggagcagggaacctgtgtggcaggtgccccgggtattttggcagaactagttgattagtttagggatctctggaaatgtcagtttcctgaagagccaagcactttgtgaattctggtttgtttgtaaaacagcattattataatgtaggtatggtcaatgagcagtggtgtccatcacatatattatagaagcaagcgaggacattccaccctagaaatggttcagaaactcataggcacccttagctgatggaaacaatcaatcatatttaatacgcttagaatcagttttactccaatcagctggcaattttgagctgccggttatacaccaaaatgttctgttcagtacctagctctgctcttttatattgctttaaatttttaaagaaattgtattgcatggatgtggttatttgtgcatattttttaacaatgcccaatctgtatgaataatgtaaacttcgatttttttttaaaaaaattagattttagctggagcttttgactaatgtaaagtaaatgccaaactaccgacttgatagggatgtttttgtaagttaattttctaagactttttcacatccaaagtgatgctttgctttgggttttaactgtttggccacggcgggggtgggggcggggggttggtacagaaacttgaagctgtttgtgatatgtacaactcagatgtttctcattaaaaaacaaaattagcc

SEQ ID NO: 185332 - DNA, 689 bp, Homo sapiens
  Payload ID: 16495
  Gene Symbol: SYNE2
  Gene Name: spectrin repeat containing, nuclear envelope 2
  ENST ID: ENST00000557084
  CDS Start-End: 61-183
gcagaagcctatgagttgattaattctaacaactggatactgtggtttagggcttggaagatgaaaaggaggcctctgagaatgaaacagacatggaagaccccagagaaatccagactgattcttggcgtaaacggggagagagcgaggaaccgtcatctcctcagtccctgtgtcatctagtggccccagggcacgagcggtctggctgcgagacccctgtcagcgtggactccatccccctggagtgggaccacacaggcgacgtggggggctcctcctctcacgaagaggacgaggagggcccatactacagcgcactgtcaggtaaatccatttcggatggccactcgtggcatgttcccgacagcccttcctgtcccgagcatcactacaagcaaatggaaggtgacaggaatgttccacctgttccccctgcgtccagcaccccttataaaccaccctatggaaagctactattacctccaggcacggatggtggcaaagaaggcccgcgagtcctgaatggcaacccacagcaggaagacgggggactggccggtatcacagagcagcagtcaggtgccttcgacagatgggagatgattcaagcacaggagcttcacaataagctcaaaataaaacaaaatttgcaacagctgaactctgatatcagcgccatcactact

SEQ ID NO: 185333 - DNA, 11532 bp, Homo sapiens
  Payload ID: 16495
  Gene Symbol: SYNE2
  Gene Name: spectrin repeat containing, nuclear envelope 2
  ENST ID: ENST00000555002
  CDS Start-End: 1-10626
atggaagaggatatttacactaacctcagcaaaatggagacagttcttggacagtccatgtcctcgttgccactgtcttacagagaagctttagagcgcttggaacagagcaaggccttggtgtcaaatcttatatcaaccaaagaagagttaatgaaactacgacagatccttagactcttgagactcaggtgcacagaaaatgatggcatatgtttgctcaagattgtgtcggctctgtgggagaaatggctgagtttgctggaagctgctaaagagtgggagatgtggtgcgaagaactgaagcaggaatggaaatttgtcagtgaagaaattgaacgagaggcaattattttagataatcttcaggaagaactccctgaaatttccaaaacaaaagaggcagccaccacagaggaactctctgagctgctagactgtttatgccaatatggagagaacgtggagaagcaacagctgttactgactctacttcttcagcgcatcagaagtatccagaatgttcctgaaagctcaggggctgtggaaactgttccagcatttcaagaaattacttctatgaaagaacgatgcaacaagcttcttcagaaagttcagaaaaataaagaattggtgcagactgaaatccaagaaagacattccttcacaaaagagataattgctttgaagaatttctttcaacagaccacaacttcattccaaaatatggcattccaggatcacccagaaaagtcagaacaatttgaggagcttcaaagcatccttaagaaagggaaactaacttttgagaatattatggaaaaactgcgaatcaagtattccgaaatgtacaccatagtccctgcagagattgaatcccaggtggaagaatgcagaaaagctttagaagacatagatgagaagattagcaatgaagtcttaaaaagctcaccatcatatgcaatgaggagaaaaatagaagaaattaacaatgggcttcataatgttgaaaagatgttgcagcagaaaagcaaaaatattgagaaagctcaagaaattcaaaagaaaatgtgggacgagttagatctatggcattccaaactaaatgagctggattctgaagttcaggacattgttgaacaggacccaggacaggctcaagaatggatggataacttgatgattcctttccagcagtatcagcaagtatcacagagagcagagtgtagaacctcacagttgaataaggccacagttaagatggaggaatatagtgaccttctgaagagcactgaggcttggatagaaaataccagtcatttgctggccaatcctgctgactatgactctttgaggacactgagtcaccatgctagcactgtgcagatggctttggaagattcagaacagaagcacaatcttttacattcaatctttatggatctagaagacctgtcaataatttttgaaacagatgaattaacccaatccatacaagagttaagtaatcaagtaacagctttacaacaaaaaataatggaaagccttccacagattcagcgaatggctgatgatgtggttgctattgaatctgaagtaaaatcaatggaaaaaagagtttcaaaaatcaaaactatcctattatcaaaagaaatatttgatttttcacctgaagaacatctcaaacatggggaggtcatacttgaaaatatacgtcccatgaagaaaaccattgctgagatagtgtcttaccaagtggaactgaggttgccccaaacaggaatgaaacctctgcctgtgtttcagcggacaaatcagcttttacaagatataaaactattggaaaatgtgactcaagaacaaaatgagttattaaaggtagtcataaaacagaccaatgaatgggatgaagaaatagaaaatttgaaacagatcttaaataattattcagctcagttctcccttgaacatatgtcaccagaccaagctgacaagctgccacaactacagggagaaatcgaacgtatggagaaacagattctgagtttgaaccagagaaaagaagacctgttggtggacttgaaggccaccgtactaaaccttcaccagcatttgaagcaagaacaagaaggagtagaaagagataggctgccagctgtaacatcagaggaaggtggagtggcagagagggatgcttctgagcggaagttgaacagaagaggctccatgtcttacctggcagcagtcgaggaagaggtggaagaaagttccgtgaagagcgataatggagatgagaaggcagagccatcgcctcagtcttggtcttcactttggaagcatgacaaggacatggaagaagacagagcttcctcatcctctggaacaattgttcaggaagcatatgggaaaataagcacctctgataattccatggcacaaatcctcacaccagactcactaaacactgagcaaggcccagaatgttccctaaggcccaaccaaacagaagagggcaccacacctcctattgaggctgacactctggactcttctgacgcgcaaggaggtttggagcccagggtggagaaaactaggccggagcccacagaagtcctgcatgcctgcaagacccaggtggccgagctggagctgtggctgcaacaagccaacgtggcagttgagccggaaacattaaacgcagacatgcagcaggtgctggaacagcagctggtagggtgccaggctatgctaacagagattgagcacaaggttgcctttctgttagagacttgcaaagatcagggcctgggagataatggagccactcaacatgaggctgaagcgctttccctgaaactgaaaacagtgaagtgcaatttagaaaaagtccagatgatgcttcaggagaagcacagtgaagatcagcatcctaccattctaaagaaatcctcagagccagagcatcaagaagctctccaaccagttaacctttctgaattggaatccattgtaactgaaaggccacaattcagcagacaaaaagatttccagcagcaacaggttctggagttaaaaccaatggaacagaaagatttcatcaaattcatagaatttaatgctaagaaaatgtggccccagtattgccaacatgataacgatacaactcaggaatcatctgcaagcaaccaggcatccagccctgaaaatgacgttccagactcgatcttgtcaccccagggccaaaatggagataagtggcaatatctgcatcatgaactctcatcaaaaataaagctcccactccctcagcttgtggagcctcaggtttccacaaatatgggtattctacccagcgtgactatgtataactttagatacccaacaactgaagaactgaaaacctataccacccaacttgaagacctgcgccaagaagcaagtaaccttcagacacaggaaaatatgacagaagaagcatatatcaatttggataaaaaattgtttgaactattcctgaccctcagtcagtgcctcagcagtgtggaggagatgctggagatgcccagactttacagggaggatggttctggccagcaggtgcactacgagacgctggctcttgagttgaagaaactttatttagcgctaagtgacaagaagggtgatcttttgaaagccatgacttggcctggcgagaacaccaacttgctccttgaatgttttgacaaccttcaagtctgcctggagcacactcaggctgcagctgtctgtagaagcaagtccctgaaagctggcctcgattacaaccgcagttaccagaatgaaataaagagattatatcatcagctcattaagagtaagacatctttacaacagtctttgaatgaaatcagtgggcagagtgttgctgaacagcttcagaaagcagatgcatatacagtggagctggagaacgccgagagccgagtggccaaactaagagatgaaggggagaggcttcatttaccttatgctttactccaggaggtttacaaattagaggatgtacttgacagtatgtggggaatgctaagagccaggtacacagaactcagcagccctttcgtcactgagagccagcaagatgctttgttgcaaggcatggtggaactggtgaagattgggaaggaaaagcttgctcatggccacttaaaacaaaccaaaagtaaagtggcgttacaggctcaaatagaaaatcacaaggtttttttccagaagcttgttgctgacatgttgttgatccaagcatactctgccaaaatacttccttctttattgcaaaacagagagacattttgggcagaacaagtaacagaagttaaaatactagaagaaaagtcacgccaatgtggtatgaagctgcagagtttgttgcagaaatgggaagaatttgatgaaaactatgcatctcttgaaaaggacctggaaattcttatatctacattgccctctgtgagtttggtggaagaaacagaggaaagattagtggaaaggatttcattttaccagcaaataaaaagaaacattggtggaaaacacgcccggctttaccaaactctgaacgaaggcaaacagttggtggcgtctgtgagctgtcctgaattagagggccagatcgcaaaactggaagagcagtggttgtccctgaacaagaaaattgaccatgagctccacaggctgcaagctcttctcaagcatctgctcagttataacagagattcggatcagttaaccaagtggttggaatcttcccagcatactctgaattactggaaagaacagtccctcaatgtgtctcaggacttggatacaatcagaagcaacatcaacaatttttttgagttttcaaaagaagttgatgaaaaatcctccttgaagactgccgttatcagtatcgggaaccagcttcttcacctgaaagaaactgatacagctacactgagagcttctttagcacagtttgaacaaaaatggacaatgctcataactcaacttccagatattcaagaaaaacttcaccagcttcaaatggagaaattgccgtctcgtaaagcaatcacagaaatgattagctggatgaacaatgtggagcatcaaacttcagatgaagactccgtgcattcaccaagttctgcatctcaagttaaacatcttcttcagaagcacaaggagtttagaatggaaatggactataaacagtggatagttgacttcgttaaccagtcattacttcagctaagcacctgtgatgtagaaagcaagcgctatgaaagaacggagtttgcagagcacctgggggagatgaaccgccagtggcaccgtgtacatggaatgctgaatagaaagatacaacatttagaacaacttctagaaagtatcactgagagtgaaaataaaatacagatcttgaacaactggctggaagcacaagaagagagactgaaaactttacaaaaacctgaaagtgtgatctcagtgcagaagctgctcctggactgtcaggatatagaaaatcaacttgcaattaaatccaaagcactagatgagttgaaacaaagttatctgactttggagagtggggcagtgccattgttagaagatacagcatcccgaattgatgagttatttcaaaagagaagcagtgttctcactcaggtcaatcagctcaaaacctccatgcagtcagttttacaggagtggaagatttatgatcaactctatgatgaagtgaatatgatgacaatccgattctggtactgcatggaacacagcaagcctgtggtgttatcattggagaccttgagatgccaggtggagaaccttcagtctctgcaagatgaagctgagagcagtgaagggagttgggagaaactccaggaggttatcggcaaactcaaaggtctctgcccctctgttgctgaaataatcgaagagaaatgccaaaatactcataaaaggtggactcaggtgaaccaagccattgcagaccagttgcagaaggcccagagtctgctccagctctggaaggcctatagcaatgctcatggtgaagctgccgcaaggctgaagcagcaggaagcaaagtttcaacagctcgcaaacatcagcatgtctggaaacaacctggcagagatcctgcccccagccctgcaggacataaaggagctgcagcatgatgtgcagaaaacaaaagaagcctttctccaaaattccagtgtcctggatcgactcccacaacccgcagagtccagcacccacatgctcctcccgggccccctgcactctctccagagggctgcttatttggaaaagatgctgcttgtgaaagcaaatgaatttgagtttgttctctcacagtttaaggattttggagtccggctggaatctttaaaaggtcttattatgcatgaagaagagaatttggatagacttcaccaacaggaaaaagaaaatcctgactcattcctgaatcatgtgctggcactgacagcccaatcacctgatattgaacatttgaatgaagtgagcctcaagctcccacttagtgacgtagctgtgaagacgttacaaaatatgaaccggcaatggattcgggccacggccacggcactggagcgctgcagtgagcttcagggaattggattgaatgaaaagtttctttattgctgtgaaaagtggatccaacttttggagaagatagaagaagcactcaaagtggatgtggctaacagccttcctgagctcctggagcagcagaaaacctataagatgttagaagctgaagtttctataaaccagacaattgctgattcctatgtcacccagtccttacaactcctggacacaacagaaatagagaacagaccagaatttattacagaattctcaaagctgacggatcggtggcagaatgctgtccagggtgttcggcagaggaagggtgacgttgatgggctggtgaggcagtggcaagatttcactacttctgtggagaacttgtttcgcttcctcactgacaccagccacctgctatctgcagtgaagggccaggagcgcttcagcctctaccaaaccagaagtctgatccatgagctgaagaataaagaaattcattttcaaaggaggcgaactacctgtgccctaaccttggaagctggagaaaagttactgctcacaactgacctgaaaactaaagagtctgtgggtaggagaatcagtcaacttcaggacagctggaaagacatggagccccagctggcagagatgattaagcagttccagagcactgtagagacctgggaccagtgtgaaaagaaaatcaaggagttgaaaagcaggctgcaagttttaaaggcacaaagtgaagatcctcttccagagcttcacgaggacctccataacgaaaaagagctgattaaggaactagaacagtctttggctagctggactcagaacttgaaagaacttcaaactatgaaggcggacttaacccggcacgttctcgtggaagatgtgatggttttgaaggagcaaatagagcatttgcacagacaatgggaggacctctgcttaagggtggccatacgtaaacaggagattgaagacagactcaatacatgggttgtattcaatgaaaaaaataaagagttgtgtgcctggctggtgcagatggaaaacaaagttctacagacagcggacattagtattgaagaaatgattgaaaagttacagaaggactgcatggaagaaataaacttgtttagtgaaaacaagttacagttaaagcagatgggtgaccagttgatcaaggccagcaacaaatcaagagcagctgagatcgatgacaagctcaacaaaattaacgatcgttggcaacatctttttgatgtcatcggatcaagggtgaagaagctgaaggagacctttgcttttattcagcagttggacaaaaacatgagcaaccttcgcacctggttggctcgaattgagtctgagctttccaagcctgttgtttatgatgtctgcgatgatcaagagatccagaagaggctcgctgagcagcaggatctacagcgagatattgaacaacacagcgcaggggtggagtccgtgtttaacatctgtgacgtcctactgcacgactccgatgcctgtgcaaatgagaccgagtgtgactcgatccagcagaccaccaggagcctggacagacgctggaggaacatttgtgccatgtccatggagcggcgcatgaaaatcgaggagacgtggcgcctgtggcagaagtttttagacgactattctcgctttgaggactggctcaagtcagctgagaggacggcagcctgcccaaattcctcagaggtgttgtacacgagtgccaaagaggaactgaagaggtttgaggcctttcagcggcagattcatgagcggctcactcagctggagctcatcaacaagcagtaccggcggctggcccgggagaaccgcacagacacggccagcaggctgaagcagatggtccacgagggcaaccagcgctgggacaaccttcagaggcgggtcacagccgtcctgcggagactcaggcatttcaccaaccagagggaagaatttgagggcaccagggagagcattctggtgtggctcacagagatggacctgcagctgaccaacgtggagcacttctcagagagtgacgccgatgacaagatgcgccaactgaatggcttccaacaggaaattacattaaataccaacaagattgatcagctcattgtgtttggggagcagctgattcagaagagcgagcccctggatgctgtgctgattgaggatgagctggaggaactccaccgctactgccaggaggtgtttggaagggtctcccggttccaccggcggctcacctcctgcactccgggcttggaagatgaaaaggaggcctctgagaatgaaacagacatggaagaccccagagaaatccagactgattcttggcgtaaacggggagagagcgaggaaccgtcatctcctcagtccctgtgtcatctagtggccccagggcacgagcggtctggctgcgagacccctgtcagcgtggactccatccccctggagtgggaccacacaggcgacgtggggggctcctcctctcacgaagaggacgaggagggcccatactacagcgcactgtcagatgtagaaatccctgaaaatcctgaggcatatcttaaaatgaccacaaaaactttgaaagcgtcttctggtaaatccatttcggatggccactcgtggcatgttcccgacagcccttcctgtcccgagcatcactacaagcaaatggaaggtgacaggaatgttccacctgttccccctgcgtccagcaccccttataaaccaccctatggaaagctactattacctccaggcacggatggtggcaaagaaggcccgcgagtcctgaatggcaacccacagcaggaagacgggggactggccggtatcacagagcagcagtcaggtgccttcgacagatgggagatgattcaagcacaggagcttcacaataagctcaaaataaaacaaaatttgcaacagctgaactctgatatcagcgccatcactacttggctgaaaaaaactgaagcagagctggaaatgttaaagatggcaaagcctccctctgatatccaggaaatagaactgagagtgaagagactgcaggagatactgaaagcctttgacacttacaaggcattagtggtctctgtcaacgtgagcagcaaggaatttctgcaaaccgagagccccgaatccacagagctccaaagtagactccgccagctgagcctgctctgggaagcagcacagggcgcagtggacagctggagagggggcttacgacagtcgctcatgcagtgccaggacttccaccagttgagtcaaaatctgctgctgtggttagcgagtgccaagaaccggaggcagaaggctcatgtcaccgatccaaaggcagacccccgggctctcctagagtgtcggagggaactaatgcaactggaaaaggagctggtagaacgtcaacctcaagtggacatgttacaggagatttcaaacagccttctcattaagggacatggagaagactgtattgaagctgaagaaaaggtgcatgttattgagaagaaactcaaacagttacgggagcaagtgtcccaagatttaatggccttgcagggaacccagaacccagcctcacccctgcccagcttcgacgaggtagactcgggggaccagcctcctgcaacatccgtgccagctccccgagcaaagttcagagcagtgagaactacagaaggcgaggaggagacagagagcagggtccccggcagcacacggccacagcgctccttcctctcaagggtggtccgggcagccctacccctgcagctgctcctcctgctgctgctgctcctggcctgcctgctgccctcctccgaagaagactacagctgcactcaggccaacaactttgcccggtccttttaccccatgctgaggtacaccaatgggccaccccccacatagagggcatagctggccacagtgctacaccacctgcctgattgccaagggtgcccagcacgtggccccagaccaatctgagtgacttagtgttggcaaggtcccgggacctgtgcagacttcttctgggcttacccagcacgggctccctggagcccagggcagctttcagattgtgttcctccccaggagcagggaacctgtgtggcaggtgccccgggtattttggcagaactagttgattagtttagggatctctggaaatgtcagtttcctgaagagccaagcactttgtgaattctggtttgtttgtaaaacagcattattataatgtaggtatggtcaatgagcagtggtgtccatcacatatattatagaagcaagcgaggacattccaccctagaaatggttcagaaactcataggcacccttagctgatggaaacaatcaatcatatttaatacgcttagaatcagttttactccaatcagctggcaattttgagctgccggttatacaccaaaatgttctgttcagtacctagctctgctcttttatattgctttaaatttttaaagaaattgtattgcatggatgtggttatttgtgcatattttttaacaatgcccaatctgtatgaataatgtaaacttcgatttttttttaaaaaaattagattttagctggagcttttgactaatgtaaagtaaatgccaaactaccgacttgatagggatgtttttgtaagttaattttctaagactttttcacatccaaagtgatgctttgctttgggttttaactgtttggccacggcgggggtgggggcggggggttggtacagaaacttgaagctgtttgtgatatgtacaactcagatgtttctcattaaaaaacaaaattagccag

SEQ ID NO: 185334 - DNA, 3396 bp, Homo sapiens
  Payload ID: 16495
  Gene Symbol: SYNE2
  Gene Name: spectrin repeat containing, nuclear envelope 2
  Uniprot ID: Q8WXH0
  ENST ID: ENST00000555022
  CDS Start-End: 201-2492
ggcaaggccttgcaaataacaatttaccctgagtggatctacagcgagatattgaacaacacagcgcaggggtggagtccgtgtttaacatctgtgacgtcctactgcacgactccgatgcctgtgcaaatgagaccgagtgtgactcgatccagcagaccaccaggagcctggacagacgctggaggaacatttgtgccatgtccatggagcggcgcatgaaaatcgaggagacgtggcgcctgtggcagaagtttttagacgactattctcgctttgaggactggctcaagtcagctgagaggacggcagcctgcccaaattcctcagaggtgttgtacacgagtgccaaagaggaactgaagaggtttgaggcctttcagcggcagattcatgagcggctcactcagctggagctcatcaacaagcagtaccggcggctggcccgggagaaccgcacagacacggccagcaggctgaagcagatggtccacgagggcaaccagcgctgggacaaccttcagaggcgggtcacagccgtcctgcggagactcaggcatttcaccaaccagagggaagaatttgagggcaccagggagagcattctggtgtggctcacagagatggacctgcagctgaccaacgtggagcacttctcagagagtgacgccgatgacaagatgcgccaactgaatggcttccaacaggaaattacattaaataccaacaagattgatcagctcattgtgtttggggagcagctgattcagaagagcgagcccctggatgctgtgctgattgaggatgagctggaggaactccaccgctactgccaggaggtgtttggaagggtctcccggttccaccggcggctcacctcctgcactccgggcttggaagatgaaaaggaggcctctgagaatgaaacagacatggaagaccccagagaaatccagactgattcttggcgtaaacggggagagagcgaggaaccgtcatctcctcagtccctgtgtcatctagtggccccagggcacgagcggtctggctgcgagacccctgtcagcgtggactccatccccctggagtgggaccacacaggcgacgtggggggctcctcctctcacgaagaggacgaggagggcccatactacagcgcactgtcaggtaaatccatttcggatggccactcgtggcatgttcccgacagcccttcctgtcccgagcatcactacaagcaaatggaaggtgacaggaatgttccacctgttccccctgcgtccagcaccccttataaaccaccctatggaaagctactattacctccaggcacggatggtggcaaagaaggcccgcgagtcctgaatggcaacccacagcaggaagacgggggactggccggtatcacagagcagcagtcaggtgccttcgacagatgggagatgattcaagcacaggagcttcacaataagctcaaaataaaacaaaatttgcaacagctgaactctgatatcagcgccatcactacttggctgaaaaaaactgaagcagagctggaaatgttaaagatggcaaagcctccctctgatatccaggaaatagaactgagagtgaagagactgcaggagatactgaaagcctttgacacttacaaggcattagtggtctctgtcaacgtgagcagcaaggaatttctgcaaaccgagagccccgaatccacagagctccaaagtagactccgccagctgagcctgctctgggaagcagcacagggcgcagtggacagctggagagggggcttacgacagtcgctcatgcagtgccaggacttccaccagttgagtcaaaatctgctgctgtggttagcgagtgccaagaaccggaggcagaaggctcatgtcaccgatccaaaggcagacccccgggctctcctagagtgtcggagggaactaatgcaactggaaaaggagctggtagaacgtcaacctcaagtggacatgttacaggagatttcaaacagccttctcattaagggacatggagaagactgtattgaagctgaagaaaaggtgcatgttattgagaagaaactcaaacagttacgggagcaagtgtcccaagatttaatggccttgcagggaacccagaacccagcctcacccctgcccagcttcgacgaggtagactcgggggaccagcctcctgcaacatccgtgccagctccccgagcaaagcagttcagagcagtgagaactacagaaggcgaggaggagacagagagcagggtccccggcagcacacggccacagcgctccttcctctcaagggtggtccgggcagccctacccctgcagctgctcctcctgctgctgctgctcctggcctgcctgctgccctcctccgaagaagactacagctgcactcaggccaacaactttgcccggtccttttaccccatgctgaggtacaccaatgggccaccccccacatagagggcatagctggccacagtgctacaccacctgcctgattgccaagggtgcccagcacgtggccccagaccaatctgagtgacttagtgttggcaaggtcccgggacctgtgcagacttcttctgggcttacccagcacgggctccctggagcccagggcagctttcagattgtgttcctccccaggagcagggaacctgtgtggcaggtgccccgggtattttggcagaactagttgattagtttagggatctctggaaatgtcagtttcctgaagagccaagcactttgtgaattctggtttgtttgtaaaacagcattattataatgtaggtatggtcaatgagcagtggtgtccatcacatatattatagaagcaagcgaggacattccaccctagaaatggttcagaaactcataggcacccttagctgatggaaacaatcaatcatatttaatacgcttagaatcagttttactccaatcagctggcaattttgagctgccggttatacaccaaaatgttctgttcagtacctagctctgctcttttatattgctttaaatttttaaagaaattgtattgcatggatgtggttatttgtgcatattttttaacaatgcccaatctgtatgaataatgtaaacttcgatttttttttaaaaaaattagattttagctggagcttttgactaatgtaaagtaaatgccaaactaccgacttgatagggatgtttttgtaagttaattttctaagactttttcacatccaaagtgatgctttgctttgggttttaactgtttggccacggcgggggtgggggcggggggttggtacagaaacttgaagctgtttgtgatatgtacaactcagatgtttctcattaaaaaacaaaattagcc

SEQ ID NO: 185335 - DNA, 5261 bp, Homo sapiens
  Payload ID: 16495
  Gene Symbol: SYNE2
  Gene Name: spectrin repeat containing, nuclear envelope 2
  ENST ID: ENST00000553289
  CDS Start-End: 110-1822
ggcccagagtctgctccagctctggaaggcctatagcaatgctcatggtgaagctgccgcaaggctgaagcagcaggaagcaaagtttcaacagctcgcaaacatcagcatgtctggaaacaacctggcagagatcctgcccccagccctgcaggacataaaggagctgcagcatgatgtgcagaaaacaaaagaagcctttctccaaaattccagtgtcctggatcgactcccacaacccgcagagtccagcacccacatgctcctcccgggccccctgcactctctccagagggctgcttatttggaaaagatgctgcttgtgaaagcaaatgaatttgagtttgttctctcacagtttaaggattttggagtccggctggaatctttaaaaggtcttattatgcatgaagaagagaatttggatagacttcaccaacaggaaaaagaaaatcctgactcattcctgaatcatgtgctggcactgacagcccaatcacctgatattgaacatttgaatgaagtgagcctcaagctcccacttagtgacgtagctgtgaagacgttacaaaatatgaaccggcaatggattcgggccacggccacggcactggagcgctgcagtgagcttcagggaattggattgaatgaaaagtttctttattgctgtgaaaagtggatccaacttttggagaagatagaagaagcactcaaagtggatgtggctaacagccttcctgagctcctggagcagcagaaaacctataagatgttagaagctgaagtttctataaaccagacaattgctgattcctatgtcacccagtccttacaactcctggacacaacagaaatagagaacagaccagaatttattacagaattctcaaagctgacggatcggtggcagaatgctgtccagggtgttcggcagaggaagggtgacgttgatgggctggtgaggcagtggcaagatttcactacttctgtggagaacttgtttcgcttcctcactgacaccagccacctgctatctgcagtgaagggccaggagcgcttcagcctctaccaaaccagaagtctgatccatgagctgaagaataaagaaattcattttcaaaggaggcgaactacctgtgccctaaccttggaagctggagaaaagttactgctcacaactgacctgaaaactaaagagtctgtgggtaggagaatcagtcaacttcaggacagctggaaagacatggagccccagctggcagagatgattaagcagttccagagcactgtagagacctgggaccagtgtgaaaagaaaatcaaggagttgaaaagcaggctgcaagttttaaaggcacaaagtgaagatcctcttccagagcttcacgaggacctccataacgaaaaagagctgattaaggaactagaacagtctttggctagctggactcagaacttgaaagaacttcaaactatgaaggcggacttaacccggcacgttctcgtggaagatgtgatggttttgaaggagcaaatagagcatttgcacagacaatgggaggacctctgcttaagggtggccatacgtaaacaggagattgaagacagactcaatacatgggttgtattcaatgaaaaaaataaagagttgtgtgcctggctggtgcagatggaaaacaaagttctacagacagcggacattagtattgaagaaatgattgaaaagttacagaagggtgaagaagctgaaggagacctttgcttttattcagcagttggacaaaaacatgagcaaccttcgcacctggttggctcgaattgagtctgagctttccaagcctgttgtttatgatgtctgcgatgatcaagagatccagaagaggctcgctgagcagcaggatctacagcgagatattgaacaacacagcgcaggggtggagtccgtgtttaacatctgtgacgtcctactgcacgactccgatgcctgtgcaaatgagaccgagtgtgactcgatccagcagaccaccaggagcctggacagacgctggaggaacatttgtgccatgtccatggagcggcgcatgaaaatcgaggagacgtggcgcctgtggcagaagtttttagacgactattctcgctttgaggactggctcaagtcagctgagaggacggcagcctgcccaaattcctcagaggtgttgtacacgagtgccaaagaggaactgaagaggtttgaggcctttcagcggcagattcatgagcggctcactcagctggagctcatcaacaagcagtaccggcggctggcccgggagaaccgcacagacacggccagcaggctgaagcagatggtccacgagggcaaccagcgctgggacaaccttcagaggcgggtcacagccgtcctgcggagactcaggcatttcaccaaccagagggaagaatttgagggcaccagggagagcattctggtgtggctcacagagatggacctgcagctgaccaacgtggagcacttctcagagagtgacgccgatgacaagatgcgccaactgaatggcttccaacaggaaattacattaaataccaacaagattgatcagctcattgtgtttggggagcagctgattcagaagagcgagcccctggatgctgtgctgattgaggatgagctggaggaactccaccgctactgccaggaggtgtttggaagggtctcccggttccaccggcggctcacctcctgcactccgggcttggaagatgaaaaggaggcctctgagaatgaaacagacatggaagaccccagagaaatccagactgattcttggcgtaaacggggagagagcgaggaaccgtcatctcctcagtccctgtgtcatctagtggccccagggcacgagcggtctggctgcgagacccctgtcagcgtggactccatccccctggagtgggaccacacaggcgacgtggggggctcctcctctcacgaagaggacgaggagggcccatactacagcgcactgtcaggtaaatccatttcggatggccactcgtggcatgttcccgacagcccttcctgtcccgagcatcactacaagcaaatggaaggtgacaggaatgttccacctgttccccctgcgtccagcaccccttataaaccaccctatggaaagctactattacctccaggcacggatggtggcaaagaaggcccgcgagtcctgaatggcaacccacagcaggaagacgggggactggccggtatcacagagcagcagtcaggtgccttcgacagatgggagatgattcaagcacaggagcttcacaataagctcaaaataaaacaaaatttgcaacagctgaactctgatatcagcgccatcactacttggctgaaaaaaactgaagcagagctggaaatgttaaagatggcaaagcctccctctgatatccaggaaatagaactgagagtgaagagactgcaggagatactgaaagcctttgacacttacaaggcattagtggtctctgtcaacgtgagcagcaaggaatttctgcaaaccgagagccccgaatccacagagctccaaagtagactccgccagctgagcctgctctgggaagcagcacagggcgcagtggacagctggagagggggcttacgacagtcgctcatgcagtgccaggacttccaccagttgagtcaaaatctgctgctgtggttagcgagtgccaagaaccggaggcagaaggctcatgtcaccgatccaaaggcagacccccgggctctcctagagtgtcggagggaactaatgcaactggaaaaggagctggtagaacgtcaacctcaagtggacatgttacaggagatttcaaacagccttctcattaagggacatggagaagactgtattgaagctgaagaaaaggtgcatgttattgagaagaaactcaaacagttacgggagcaagtgtcccaagatttaatggccttgcagggaacccagaacccagcctcacccctgcccagcttcgacgaggtagactcgggggaccagcctcctgcaacatccgtgccagctccccgagcaaagcagttcagagcagtgagaactacagaaggcgaggaggagacagagagcagggtccccggcagcacacggccacagcgctccttcctctcaagggtggtccgggcagccctacccctgcagctgctcctcctgctgctgctgctcctggcctgcctgctgccctcctccgaagaagactacagctgcactcaggccaacaactttgcccggtccttttaccccatgctgaggtacaccaatgggccaccccccacatagagggcatagctggccacagtgctacaccacctgcctgattgccaagggtgcccagcacgtggccccagaccaatctgagtgacttagtgttggcaaggtcccgggacctgtgcagacttcttctgggcttacccagcacgggctccctggagcccagggcagctttcagattgtgttcctccccaggagcagggaacctgtgtggcaggtgccccgggtattttggcagaactagttgattagtttagggatctctggaaatgtcagtttcctgaagagccaagcactttgtgaattctggtttgtttgtaaaacagcattattataatgtaggtatggtcaatgagcagtggtgtccatcacatatattatagaagcaagcgaggacattccaccctagaaatggttcagaaactcataggcacccttagctgatggaaacaatcaatcatatttaatacgcttagaatcagttttactccaatcagctggcaattttgagctgccggttatacaccaaaatgttctgttcagtacctagctctgctcttttatattgctttaaatttttaaagaaattgtattgcatggatgtggttatttgtgcatattttttaacaatgcccaatctgtatgaataatgtaaacttcgatttttttttaaaaaaattagattttagctggagcttttgactaatgtaaagtaaatgccaaactaccgacttgatagggatgtttttgtaagttaattttctaagactttttcacatccaaagtgatgctttgctttgggttttaactgtttggccacggcgggggtgggggcggggggttggtacagaaacttgaagctgtttgtgatatgtacaactcagatgtttctcattaaaaaacaaaattagccag

SEQ ID NO: 185336 - DNA, 557 bp, Homo sapiens
  Payload ID: 16495
  Gene Symbol: SYNE2
  Gene Name: spectrin repeat containing, nuclear envelope 2
  ENST ID: ENST00000553308
  CDS Start-End: 41-557
attcttgtgctgtgcctttcagttgaacagaagaggctccatgtcttacctggcagcagtcgaggaagaggtggaagaaagttccgtgaagagcgataatggagatgagaaggcagagccatcgcctcagtcttggtcttcactttggaagcatgacaaggacatggaagaagacagagcttcctcatcctctggaacaattgttcaggaagcatatgggaaaataagcacctctgataattccatggcacaaatcctcacaccagactcactaaacactgagcaaggcccagaatgttccctaaggcccaaccaaacagaagagggcaccacacctcctattgaggctgacactctggactcttctgacgcgcaaggaggtttggagcccagggtggagaaaactaggccggagcccacagaagtcctgcatgcctgcaagacccaggtggccgagctggagctgtggctgcaacaagccaacgtggcagttgagccggaaacattaaacgcagacatgcagcaggtgctggaacagcagctggtagggtgccagg

SEQ ID NO: 185337 - DNA, 6766 bp, Homo sapiens
  Payload ID: 16495
  Gene Symbol: SYNE2
  Gene Name: spectrin repeat containing, nuclear envelope 2
  ENST ID: ENST00000555612
  CDS Start-End: 42-3383
cactgagagcttctttagcacagtttgaacaaaaatggacaatgctcataactcaacttccagatattcaagaaaaacttcaccagcttcaaatggagaaattgccgtctcgtaaagcaatcacagaaatgattagctggatgaacaatgtggagcatcaaacttcagatgaagactccgtgcattcaccaagttctgcatctcaagttaaacatcttcttcagaagcacaaggagtttagaatggaaatggactataaacagtggatagttgacttcgttaaccagtcattacttcagctaagcacctgtgatgtagaaagcaagcgctatgaaagaacggagtttgcagagcacctgggggagatgaaccgccagtggcaccgtgtacatggaatgctgaatagaaagatacaacatttagaacaacttctagaaagtatcactgagagtgaaaataaaatacagatcttgaacaactggctggaagcacaagaagagagactgaaaactttacaaaaacctgaaagtgtgatctcagtgcagaagctgctcctggactgtcaggatatagaaaatcaacttgcaattaaatccaaagcactagatgagttgaaacaaagttatctgactttggagagtggggcagtgccattgttagaagatacagcatcccgaattgatgagttatttcaaaagagaagcagtgttctcactcaggtcaatcagctcaaaacctccatgcagtcagttttacaggagtggaagatttatgatcaactctatgatgaagtgaatatgatgacaatccgattctggtactgcatggaacacagcaagcctgtggtgttatcattggagaccttgagatgccaggtggagaaccttcagtctctgcaagatgaagctgagagcagtgaagggagttgggagaaactccaggaggttatcggcaaactcaaaggtctctgcccctctgttgctgaaataatcgaagagaaatgccaaaatactcataaaaggtggactcaggtgaaccaagccattgcagaccagttgcagaaggcccagagtctgctccagctctggaaggcctatagcaatgctcatggtgaagctgccgcaaggctgaagcagcaggaagcaaagtttcaacagctcgcaaacatcagcatgtctggaaacaacctggcagagatcctgcccccagccctgcaggacataaaggagctgcagcatgatgtgcagaaaacaaaagaagcctttctccaaaattccagtgtcctggatcgactcccacaacccgcagagtccagcacccacatgctcctcccgggccccctgcactctctccagagggctgcttatttggaaaagatgctgcttgtgaaagcaaatgaatttgagtttgttctctcacagtttaaggattttggagtccggctggaatctttaaaaggtcttattatgcatgaagaagagaatttggatagacttcaccaacaggaaaaagaaaatcctgactcattcctgaatcatgtgctggcactgacagcccaatcacctgatattgaacatttgaatgaagtgagcctcaagctcccacttagtgacgtagctgtgaagacgttacaaaatatgaaccggcaatggattcgggccacggccacggcactggagcgctgcagtgagcttcagggaattggattgaatgaaaagtttctttattgctgtgaaaagtggatccaacttttggagaagatagaagaagcactcaaagtggatgtggctaacagccttcctgagctcctggagcagcagaaaacctataagatgttagaagctgaagtttctataaaccagacaattgctgattcctatgtcacccagtccttacaactcctggacacaacagaaatagagaacagaccagaatttattacagaattctcaaagctgacggatcggtggcagaatgctgtccagggtgttcggcagaggaagggtgacgttgatgggctggtgaggcagtggcaagatttcactacttctgtggagaacttgtttcgcttcctcactgacaccagccacctgctatctgcagtgaagggccaggagcgcttcagcctctaccaaaccagaagtctgatccatgagctgaagaataaagaaattcattttcaaaggaggcgaactacctgtgccctaaccttggaagctggagaaaagttactgctcacaactgacctgaaaactaaagagtctgtgggtaggagaatcagtcaacttcaggacagctggaaagacatggagccccagctggcagagatgattaagcagttccagagcactgtagagacctgggaccagtgtgaaaagaaaatcaaggagttgaaaagcaggctgcaagttttaaaggcacaaagtgaagatcctcttccagagcttcacgaggacctccataacgaaaaagagctgattaaggaactagaacagtctttggctagctggactcagaacttgaaagaacttcaaactatgaaggcggacttaacccggcacgttctcgtggaagatgtgatggttttgaaggagcaaatagagcatttgcacagacaatgggaggacctctgcttaagggtggccatacgtaaacaggagattgaagacagactcaatacatgggttgtattcaatgaaaaaaataaagagttgtgtgcctggctggtgcagatggaaaacaaagttctacagacagcggacattagtattgaagaaatgattgaaaagttacagaaggactgcatggaagaaataaacttgtttagtgaaaacaagttacagttaaagcagatgggtgaccagttgatcaaggccagcaacaaatcaagagcagctgagatcgatgacaagctcaacaaaattaacgatcgttggcaacatctttttgatgtcatcggatcaagggtgaagaagctgaaggagacctttgcttttattcagcagttggacaaaaacatgagcaaccttcgcacctggttggctcgaattgagtctgagctttccaagcctgttgtttatgatgtctgcgatgatcaagagatccagaagaggctcgctgagcagcagcccacccatggggtacagcagaaatattatctgatgatgactaaaaatgccatgtttattcgtgaagaggttttccagttttttcctatgaccatgcattttctcttcataaatgttatttttcccaaattggggaactgcatcactatcatcatcaaaggacaagactccagagaccccacctctctccaagccaccacagctttggctggactttatcagttggggaggcaaggatctacagcgagatattgaacaacacagcgcaggggtggagtccgtgtttaacatctgtgacgtcctactgcacgactccgatgcctgtgcaaatgagaccgagtgtgactcgatccagcagaccaccaggagcctggacagacgctggaggaacatttgtgccatgtccatggagcggcgcatgaaaatcgaggagacgtggcgcctgtggcagaagtttttagacgactattctcgctttgaggactggctcaagtcagctgagaggacggcagcctgcccaaattcctcagaggtgttgtacacgagtgccaaagaggaactgaagaggtttgaggcctttcagcggcagattcatgagcggctcactcagctggagctcatcaacaagcagtaccggcggctggcccgggagaaccgcacagacacggccagcaggctgaagcagatggtccacgagggcaaccagcgctgggacaaccttcagaggcgggtcacagccgtcctgcggagactcaggcatttcaccaaccagagggaagaatttgagggcaccagggagagcattctggtgtggctcacagagatggacctgcagctgaccaacgtggagcacttctcagagagtgacgccgatgacaagatgcgccaactgaatggcttccaacaggaaattacattaaataccaacaagattgatcagctcattgtgtttggggagcagctgattcagaagagcgagcccctggatgctgtgctgattgaggatgagctggaggaactccaccgctactgccaggaggtgtttggaagggtctcccggttccaccggcggctcacctcctgcactccgggcttggaagatgaaaaggaggcctctgagaatgaaacagacatggaagaccccagagaaatccagactgattcttggcgtaaacggggagagagcgaggaaccgtcatctcctcagtccctgtgtcatctagtggccccagggcacgagcggtctggctgcgagacccctgtcagcgtggactccatccccctggagtgggaccacacaggcgacgtggggggctcctcctctcacgaagaggacgaggagggcccatactacagcgcactgtcaggtaaatccatttcggatggccactcgtggcatgttcccgacagcccttcctgtcccgagcatcactacaagcaaatggaaggtgacaggaatgttccacctgttccccctgcgtccagcaccccttataaaccaccctatggaaagctactattacctccaggcacggatggtggcaaagaaggcccgcgagtcctgaatggcaacccacagcaggaagacgggggactggccggtatcacagagcagcagtcaggtgccttcgacagatgggagatgattcaagcacaggagcttcacaataagctcaaaataaaacaaaatttgcaacagctgaactctgatatcagcgccatcactacttggctgaaaaaaactgaagcagagctggaaatgttaaagatggcaaagcctccctctgatatccaggaaatagaactgagagtgaagagactgcaggagatactgaaagcctttgacacttacaaggcattagtggtctctgtcaacgtgagcagcaaggaatttctgcaaaccgagagccccgaatccacagagctccaaagtagactccgccagctgagcctgctctgggaagcagcacagggcgcagtggacagctggagagggggcttacgacagtcgctcatgcagtgccagggctctaagacacggccgcgctctgatgtgttgttttttaaggacttccaccagttgagtcaaaatctgctgctgtggttagcgagtgccaagaaccggaggcagaaggctcatgtcaccgatccaaaggcagacccccgggctctcctagagtgtcggagggaactaatgcaactggaaaaggagctggtagaacgtcaacctcaagtggacatgttacaggagatttcaaacagccttctcattaagggacatggagaagactgtattgaagctgaagaaaaggtgcatgttattgagaagaaactcaaacagttacgggagcaagtgtcccaagatttaatggccttgcagggaacccagaacccagcctcacccctgcccagcttcgacgaggtagactcgggggaccagcctcctgcaacatccgtgccagctccccgagcaaagcagttcagagcagtgagaactacagaaggcgaggaggagacagagagcagggtccccggcagcacacggccacagcgctccttcctctcaagggtggtccgggcagccctacccctgcagctgctcctcctgctgctgctgctcctggcctgcctgctgccctcctccgaagaagactacagctgcactcaggccaacaactttgcccggtccttttaccccatgctgaggtacaccaatgggccaccccccacatagagggcatagctggccacagtgctacaccacctgcctgattgccaagggtgcccagcacgtggccccagaccaatctgagtgacttagtgttggcaaggtcccgggacctgtgcagacttcttctgggcttacccagcacgggctccctggagcccagggcagctttcagattgtgttcctccccaggagcagggaacctgtgtggcaggtgccccgggtattttggcagaactagttgattagtttagggatctctggaaatgtcagtttcctgaagagccaagcactttgtgaattctggtttgtttgtaaaacagcattattataatgtaggtatggtcaatgagcagtggtgtccatcacatatattatagaagcaagcgaggacattccaccctagaaatggttcagaaactcataggcacccttagctgatggaaacaatcaatcatatttaatacgcttagaatcagttttactccaatcagctggcaattttgagctgccggttatacaccaaaatgttctgttcagtacctagctctgctcttttatattgctttaaatttttaaagaaattgtattgcatggatgtggttatttgtgcatattttttaacaatgcccaatctgtatgaataatgtaaacttcgatttttttttaaaaaaattagattttagctggagcttttgactaatgtaaagtaaatgccaaactaccgacttgatagggatgtttttgtaagttaattttctaagactttttcacatccaaagtgatgctttgctttgggttttaactgtttggccacggcgggggtgggggcggggggttggtacagaaacttgaagctgtttgtgatatgtacaactcagatgtttctcattaaaaaacaaaattagcc

SEQ ID NO: 185338 - DNA, 574 bp, Homo sapiens
  Payload ID: 16495
  Gene Symbol: SYNE2
  Gene Name: spectrin repeat containing, nuclear envelope 2
  ENST ID: ENST00000556906
  CDS Start-End: 89-574
agagatgccccataatctacccgcatgggctggttcaatgtatacggctgggtgaacccctcatactgaagcgcagttggacaaaaacatgagcaaccttcgcacctggttggctcgaattgagtctgagctttccaagcctgttgtttatgatgtctgcgatgatcaagagatccagaagaggctcgctgagcagcaggatctacagcgagatattgaacaacacagcgcaggggtggagtccgtgtttaacatctgtgacgtcctactgcacgactccgatgcctgtgcaaatgagaccgagtgtgactcgatccagcagaccaccaggagcctggacagacgctggaggaacatttgtgccatgtccatggagcggcgcatgaaaatcgaggagacgtggcgcctgtggcagaagtttttagacgactattctcgctttgaggactggctcaagtcagctgagaggacggcagcctgcccaaattcctcagaggtgttgtacacgagtgccaaagaggaactgaagaggtttgaggcctttcagcggcagattcatgagcggctcactcag

SEQ ID NO: 185339 - DNA, 674 bp, Homo sapiens
  Payload ID: 16495
  Gene Symbol: SYNE2
  Gene Name: spectrin repeat containing, nuclear envelope 2
  ENST ID: ENST00000553455
  CDS Start-End: 1-645
atgctaacagagattgagcacaaggttgcctttctgttagagacttgcaaagatcagggcctgggagataatggagccactcaacatgaggctgaagcgctttccctgaaactgaaaacagtgaagtgcaatttagaaaaagtccagatgatgcttcaggagaagcacagtgaagatcagcatcctaccattctaaagaaatcctcagagccagagcatcaagaagctctccaaccagttaacctttctgaattggaatccattgtaactgaaaggccacaattcagcagacaaaaagatttccagcagcaacaggttctggagttaaaaccaatggaacagaaagatttcatcaaattcatagaatttaatgctaagaaaatgtggccccagtattgccaacatgataacgatacaactcaggaatcatctgcaagcaaccaggcatccagccctgaaaatgacgttccagactcgatcttgtcaccccagggccaaaatggagataagtggcaatatctgcatcatgaactctcatcaaaaataaagctcccactccctcagcttgtggagcctcaggtcagtctgtatctacatggtgcaaatagcctgtttatctttgaaaatccaacaagcattcattaaataaacatgtatattctccagaaagcaaa

SEQ ID NO: 185340 - DNA, 20508 bp, Homo sapiens
  Payload ID: 16495
  Gene Symbol: SYNE2
  Gene Name: spectrin repeat containing, nuclear envelope 2
  ENST ID: ENST00000554584
  CDS Start-End: 52-20508
ttcacttcttcaactgagatggacatgatataatctccattgagtcaaagaatggcatctagtcctgagcttcccaccgaagatgaacagggttcctggggcatcgacgatctccatatttcattgcaagctgaacaggaagacacccagaagaaagccttcacgtgctggataaactcacagttggccaggcacacttctccctcagttatatccgacctattcacagacattaaaaaggggcatgtcctcctggatctgctagaagtactttctgggcaacagttgcctcgggataaaggatctaataccttccagtgtagaatcaatatagaacatgccttgacattcctaagaaaccgatcaattaagctaataaatattcatgttactgatatcattgatggaaacccatccattatccttggcctaatttggacaattatcctgcactttcatattgagaagcttgcccagactctttcttgcaattacaatcagccttccctggatgatgtgagtgtggttgactcatctcctgcctcaagtcctccagctaagaaatgctctaaagtgcaagcaagatggcaaatgtctgcaagaaaggcccttcttttgtgggctcaggaacaatgcgccacctatgagtctgtcaatgtgaccgattttaagtcaagttggagaaatgggatggcttttttggccatcattcatgccttgcgaccagacctaattgacatgaagagtgtgaagcatagatccaacaaagacaatctgagagaggccttcagaattgcagaacaagaattaaaaatccccagattgctggaaccagaagatgtggatgttgttgatcctgatgaaaagtccatcatgacctatgtggcacagtttctgcagtattccaaagatgcccctgggactggagaggaggctcagggaaaggtgaaagatgctatgggctggttaactctgcaaaaggaaaaactacagaagttgctaaaggattcagagaatgatacctactttaaaaagtataatagcctgctgtcctttatggagtcattcaatgaagaaaaaaagtcctttttggatgtcctgtcaataaaacgggatctggatgagctggacaaggatcatttacagttgagagaagcctgggatggcctcgatcaccagattaatgcatggaaaataaagctaaattatgccttgcccccacccctccatcaaactgaagcttggctccaggaggtagaagagcttatggatgaagatttgtcagcctcccaggatcactctcaagccgtgactctgatacaagagaaaatgactttattcaagagcctgatggatagatttgagcatcattcgaacattctccttacctttgaaaataaggatgaaaatcacttgccattggtaccacctaacaaattggaggaaatgaaaagacgaatcaacaacattttggagaaaaaatttattctacttctagaatttcattactacaagtgcttagttcttggtttggtagatgaagtgaaatcaaaattggatatttggaacattaaatatgggagcagagaatctgtggaattattgctggaagactggcataaatttattgaagaaaaagaattcctagctcgacttgatacttcttttcaaaaatgtggagaaatttataagaatttggctggagaatgtcagaatattaataaacagtatatgatggtgaaatctgatgtttgtatgtatagaaaaaatatatataatgtgaagtccactctacaaaaagtgctggcatgttgggctacttatgtggaaaaccttcgcttactaagggcttgctttgaggagacaaagaaggaagaaattaaagaggtaccctttgagacactagcccagtggaatctagaacacgctactttaaatgaagcaggaaatttcttagtcgaagtcagcaatgatgtggttggatcatctatttctaaagaactgagaaggctgaataaaagatggagaaagttggtttcaaaaactcaacttgaaatgaacctgccactgatgataaaaaaacaggatcagcccacttttgacaattctggaaatattctatctaaagaagagaaagcaactgttgagttttcaacagatatgtcagtagaacttcctgaaaattataatcaaaatataaaggctggagagaaacatgaaaaagaaaatgaagaattcacagggcaactaaaagtggctaaagatgttgaaaaactcattggacaagtggaaatctgggaggcagaagccaaatctgttttggatcaagatgatgtggacacctcaatggaagaatctttgaagcatcttattgccaaaggctctatgtttgatgagcttatggcaagaagtgaagatatgttacaaatggatatacaaaatatttcaagccaggagtcctttcaacatgttctcacaactgggcttcaggcaaagattcaagaagctaaagagaaagtccagatcaatgtggtaaaactcattgcagcgttgaagaacttaactgacgtttcaccagatttggacatcaggctgaagatggaagaatcccagaaggaacttgaatcatatatgatgagggctcagcagttactggggcaaagagagagccccggtgaactcatttcaaaacacaaggaagcactaataatttctaatacaaaaagtctggccaagtatttgaaagctgttgaagaactaaaaaataatgtaactgaggacataaagatgtctttagaagaaaagagtagagatgtctgtgccaaatgggagtctcttcatcatgaactgtctttatatgttcaacaactaaaaatagatattgaaaaaggaaagcttagtgacaatattttaaaacttgaaaagcaaataaataaagaaaagaaacttatccgtagaggaaggaccaagggtctcatcaaagaacatgaggcctgcttttctgaggaaggctgcctgtaccagcttaatcaccacatggaagtcctgagggagctgtgtgaagagctgccttcacagaagagtcaacaagaagtgaagagactactcaaagattatgaacaaaagatagaaagacttctgaaatgtgcttccgagattcatatgacactgcagcccacagcgggaggcacgtcgaaaaacgaggggaccatcaccacatctgagaatagaggaggggatccccacagtgaggcaccatttgcaaaatcagataatcagccatcaactgaaaaggcaatggaacccactatgaagtttagcctggcatcagtgttaaggcctctgcaagaagaaagcattatggaaaaggattacagtgcatctataaatagtttactagagaggtatgatacatacagagatattcttgaacaccacctgcaaaacaacaaattcaggattacttctgatttctctagtgaagaggacaggagtagttcttgtctgcaggctaaactgacagatctacaggtcataaaaaatgaaactgatgctcgctggaaagagtttgaaattatttcattgaagttagaaaatcatgtgaatgacataaaaaagccttttgtaattaaggaaagagacacactaaaggaaagagaaagagagcttcagatgactcttaataccagaatggaatctttagagacagcactgcggcttgtgttacctgtagagaaggcatcacttcttctctgtggctcggacctgcctctccataaaatggccatccagggatttcatctcattgatgctgatcgcatctatcaacacctaaggaatatccaagattccatagcaaaacagattgaaatatgtaaccgcttagaagagccaggcaactttgtattaaaggagttacacccatttgatctacacgcaatgcagaatattatactgaaatacaaaacacaatttgaaggaatgaaccacagggtgcagaggagtgaagatactctcaaagctctggaagactttttggcgtctctcagaacagctaaactctctgctgagcccgttacagacctttcagcctcagatacacaggtggcacaagaaaatacgttgacagtaaaaaataaagagggagaaattcatctgatgaaagacaaggccaaacatttggataaatgtttgaagatgctcgatatgagctttaaagatgctgaacggggtgatgacacctcctgtgaaaacctgcttgatgctttttcaataaagttatctgagacacatggctatggggtacaggaggaattcactgaggaaaacaaattactagaggcttgtattttcaaaaataatgaactccttaaaaatattcaagatgtgcagagtcaaatcagtaaaattggtcttaaggatcctactgttccagctgtgaaacatcggaaaaaatcattaatcagactggataaggttctagatgaatatgaagaagagaagagacatttacaagaaatggctaattctcttccacacttcaaagatggcagagaaaaaaccgtgaatcaacagtgccaaaatacagtagtcttgtgggagaataccaaagccttggtcaccgaatgtcttgaacaatgtgggagagttttggagctcttaaaacaatatcagaattttaaaagcatcttgacaactttgattcaaaaagaagagagtgtcatctccctgcaggcttcgtacatgggaaaggagaacctgaagaaaaggatagcagagattgaaattgtcaaagaagaatttaatgagcatttagaagttgtagacaagataaaccaggtctgcaaaaatctacaattttatctaaataaaatgaaaacttttgaagagcccccttttgaaaaagaggctaatattattgtggatagatggcttgatataaatgagaagacagaagattactatgaaaatcttggtcgagctctagctttgtgggacaaactttttaacttaaaaaatgtcattgatgagtggacagaaaaggcccttcaaaaaatggaattacatcaattgactgaagaggacagagaaaggctgaaggaagaattacaagtccatgaacaaaaaacttcagaattttctagaagagtggctgaaatacagtttttgctccaaagcagtgaaatacctcttgaattgcaggtcatggagtcctctattttgaacaagatggaacatgtacagaagtgcttaacaggagaatccaactgccatgcactcagtggcagcactgctgagctaagggaggatctcgaccaagccaagacccagatcgggatgactgaatccctcttaaaagccctgtctccttctgacagcttggagatcttcactaaactagaggagatacaacagcagattctacagcaaaaacacagtatgatattacttgagaatcaaataggttgtctgactcctgaactctctgaattgaaaaagcaatatgaaagtgtcagtgatttatttaataccaaaaaaagtgttttgcaagatcacttttctaagttattgaatgatcaatgcaagaactttaatgactggttcagcaacattaaagtgaaccttaaggagtgttttgaatcatcagaaacaaaaaagagtgtggaacaaaagctacaaaaactttctgatttcttgactcttgaaggaagaaacagtaaaataaagcaggtggacagcgtactgaagcatgtgaagaagcatctgcccaaagcacatgtgaaggagcttatcagttggctcgtgggtcaggaattcgaattagaaaaaatggagtccatatgccaggctcgagcaaaggagcttgaagactccttgcagcagctactgagactccaggatgaccatagaaacctgaggaagtggttgactaatcaagaagagaaatggaaaggaatggaagaaccaggggagaaaactgagctgttctgccaagctttagctagaaagagggaacagtttgaatctgtggcccaattgaacaactctttgaaggaatatgggtttactgaagaagaagaaataataatggaagcaacatgtttgatggatagataccagacattactgagacaactaagtgaaatcgaggaagaggataagttactacccacagaggaccagagctttaatgatcttgcacatgatgtaattcattggataaaagagattaaagagtcccttatggttttgaattcatccgaaggcaaaatgccacttgaggaaagaatccaaaaaatcaaggaaatcattttgctgaagcctgaaggggatgccagaatagagaccatcatgaagcaggctgagagcagcgaggccccgctggttcagaagaccctcactgacatcagcaaccagtgggacaacacactccatttagctagcacctacctaagccatcaagaaaagcttctactagaaggagagaaatatttacaaagtaaggaggatctgagattaatgctcatagaactaaagaagaaacaggaagcaggctttgctctacaacatggtctgcaggagaagaaagctcagttaaagatttataagaaattcctcaagaaagcccaagatttgacatccttgctaaaggagttaaaatctcagggaaactacctcttggagtgcactaaaaatcccagcttcagtgaagagccttggctggaaataaagcatctacacgaaagtcttcttcaacaactgcaggattctgtgcaaaacttggacggtcacgttcgagaacatgattcataccaggtttgcgtcacagacctgaatactacattggacaatttctccaaggaatttgtcagtttttctgataagcctgtggatcaaatagcggttgaggaaaaattgcagaaactgcaggaactagagaatagactcagtttacaagatggcacattaaagaagattttagctttagcaaaatccgtcaagcaaaatacatcttcagtggggcagaagattattaaagatgatataaaatcacttcagtgtaaacaaaaagatttggaaaacaggcttgcatctgctaagcaggagatggaatgttgtctcaacagcattctcaaatcaaaacgctcaacagaaaagaaaggaaagtttactctgccaggcagagagaagcaggccacttctgatgtgcaggagtctactcaggaatcagctgcagtggaaaagttggaggaagactgggaaataaacaagaattttgttgaaaatgtgatggcagtttccaaaaattgccatcatagcatgtatatatttgaatccattgtcaagaatttcatttcagatgaaatgcaggattcagctgtggaaatggctatgtcaaaacaactttctcttaatgctcaagaaagcatgaaaaacactgaagatgagcggaaagtcaatgagctgcaaaatcaacctttagaattagatactatgttaagaaatgaacaattagaagagatagagaaattatatacccagttggaagcaaagaaagcagccattaagccactggaacaaacagaatgtcttaacaaaacagaaactggggccttggttctccacaatataggatattcggcacagcatttggacaatttgcttcaggcacttattactttgaagaaaaacaaagaaagccaatattgtgtcctcagagattttcaggaataccttgctgcagttgaatcttcaatgaaagccttgttgacagacaaggaaagtcttaaagtaggaccactggacagtgtaacgtatctggacaaaattaaaaaattcatagcatccatagaaaaagagaaagattctttaggcaacttgaaaatcaaatgggagaatttatcaaaccacgtgactgacatggataagaaattgttggaaagccagattaagcaacttgaacatggttgggaacaagtggaacagcagattcaaaagaagtattctcagcaggtagtggaatatgatgaatttacaaccctcatgaataaggtacaggacactgagatttctctgcaacagcagcagcaacatctacagttaaggctgaagtctccagaagaacgggcagggaaccaaagcatgattgccttgaccactgacctccaggctaccaagcatggattttctgttttaaaggggcaagctgaacttcagatgaagaggatttggggagaaaaagaaaagaagaatttggaggatggaataaataacttgaagaaacaatgggaaacattggagccattacacttagaagcagaaaatcagattaagaagtgtgacataaggaacaagatgaaagagactatcttatgggccaagaatttgttgggtgaacttaatccctccattccccttctcccagatgacattctttcacagatcagaaagtgcaaagtgacacatgatggcattctagctaggcagcagtctgtggaatcgttggctgaagaggtcaaagataaggttcctagccttacaacctatgagggcagtgatttaaataataccctagaggacttacggaatcaataccaaatgctggttttaaaatcaactcaaagatcacagcaattagaatttaagttggaagaaagaagcaatttttttgctataataaggaagtttcaacttatggttcaagaaagtgaaacactgataattcccagggtggagacagctgccacggaagctgaactaaaacatcaccatgttactttggaggcatctcagaaggaattgcaagaaattgacagtggaatctcaacacatcttcaggagctaacaaacatctatgaggagctgaatgtgtttgaaagattatttctggaagatcagttgaaaaatcttaagattaggaccaacagaatacaaagattcattcagaatacatgtaatgaagtggaacacaagataaagttttgcagacaattccatgaaaaaacatcagcgcttcaggaggaggctgacagtatacagcgcaatgaactattacttaatcaagaagtaaataaaggtgttaaagaggagatctataatcttaaagacagactcaccgctattaagtgttgcatcttacaggtattgaaacttaaaaaagtgtttgactatattggactaaactgggatttttcacaacttgaccaattacaaacccaagtatttgaaaaagaaaaggaacttgaagaaaaaattaagcagttggacacatttgaggaagaacatggcaaatatcaggcattattaagtaaaatgagagctattgatttgcaaattaagaaaatgactgaagtagtactaaaagctcctgatagctctccggaaagcagacggctcaatgcccaaattttaagtcagagaattgagaaagccaagtgtttatgtgatgagataataaagaaattaaatgaaaataagacctttgatgactcattcaaggagaaagaaatactacaaataaagctgaatgcagaagaaaatgataagttatacaaagttctccaaaacatggtattagaactctcaccaaaagaattggatgaaaagaattgtcaggacaaactagaaacttccttacatgttttaaatcagataaaatctcaattacagcagccattacttataaatttggaaattaaacatattcaaaatgaaaaggacaattgtgaagcatttcaggagcaagtttgggcagaaatgtgtagtattaaagctgtgactgctattgagaaacaaagagaagaaaactcttctgaagcgagtgatgtggagacaaaactacgtgagtttgaagatcttcagatgcagcttaacacaagcattgatttgcgcacaaatgtcttgaatgatgcttatgaaaatctaacacgctataaagaagcagtcaccagggcagtggagagcatcacttccctcgaagccatcattataccctacagagtagatgttggtaatccagaagaatctttagagatgcctcttcgaaaacaagaggaattggaatccacagtagcacacatccaggacctcactgagaaactgggaatgatatccagccccgaagccaaactacaacttcagtatactttacaggaactagtttctaagaactcagcaatgaaggaagctttcaaagcacaggaaactgaggcagaaaggtatcttgagaattacaaatgctatagaaaaatggaagaggatatttacactaacctcagcaaaatggagacagttcttggacagtccatgtcctcgttgccactgtcttacagagaagctttagagcgcttggaacagagcaaggccttggtgtcaaatcttatatcaaccaaagaagagttaatgaaactacgacagatccttagactcttgagactcaggtgcacagaaaatgatggcatatgtttgctcaagattgtgtcggctctgtgggagaaatggctgagtttgctggaagctgctaaagagtgggagatgtggtgcgaagaactgaagcaggaatggaaatttgtcagtgaagaaattgaacgagaggcaattattttagataatcttcaggaagaactccctgaaatttccaaaacaaaagaggcagccaccacagaggaactctctgagctgctagactgtttatgccaatatggagagaacgtggagaagcaacagctgttactgactctacttcttcagcgcatcagaagtatccagaatgttcctgaaagctcaggggctgtggaaactgttccagcatttcaagaaattacttctatgaaagaacgatgcaacaagcttcttcagaaagttcagaaaaataaagaattggtgcagactgaaatccaagaaagacattccttcacaaaagagataattgctttgaagaatttctttcaacagaccacaacttcattccaaaatatggcattccaggatcacccagaaaagtcagaacaatttgaggagcttcaaagcatccttaagaaagggaaactaacttttgagaatattatggaaaaactgcgaatcaagtattccgaaatgtacaccatagtccctgcagagattgaatcccaggtggaagaatgcagaaaagctttagaagacatagatgagaagattagcaatgaagtcttaaaaagctcaccatcatatgcaatgaggagaaaaatagaagaaattaacaatgggcttcataatgttgaaaagatgttgcagcagaaaagcaaaaatattgagaaagctcaagaaattcaaaagaaaatgtgggacgagttagatctatggcattccaaactaaatgagctggattctgaagttcaggacattgttgaacaggacccaggacaggctcaagaatggatggataacttgatgattcctttccagcagtatcagcaagtatcacagagagcagagtgtagaacctcacagttgaataaggccacagttaagatggaggaatatagtgaccttctgaagagcactgaggcttggatagaaaataccagtcatttgctggccaatcctgctgactatgactctttgaggacactgagtcaccatgctagcactgtgcagatggctttggaagattcagaacagaagcacaatcttttacattcaatctttatggatctagaagacctgtcaataatttttgaaacagatgaattaacccaatccatacaagagttaagtaatcaagtaacagctttacaacaaaaaataatggaaagccttccacagattcagcgaatggctgatgatgtggttgctattgaatctgaagtaaaatcaatggaaaaaagagtttcaaaaatcaaaactatcctattatcaaaagaaatatttgatttttcacctgaagaacatctcaaacatggggaggtcatacttgaaaatatacgtcccatgaagaaaaccattgctgagatagtgtcttaccaagtggaactgaggttgccccaaacaggaatgaaacctctgcctgtgtttcagcggacaaatcagcttttacaagatataaaactattggaaaatgtgactcaagaacaaaatgagttattaaaggtagtcataaaacagaccaatgaatgggatgaagaaatagaaaatttgaaacagatcttaaataattattcagctcagttctcccttgaacatatgtcaccagaccaagctgacaagctgccacaactacagggagaaatcgaacgtatggagaaacagattctgagtttgaaccagagaaaagaagacctgttggtggacttgaaggccaccgtactaaaccttcaccagcatttgaagcaagaacaagaaggagtagaaagagataggctgccagctgtaacatcagaggaaggtggagtggcagagagggatgcttctgagcggaagttgaacagaagaggctccatgtcttacctggcagcagtcgaggaagaggtggaagaaagttccgtgaagagcgatcatgacaaggacatggaagaagacagagcttcctcatcctctggaacaattgttcaggaagcatatgggaaaataagcacctctgataattccatggcacaaatcctcacaccagactcactaaacactgagcaaggcccagaatgttccctaaggcccaaccaaacagaagagggcaccacacctcctattgaggctgacactctggactcttctgacgcgcaaggaggtttggagcccagggtggagaaaactaggccggagcccacagaagtcctgcatgcctgcaagacccaggtggccgagctggagctgtggctgcaacaagccaacgtggcagttgagccggaaacattaaacgcagacatgcagcaggtgctggaacagcagctggtagggtgccaggctatgctaacagagattgagcacaaggttgcctttctgttagagacttgcaaagatcagggcctgggagataatggagccactcaacatgaggctgaagcgctttccctgaaactgaaaacagtgaagtgcaatttagaaaaagtccagatgatgcttcaggagaagcacagtgaagatcagcatcctaccattctaaagaaatcctcagagccagagcatcaagaagctctccaaccagttaacctttctgaattggaatccattgtaactgaaaggccacaattcagcagacaaaaagatttccagcagcaacaggttctggagttaaaaccaatggaacagaaagatttcatcaaattcatagaatttaatgctaagaaaatgtggccccagtattgccaacatgataacgatacaactcaggaatcatctgcaagatacccaacaactgaagaactgaaaacctataccacccaacttgaagacctgcgccaagaagcaagtaaccttcagacacaggaaaatatgacagaagaagcatatatcaatttggataaaaaattgtttgaactattcctgaccctcagtcagtgcctcagcagtgtggaggagatgctggagatgcccagactttacagggaggatggttctggccagcaggtgcactacgagacgctggctcttgagttgaagaaactttatttagcgctaagtgacaagaagggtgatcttttgaaagccatgacttggcctggcgagaacaccaacttgctccttgaatgttttgacaaccttcaagtctgcctggagcacactcaggctgcagctgtctgtagaagcaagtccctgaaagctggcctcgattacaaccgcagttaccagaaagcagatgcatatacagtggagctggagaacgccgagagccgagtggccaaactaagagatgaaggggagaggcttcatttaccttatgctttactccaggaggtttacaaattagaggatgtacttgacagtatgtggggaatgctaagagccaggtacacagaactcagcagccctttcgtcactgagagccagcaagatgctttgttgcaaggcatggtggaactggtgaagattgggaaggaaaagcttgctcatggccacttaaaacaaaccaaaagtaaagtggcgttacaggctcaaatagaaaatcacaaggtttttttccagaagcttgttgctgacatgttgttgatccaagcatactctgccaaaatacttccttctttattgcaaaacagagagacattttgggcagaacaagtaacagaagttaaaatactagaagaaaagtcacgccaatgtggtatgaagctgcagagtttgttgcagaaatgggaagaatttgatgaaaactatgcatctcttgaaaaggacctggaaattcttatatctacattgccctctgtgagtttggtggaagaaacagaggaaagattagtggaaaggatttcattttaccagcaaataaaaagaaacattggtggaaaacacgcccggctttaccaaactctgaacgaaggcaaacagttggtggcgtctgtgagctgtcctgaattagagggccagatcgcaaaactggaagagcagtggttgtccctgaacaagaaaattgaccatgagctccacaggctgcaagctcttctcaagcatctgctcagttataacagagattcggatcagttaaccaagtggttggaatcttcccagcatactctgaattactggaaagaacagtccctcaatgtgtctcaggacttggatacaatcagaagcaacatcaacaatttttttgagttttcaaaagaagttgatgaaaaatcctccttgaagactgccgttatcagtatcgggaaccagcttcttcacctgaaagaaactgatacagctacactgagagcttctttagcacagtttgaacaaaaatggacaatgctcataactcaacttccagatattcaagaaaaacttcaccagcttcaaatggagaaattgccgtctcgtaaagcaatcacagaaatgattagctggatgaacaatgtggagcatcaaacttcagatgaagactccgtgcattcaccaagttctgcatctcaagttaaacatcttcttcagaagcacaaggagtttagaatggaaatggactataaacagtggatagttgacttcgttaaccagtcattacttcagctaagcacctgtgatgtagaaagcaagcgctatgaaagaacggagtttgcagagcacctgggggagatgaaccgccagtggcaccgtgtacatggaatgctgaatagaaagatacaacatttagaacaacttctagaaagtatcactgagagtgaaaataaaatacagatcttgaacaactggctggaagcacaagaagagagactgaaaactttacaaaaacctgaaagtgtgatctcagtgcagaagctgctcctggactgtcaggatatagaaaatcaacttgcaattaaatccaaagcactagatgagttgaaacaaagttatctgactttggagagtggggcagtgccattgttagaagatacagcatcccgaattgatgagttatttcaaaagagaagcagtgttctcactcaggtcaatcagctcaaaacctccatgcagtcagttttacaggagtggaagatttatgatcaactctatgatgaagtgaatatgatgacaatccgattctggtactgcatggaacacagcaagcctgtggtgttatcattggagaccttgagatgccaggtggagaaccttcagtctctgcaagatgaagctgagagcagtgaagggagttgggagaaactccaggaggttatcggcaaactcaaaggtctctgcccctctgttgctgaaataatcgaagagaaatgccaaaatactcataaaaggtggactcaggtgaaccaagccattgcagaccagttgcagaaggcccagagtctgctccagctctggaaggcctatagcaatgctcatggtgaagctgccgcaaggctgaagcagcaggaagcaaagtttcaacagctcgcaaacatcagcatgtctggaaacaacctggcagagatcctgcccccagccctgcaggacataaaggagctgcagcatgatgtgcagaaaacaaaagaagcctttctccaaaattccagtgtcctggatcgactcccacaacccgcagagtccagcacccacatgctcctcccgggccccctgcactctctccagagggctgcttatttggaaaagatgctgcttgtgaaagcaaatgaatttgagaatcatgtgctggcactgacagcccaatcacctgatattgaacatttgaatgaagtgagcctcaagctcccacttagtgacgtagctgtgaagacgttacaaaatatgaaccggcaatggattcgggccacggccacggcactggagcgctgcagtgagcttcagggaattggattgaatgaaaagtttctttattgctgtgaaaagtggatccaacttttggagaagatagaagaagcactcaaagtggatgtggctaacagccttcctgagctcctggagcagcagaaaacctataagatgttagaagctgaagtttctataaaccagacaattgctgattcctatgtcacccagtccttacaactcctggacacaacagaaatagagaacagaccagaatttattacagaattctcaaagctgacggatcggtggcagaatgctgtccagggtgttcggcagaggaagggtgacgttgatgggctgaacgcccatgtagccaggtgtggtggcgcatctcttaaaaaacaggaccttcgctactctctgcacactgcctgcggagcggccctgctctgcaggagcagtcacggagctaataaagaaattcattttcaaaggaggcgaactacctgtgccctaaccttggaagctggagaaaagttactgctcacaactgacctgaaaactaaagagtctgtgggtaggagaatcagtcaacttcaggacagctggaaagacatggagccccagctggcagagatgattaagcagttccagagcactgtagagacctgggaccagtgtgaaaagaaaatcaaggagttgaaaagcaggctgcaagttttaaaggcacaaagtgaagatcctcttccagagcttcacgaggacctccataacgaaaaagagctgattaaggtggccatacgtaaacaggagattgaagacagactcaatacatgggttgtattcaatgaaaaaaataaagagttgtgtgcctggctggtgcagatggaaaacaaagttctacagacagcggacattagtattgaagaaatgattgaaaagttacagaagagaacagttggaagagaggaggttccagagagatgggagtgtgagaccattgtcagtgggcatggtaccgaggagagttgctttctctccattagaaagtttcaccagggaaggggcttacatatccttacatgtcagctgataccccaagactgcatggaagaaataaacttgtttagtgaaaacaagttacagttaaagcagatgggtgaccagttgatcaaggccagcaacaaatcaagagcagctgagatcgatgacaagctcaacaaaattaacgatcgttggcaacatctttttgatgtcatcggatcaagtatggcagatcagacaaactccaggtggatgttttttcagtggccacgtggcatacagcgaaccgtcacttggccttgggaccacttgtgcagctgtgcttccactggccacacgggtcctttccatagcagtgtgctcagatgttttgaacaacacatagaatttggaatatacaggagaacctataaggtgaataaagaattgggaggtgataaaaacggacagagatgccccataatctacccgcatgggctggttcaatgtatacggctgggtgaacccctcatactgaagcgggtgaagaagctgaaggagacctttgcttttattcagcagttggacaaaaacatgagcaaccttcgcacctggttggctcgaattgagtctgagctttccaagcctgttgtttatgatgtctgcgatgatcaagagatccagaagaggctcgctgagcagcaggatctacagcgagatattgaacaacacagcgcaggggtggagtccgtgtttaacatctgtgacgtcctactgcacgactccgatgcctgtgcaaatgagaccgagtgtgactcgatccagcagaccaccaggagcctggacagacgctggaggaacatttgtgccatgtccatggagcggcgcatgaaaatcgaggagacgtggcgcctgtggcagaagtttttagacgactattctcgctttgaggactggctcaagtcagctgagaggacggcagcctgcccaaattcctcagaggtgttgtacacgagtgccaaagaggaactgaagaggtttgagcggcagattcatgagcggctcactcagctggagctcatcaacaagcagtaccggcggctggcccgggagaaccgcacagacacggccagcaggctgaagcagatggtccacgagggcaaccagcgctgggacaaccttcagaggcgggtcacagccgtcctgcggagactcaggcatttcaccaaccagagggaagaatttgagggcaccagggagagcattctggtgtggctcacagagatggacctgcagctgaccaacgtggagcacttctcagagagtgacgccgatgacaagatgcgccaactgaatggcttccaacaggaaattacattaaataccaacaagattgatcagctcattgtgtttggggagcagctgattcagaagagcgagcccctggatgctgtgctgattgaggatgagctggaggaactccaccgctactgccaggagggcttggaagatgaaaaggaggcctctgagaatgaaacagacatggaagaccccagagaaatccagactgattcttggcgtaaacggggagagagcgaggaaccgtcatctcctcagtccctgtgtcatctagtggccccagggcacgagcggtctggctgcgagacccctgtcagcgtggactccatccccctggagtgggaccacacaggcgacgtggggggctcctcctctcacgaagaggacgaggagggcccatactacagcgcactgtcaggtaaatccatttcggatggccactcgtggcatgttcccgacagcccttcctgtcccgagcatcactacaagcaaatggaaggtgacaggaatgttccacctgttccccctgcgtccagcaccccttataaaccaccctatgtaagtcttaacttcactgggagtacagcctatgtctgtgccttcgacagatgggagatgattcaagcacaggagcttcacaataagctcaaaataaaacaaaatttgcaacagctgaactctgatatcagcgccatcactacttggctgaaaaaaactgaagcagagctggaaatgttaaagatggcaaagcctccctctgatatccaggaaatagaactgagagtgaagagactgcaggagatactgaaagcctttgacacttacaaggcattagtggtctctgtcaacgtgagcagcaaggaatttctgcaaaccgagagccccgaatccacagagctccaaagtagactccgccagctgagcctgctctgggaagcagcacagggcgcagtggacagctggagagggggcttacgacagtcgctcatgcagtgccaggacttccaccagttgagtcaaaatctgctgctgtggttagcgagtgccaagaaccggaggcagaaggctcatgtcaccgatccaaaggcagacccccgggctctcctagagtgtcggagggaactaatgcaactggaaaaggagctggtagaacgtcaacctcaagtggacatgttacaggagatttcaaacagccttctcattaagggacatggagaagactgtattgaagctgaagaaaaggtgcatgttattgagaagaaactcaaacagttacgggagcaagtgtcccaagatttaatggccttgcagggaacccagaacccagcctcacccctgcccagcttcgacgaggtagactcgggggaccagcctcctgcaacatccgtgccagctccccgagcaaagtttctttacccagcagttcagagcagtgagaactacagaaggcgaggaggagacagagagcagggtccccggcagcacacggccacagcgctccttcctctcaagggtggtccgggcagccctacccctgcagctgctcctcctgctgctgctgctcctggcctgcctgctgccctcctccgaagaagactacagctgcactcaggccaacaactttgcccggtccttttaccccatgctgaggtacaccaatgggccaccccccacatagagggcatagctggccacagtgctacaccacctgcctga

SEQ ID NO: 185341 - DNA, 3275 bp, Homo sapiens
  Payload ID: 16496
  Gene Symbol: SYNE3
  Gene Name: spectrin repeat containing, nuclear envelope family member 3
  Uniprot ID: Q6ZMZ3
  ENST ID: ENST00000334258
  CDS Start-End: 16-2943
gcccctgcaggtgccatgactcagcagccccaggacgactttgacaggagcgtggaggatgcccaggcatggatgaaggctgtgcaggaccagctgcaggtcaatgacaacacgcagggaccccgcgcggccctggaggccaggctgtgggagaccgagaaaatatgccagctggagcccgaggggcgtgtgagggtggacctcgtgctacggatggctgaagccctcttggcatgctgccctggggaccagaagcccgggatcctggcccggctgaaggacatcaaggcccaatgggaggagacagtcacctacatgactcactgtcacagccgcatcgagtgggtgtggctgcactggagcgagtacctgctggcccgagatgagttctaccgctggttccagaagatgatggtcacactggagccccacatcgagctccagctgggcctgaaggagaagcagtggcagctgagccacgcccaggtgctgctgcacaacgtggacaaccaggcggtgctcctggaccggctgctggaggaggcagcctccctgttcaacaggatcggggaccccagcgtggacgaagatgcccagaagagaatgaaggctgagtacgatgcagtgaaggccaaggcccagaagcgtgtagatctgctggagcaggtggcccgggagcatgaggagtaccaggcaggtgtggacgagttccaactgtggctgaaggcggtggtggagaaggtgaatggctgcctggggcggaactgcaagctgcccatcacgcagcgcctctccacactgcaggacattgccaaagattttcccaggggcgaggagtctctggagacgctggaggagcagtctgcgggtgtcattcggaacacctctcctttgggtgcagagaagatcaccggagaactggaagagatgaggaaagttctggagaagctgcgcgccctctgggaggaggaggaggagcggctgcggggcctgctccggtccaggggagcctgggagcagcagattaagcagctggaggctgagctcagtgagttcaggatggtcctgcagaggctggcccaggagggcctgcagcctgcggcgaaagcggggaccgaggacgagctggtggcacactggagacgctactcggcaacacgggcggcgctggcctcggaggagccccgggtggaccggctgcaagcccagctgaaggagctcatcgtcttccctcacaacctgaagccactctctgatagtgtcatcgctaccatccaggagtatcagagcctgaaggtgaagagcgcgaggctgcgcaatgccgcggcggtggagctgtggcagcatttccagcggcctctgcaggatctgcagctgtggaaggccctggcccagcggctcttggaggtcactgccagcctgccggacctgccttcccttcacaccttcctgccccagatcgaggcagccctgatggaaagctcccgcctgaaagagctgctgacgatgctgcagctgaagaaagacctcctgattggcatctttggccaggagagagccacggcactcctggagcaggtggcaggttccatgagggacagagacctgctgcataacagcctcctgcagaggaaaagcaaactgcagagcctgctcgctcagcacaaagactttggagcagcttttgagcccctgcagaggaagctcttggacctccaggtcagggtccaagccgagaaggggcttcagcgggaccttcctggaaaacaggcccagctctcaaggttgcaggggctgcaggaagaggggctggacttgggggcacagatggaggctgcaaggcctctggtccaggagaaccccaaccaccagcacaaaatggaccagctttcctccgacttccaggccctgcagaggtctctggaggaccttgtggacaggtgtcggcagagtgtgcaggagcactgcaccttcagccaccagctgctggagctgcggcagtggatcgttgtgaccacgcaaaagctggaggcacaccggggagaggcgggcccgggggatgccgagtcccaagaggccgagtttgagaggctggtggcagaattcccggagaaggaggcccagctgtccctggtggaagcgcagggctggctggtgatggagaagtcttctccggagggtgctgccgtggtgcaggaggagctcagggagctggcagagtcgtggcgggccttgaggctgctggaagaaagtctgctgagcctcatcagaaactggcatctgcagaggatggaagtggattcggggaagaaaatggttttcaccaacaacatcccaaagtcaggatttctcatcaatcccatggatcctattcccaggcatcgtcgacgcgcaaatcttctacaggaagaagaagggagccatgaagatttctcccagctcctgaggaactttgggcagtggttgcaggtggaaaactccaagctggttagaatcatcgcaatgagaacttctacagctgaggacttgaggaccagaaaatcgaagctgcaggagctggaggctcgggtgccagaaggtcagcatctctttgagaacctccttcgtctcgggccagcaagggggacctcggatgagctggaagatctgcgctaccagtggatgctgtacaagtccaagctgaaggactctggccacctgctgacacaaagttctccaggggagccgactggattccaaaagactcggcggtggcgaggactgggctccctcttccggagggcgtgctgtgtggcgctcccactgcagctgcttctgctgctgttcctcctcctgctgttcctgctcccaatcagggaagaggaccgcagctgcaccctggccaacaacttcgcccgctccttcacgctcatgctgcgctacaatggcccaccacccacctaacccactggggcacacaggtgactttctcctccaacctccatcagtcccagggcccctcctgaggatgctcgccagggaaactggaaacaggggcagggcaaagactgcagagctgcatccatatcagtgctgtgtcagcgttcccagaagacacttactttttatacagtgttgtcttagtctatttatactaaatgtgtactacatgtgactagggaataatgtctagaatttttatatgatctgtatgtaaatgctcagtatgtataatttcatatacgagttctatttggagttgggaaaattcctagcaatggctccctccaatggga

SEQ ID NO: 185342 - DNA, 13488 bp, Homo sapiens
  Payload ID: 16496
  Gene Symbol: SYNE3
  Gene Name: spectrin repeat containing, nuclear envelope family member 3
  Uniprot ID: Q6ZMZ3
  ENST ID: ENST00000557275
  CDS Start-End: 16-2928
gcccctgcaggtgccatgactcagcagccccaggacgactttgacaggagcgtggaggatgcccaggcatggatgaaggctgtgcaggaccagctgcaggtcaatgacaacacgcagggaccccgcgcggccctggaggccaggctgtgggagaccgagaaaatatgccagctggagcccgaggggcgtgtgagggtggacctcgtgctacggatggctgaagccctcttggcatgctgccctggggaccagaagcccgggatcctggcccggctgaaggacatcaaggcccaatgggaggagacagtcacctacatgactcactgtcacagccgcatcgagtgggtgtggctgcactggagcgagtacctgctggcccgagatgagttctaccgctggttccagaagatgatggtcacactggagccccacatcgagctccagctgggcctgaaggagaagcagtggcagctgagccacgcccaggtgctgctgcacaacgtggacaaccaggcggtgctcctggaccggctgctggaggaggcagcctccctgttcaacaggatcggggaccccagcgtggacgaagatgcccagaagagaatgaaggctgagtacgatgcagtgaaggccaaggcccagaagcgtgtagatctgctggagcaggtggcccgggagcatgaggagtaccaggcaggtgtggacgagttccaactgtggctgaaggcggtggtggagaaggtgaatggctgcctggggcggaactgcaagctgcccatcacgcagcgcctctccacactgcaggacattgccaaagattttcccaggggcgaggagtctctggagacgctggaggagcagtctgcgggtgtcattcggaacacctctcctttgggtgcagagaagatcaccggagaactggaagagatgaggaaagttctggagaagctgcgcgccctctgggaggaggaggaggagcggctgcggggcctgctccggtccaggggagcctgggagcagcagattaagcagctggaggctgagctcagtgagttcaggatggtcctgcagaggctggcccaggagggcctgcagcctgcggcgaaagcggggaccgaggacgagctggtggcacactggagacgctactcggcaacacgggcggcgctggcctcggaggagccccgggtggaccggctgcaagcccagctgaaggagctcatcgtcttccctcacaacctgaagccactctctgatagtgtcatcgctaccatccaggagtatcagagcctgaaggtgaagagcgcgaggctgcgcaatgccgcggcggtggagctgtggcagcatttccagcggcctctgcaggatctgcagctgtggaaggccctggcccagcggctcttggaggtcactgccagcctgccggacctgccttcccttcacaccttcctgccccagatcgaggcagccctgatggaaagctcccgcctgaaagagctgctgacgatgctgcagctgaagaaagacctcctgattggcatctttggccaggagagagccacggcactcctggagcaggtggcaggttccatgagggacagagacctgctgcataacagcctcctgcagaggaaaagcaaactgcagagcctgctcgctcagcacaaagactttggagcagcttttgagcccctgcagaggaagctcttggacctccaggtcagggtccaagccgagaaggggcttcagcgggaccttcctggaaaacaggcccagctctcaaggttgcaggggctgcaggaagaggggctggacttgggggcacagatggaggctgcaaggcctctggtccaggagaaccccaaccaccagcacaaaatggaccagctttcctccgacttccaggccctgcagaggtctctggaggaccttgtggacaggtgtcggcagagtgtgcaggagcactgcaccttcagccaccagctgctggagctgcggcagtggatcgttgtgaccacgcaaaagctggaggcacaccggggagaggcgggcccgggggatgccgagtcccaagaggccgagtttgagaggctggtggcagaattcccggagaaggaggcccagctgtccctggtggaagcgcagggctggctggtgatggagaagtcttctccggagggtgctgccgtggtgcaggaggagctcagggagctggcagagtcgtggcgggccttgaggctgctggaagaaagtctgctgagcctcatcagaaactggcatctgcagaggatggaagtggattcggggaagaaaatggttttcaccaacaacatcccaaagtcaggatttctcatcaatcccatggatcctattcccaggcatcgtcgacgcgaagaagaagggagccatgaagatttctcccagctcctgaggaactttgggcagtggttgcaggtggaaaactccaagctggttagaatcatcgcaatgagaacttctacagctgaggacttgaggaccagaaaatcgaagctgcaggagctggaggctcgggtgccagaaggtcagcatctctttgagaacctccttcgtctcgggccagcaagggggacctcggatgagctggaagatctgcgctaccagtggatgctgtacaagtccaagctgaaggactctggccacctgctgacacaaagttctccaggggagccgactggattccaaaagactcggcggtggcgaggactgggctccctcttccggagggcgtgctgtgtggcgctcccactgcagctgcttctgctgctgttcctcctcctgctgttcctgctcccaatcagggaagaggaccgcagctgcaccctggccaacaacttcgcccgctccttcacgctcatgctgcgctacaatggcccaccacccacctaacccactggggcacacaggtgactttctcctccaacctccatcagtcccagggcccctcctgaggatgctcgccagggaaactggaaacaggggcagggcaaagactgcagagctgcatccatatcagtgctgtgtcagcgttcccagaagacacttactttttatacagtgttgtcttagtctatttatactaaatgtgtactacatgtgactagggaataatgtctagaatttttatatgatctgtatgtaaatgctcagtatgtataatttcatatacgagttctatttggagttgggaaaattcctagcaatggctccctccaatgggattttgtggtattgttgacttggtctgcagtcaaccctagaaagcaagaacaataacatgtcactttcatggcaacctcttctccaaagcgaatcccagaattcagatgtaatgaaaggcctctgagctgcaacgtggaagagcgccatagaccctcacttggtgcccagcgactcttgctttatgcgtaatgagaacaagtatgcttgtctagttttaacaaccacaaagagtagctgccacgtgtcagaagtagaaatggcaatgaccagaggcaggttcaatgatagcagtgacaagtgacagagtgatatcgagggagaaaaagaagagctgcagagagcagatccccgaactaagaaagcacagctgtgtggaggcattgcatgccggagccctaaccccagctctcagcggcttctgatcacacagacctatgaggactgtccctggtgatgacaccgagcccccatgaaacggtgagatcctgctctgtgtgtttcattcagggagaaagggaagaagacaagcttgatttttaagatttccatgcagaatggtgaggcacactcggtgggcagcacccactggcagtgcccaggaaagatgtgtttcctctgttgctcctggactgagttttcatcgtcgagagctcgagctgcaggtgagaagggaagcatctgccacgccaggggccagggatcgagggtccaggacagaggtgagagaatctgctttggagttcagcctgtctcaagggctctccttccgcttcccagaaaagactctggagacagcaggtctatggggccaagaaggtctcatgtgcatccccatatgggactagggcccaggccacccaaaaccaggccctctccagccaggtgtaggcgagctgggctccatgcaccacctgggctggggccgcggtgactccatgtgagttcccgaggccagaaactcatcccttccttgccagggaactctgggatggttcctaagtgctctacaactggatcatgtttttcctaaatcaacactaaattttcccctttaaaaaagtacttaatgcccactctctacaaatggattttgtctgttcaactacaaatacgaggggatttcctcggaccttctgtccggctttggaatcataaggtattatagacccagaaaggccctttaagtagaggggaaactgaggacctaagagggcctgatacccagcaccattgctgtctcacacacactgaccctttgcctttcactgtgagctctgcccttggggacccgggtcctaggcaactaggacatttcaccggcaggaaacccgtgctgccaaggagagcccttggggctgactcagaaagcgtacttttttttttcttttaactcgtctgtatttgttacaactttaagcagaatgtgacttgggcactatatttccatccacaagcctggctctgagttattattattattgttattataattattttgagatggagtttcgctctttttgcccaggctggagtgcagtggtgcgatctcggctcactgcaacctccgcctcccagattcaagcgattctcctgcttcagcctcccaaatagctgggattacaggcatctgccaccatgcccagctaatttttgtatttttagtagagttagggttttaccatgttggccaggctggtctcgaactcctgacctcaggtgatccgcccacctcagcgtcccaaagcactgggattacaggcatgagccaccatgcctggccatttttttttttttttgaatagctttatgataagctgtaggcttataattatgctcctccaaacaacacttttctttggaaaacaagccctgtagactctccatccttccatcaagttccttccctcaagctgcttcagtttaacttatttctacaagactagtacatgcagaattggcaactacaggggatgaaaagttcaaaaagtagatcctacaaccctgtgacttggtttccaaatatctagagaaatttgtgatttcatggaagaagagaaagcacacttttctccagatatctggaaaccaagccatagggccgttctctgcaggcgaccaccttactggaaaatcaggagctgagtgagcccaggcagccaagcccagatgtccagtcctggaagtcagagcagtggcagggtgggtgggtgggggggccttgccaggtgtccactttcctatgtcacaggtgagaaagctgaggcccagaatggggaagaaactgatccatggccacacagtgagaggcagcaaggccagagcccaactggccaccatggccctcaggtggtaccctgctcattgtggtatgatccgctcatgtcagcaactacatgaaaaaaacagccactgggcatgtatgcagcctgtcacatataccacatgttggggaaggagaagctggaacatgcgggcgggggtgggaatatctacctatattttttaaattttgataatgatgccatcaagtctgtttgtttgcataactgttttttaaaaaagaattgatattttcagtattttcatataaatatacttgtaatataacgtaacagcccagttactggtgcttccaagcacaagtgcaatctcctttgcttaaaggagagccaggcaattattcttatgactttagtttccagcctctttaacagccatgcagagctttaaggtgctacttgagaaaggtggcgctgtggcgtgtgtgtgtgtgtgtgtgtgtgtgtgtgtgtgtgtgtgtgtgtgtcagagagagagagaggagggaaggagaggagggagaaaggaccaccagtgggtcggttgatgaattagttatccctgcttacctgtccctcccacccctttctttcttagcccgttctctgcatgtggaaaggcacatgcagcacccagagggtgtttaaaaagaaaagctgggagcgggagggatgggcaggtactgacagcagacgaggcgaggagaccctgggaggtgcccagtggtggcgggacagagggaacaccgacaagggagacaaagaatgtgctcgtttggtgctcgtgggtgcttgagccccttgggcggcactttgcagccttgctttatgtaattcccacatcgacacctgcccccagggtttgatactgttttacccccatgtttgagatggaaccctgaggcttaaagatataaagacccttgctcatgctgaagtgggtccaaacccacaacatggggcaatgaggaccccaaagcccaggctggaggggggcttcaggctggttctaccaggttgcagtctctgtagcctctgggaatggagttccctgggcaagcaggcagaactctctgcccatcagctcgcctgggacatggccagagcggagcatccaaatgtttccctgagggactgccctcagctctgagatgagtcaccaccagcagcacattcccttgggccatctatcattatcttcacattgctcacctggaagatgagcccctctaatgtctcatgatgaggtcctcggtcatgaatgacagaactccacacccccaatgcccagcacaggataagagcttcagctgtggtttgttgaattacattaaaaacccaaaggcaaatgtgtttcctgacacccgactcccttccagaggaaatgggtcaaggatgacctgacccaattccatctctcaggccccgtttgcttcaggcagctggctggagttccctgcagggaccgggggtccaaagatgcttgtctccgggcatcttcaggggaaggaagctggggaccctctgcaccctgggggccaaggagaatgacaggcagagggcaggaaaaggcctgaaggcgggtggtttgtgctggatgttccctaatggattttacagctggcaaactgggaccggtggcatcatcctgccctgccttgcaggggatgggaggctggggctgcccacagttagggagtaaagaggggatcttatctcttccattagactggagccaggcctgactgggaagctgggaggctttgcagaagctttgaggaactgcactttatggtggtctggctggagagggcggacggggaagtgggccagagggagtcaaaggccagaggtgatgtcaggcttgatttactgaactgtgtgcttaaaagtggttaagatgctaaattttatgttatgtttattttaccacaatttgagggtgagaggagagagtgagagcaaaagagacagagagaagagagagaaaaggaggaagggagggagggagggagggatagagagagagaaaaagagaatgggaatggcaggctgtgccttcatggttcccaactttcctctgaggacaagcgctagtggcaaagctttcactgaccaaaggcaagtgaaacaatacgagggaacaacttgagtttttctttccataggatttattttgcccaaacgctggctcttcattctgggattatgtccctcctacttcaagggtgctcaatggcctttaggaaatgagggataggtaaaggtggctctgtcttctttgatggtttctattgtgttttgggagccctcattggacaaaataaaaagttgccaactctatgttggttttgctccccatacagtattcttcctggaaaaacatgctgtctgaaagtttgggaacccaggagatggttgggagaagagagcagcttgaggattgcttagtgcaggagtccccgagggagagaaggaaagagaaatgggaagagggacatcgtggaaagttgtggcaactgggttcaggggaggccaggagcctgccagctgtggcctctaaaaaaataaaacccaggtgctcactggccctgccttcccactggccattcggatgctgtccggggtctgcggctttctctcccctggttggtgggcagaagtgccctgtgcctctttgcatcttaatccaatgcaacaagcattctccagcctgtgccaggctttgtgctgggagattcggggtgaacaaagcccagtccctgccctcagggagcttgcagacgaagaaaagggtttgtgccattgaagatgcccaacgggattgcagtcattgcccttgactttgcccatctgcctttccagagggggcaggcccactgtcacagaaactggaagagccacacaggggagacagtgggagagctcggaacagggcatgagagtgtcttgctgcctcttggaggccaccattgtgactatgaaccataccgggcagaggaagtgggtcaaggaggccagggcagctgggccgggcagggagaggacctgggcatggcagaggaggggaaaatagactgacccagcctcaggaggtcagaagtgtgttgggctgtgctgggtcacagaacaacacagcttgggaggctcctggaggcttcaaggggaggcttaaggctaaggctgtggatgttgattgtcgtgtccattactagcccaattattagtctgtcttcctggtaaaaatgtgtggttggaaatgccaaactgagaagcccacttttccccactggggatcatctgggttggcgtgtccatgctcaaggataatctcttgccctttcctgccccctgcctaggatttctccccagaggagaggagctgagggacccccccagggaggctgtgcctgtggctgtcaccctatgatgccagcggcttcctttggattctgtaatcagagtgtttttcaccggtgtctgcagtgattgccaggaagcctctgtgtccatagcccagcgggatcctgccctaattccctctctcatgggcactcagctaattctcaccccaatctcattgtcaccagtctaggtcagcattggagggaggtgtgggcaactacagcccttgctgcttccaagacagacatcaaaatagttgatcaccaacctttcccactccccactctctgacccaatggacctcacagtcctcaaaactactccaagctactgccaatcaatcattttcttatgtgagcaaaacctgtttgacatccttacacctgtaccagccctctcagaaagctctcaattctggtctccttttcttttttctttttttttttttgaatttatgttaaaattaggatgttcccaatcaaaaaatcatttttccttcatctagtaattgggtgagacaaactagccccagaaagcagacaatgggatgaactgccaagtaggacttttaggggaggcaaaatggattaggaaatgctaagttctctgttgaaggaggatacctggattcttcaggctgtcagagttggagggcttccatagactgtcttgttccaactttgtacccattttacaggttaggactctgagacctcagcagttcttgtttggccagtgagctcagggagttagttccaggagtgggggtcggtctctgcacccactggatgacagcttgatactgctcagcactagacagggttgagttggaactctgctgctgatgggctgtgtgacattggtccagttccttaccacctccccccacctattggtaaggagggaagtcagccctggagcgttcagtgctccctgaaatattaggtatcctaggattgtgcgcgtgggctcgcatctggaagagaaatccctagattcagccacgagtaacagaatccctcctcccccgaccaactttggcttaaaccagtcagagactttacttttctctcctcctgagaagtctagatataggcggttgctggcatcgtctcctcaggttatggatgtcagagccaaggctttgcaactgtccttcctttatatcacagtcacttcatggcccaggatgcttgctgtacctccaatttttcatctgggttccaggtaggaagaaggggagtgaactagacgaatctgccctcctcattagcagctttcccagaagctccaccagccacttccgttctcatctcattggccaggactgtgtcacatgttttcccccacatctgcaaggagtctgggaacatgtgccccaaaaagatgggggctcttctagtaagaatgaagggtagggtggcttggagtggcacttcgctgtctctgctacaattggaggagaaaaccagagtttgtcctgaccctccatgccttggctgtatgctccttgtgtggaactcgaaggcatcatccttgcagtgtgagagtgacctgccaccacggcctgccacctcctctcaggggaccctgagtccttcaggtctacccaaaggcattgtagacattcttcctgcaaggcttgggaaccgacaaatagatctgcccagcttgccagagtttttgtgcaggaacagcccctcccgtctttgtcctggcggtgagcacccagggctaagcttttgaacactttctttgtgtttggattcagcccaggcaatgcatatttgctttcatttcttcttgagcttgaggagctcctgggtgcaaatcttggaaaatgaggatctctgagcctttccaggccagctctttgttttgtagcagacaattgaggctttgaaaaggaaagtgggtgggggcaccccacaggtggccctcatcacccaattgccagtgcctgcaggctgcttcagcagaggcccagagtcaaagaggacttaaaaccagctgtcgtttctcccttagcttctgtgtatgagagaaacgacttctgtttttcaaagtaagaacaaggaggaatttgtttctaaaagaacattaaaacacaggctcgtggtctaaaagcaaatggttcagcaggatgttcagggccttaaagcacagtcagcaggactcagcatctcccagcacctgctctccggttgtcatggtaacatcatccccaacccaaccaccttgtccagccgagagacagcaatcataaggagggacctcggtttcccccgaggatcctgggcttcctttctgaaacgcttgcttctgagctcagcaaccaggaacaccaggccagcccatccccagcacctctgtggagatgagggacaaagtcctacagtccctcttcctgttctgatgagaaagggagggaagaaaacataccccgagcgcctgcaatatggtcatgacactttcaaaaagcctgtgctatggagtcatgatcagaaaccagagtgtggagagggtcagcagcctgcctcagagcagccagctaggcggggagtggtaaatttgggacttgtacccaggcatgactggctccgagcccagtgctccactctatggaatgttccctgggcctcagttgctttcctttcctttgcaggccgcgggctgctgccactctggcagctggtgagttagctggagggcaacattccaaagcaggggcagcatgctgctttcctcctgtgcccactcctgcggggaagtccgttgactcccaccgctgaagggagctggcaacaccaggatgaggtcccaggggacgggagcaggtacccactgtctgtctaccttcccactggaaaagcacggacaggccagcccttgcgggggcaggcagaggacagagttggctttgcgcggtctctgcctgctgagcagttccaattcctctcatgggagaaacaaggaggcagtcgcttgtgcatgttccagaagttttactggggaggaggaagcggacagaggaagctgtgtgtgcatgtgaaggggtgggcagggtgggagggatgcacgcgtatgtgagcatagcatgtgtgagtactacacacatctccatgcagaagcacaactgggcagccctggcttccagctctgggcttcagcacaacagacaccagcctgtggtctctcagaagccagggagaccacatcgggctcaggacgttttacccaaagtccagagtttttatgcctctccctggcattctccataaagaagggaaggtcagatgaccccttagatctgtgtcatctgggaatttccttgggctggtttagacacgatgccctctttttctcaggatagcagataacctgctttgaaagagggcttaattctgtgggtcctaaattttctcctttctctctctctttctgtgtgtgtgtgttgggaaaatggcaagtttccaataccagctttggaggaacgattacgttttccctccaatttcaagtccgaaagaccagagccctcattccaaagccccccacccagatggattttttcgtttcatttgtcatccgtcccatgggagggccccatgtctcctcagaacccatcctggaggcagcaggtcgggtagagtgagtttggcctgctcatgacctccacccctgagattgtgaacaaggatgtctggggcgatgctgagaatgtttttgaagctgctcccagatgacgctgatgatcacaccagattgagtgctgcgatcgccttgagtccaacctctgcataaacgaggttctcataaacaagttcactctaccctaagctaagtctatgtgagcaaacccacttcatcctttgtacctggagacctggttacactaacctgatactgacctgttcatgtagctggaatggtgtgtttcatgcagtgtggaccaagcaatggcatggggtgtgtgtgtgtgtgtgtgtgtgtctgtgtgtgtgtgtttgtgtatgcgttcacacttgtgtgtgtatatgtgcatgtagatgctgcataaatgatttttgatgtcaaagacaaacacattccattgttttaaatattctattatgtaaacaatacgcagagggaccatatctactcttgtcatattatttgtgatggtaaaacatgcatttgcaataaattaagctttctgggaaggcaagcagtattggagccaaacgactgtctcggaacatgtgtgtgttatctcggttcatatcaagtccaaagctaatggagccttccccgccatccagggaggaacaccaggaccccggagtttcttcttagtgctatattttaaagttgcattgacgttttcctccccttccttttgtgcaagttggaagtagcagtgttctaaaagatggtttgacgtttttgctgttgttttatgtttttaaaaatgtatctgctttgtgtttggaaataaaaatctctattttggtctatgaaa

SEQ ID NO: 185343 - DNA, 2615 bp, Homo sapiens
  Payload ID: 16496
  Gene Symbol: SYNE3
  Gene Name: spectrin repeat containing, nuclear envelope family member 3
  Uniprot ID: Q6ZMZ3
  ENST ID: ENST00000553340
  CDS Start-End: 16-1806
gcccctgcaggtgccatgactcagcagccccaggacgactttgacaggagcgtggaggatgcccaggcatggatgaaggctgtgcaggaccagctgcaggtcaatgacaacacgcagggaccccgcgcggccctggaggccaggctgtgggagaccgagaaaatatgccagctggagcccgaggggcgtgtgagggtggacctcgtgctacggatggctgaagccctcttggcatgctgccctggggaccagaagcccgggatcctggcccggctgaaggacatcaaggcccaatgggaggagacagtcacctacatgactcactgtcacagccgcatcgagtgggtgtggctgcactggagcgagtacctgctggcccgagatgagttctaccgctggttccagaagatgatggtcacactggagccccacatcgagctccagctgggcctgaaggagaagcagtggcagctgagccacgcccaggtgctgctgcacaacgtggacaaccaggcggtgctcctggaccggctgctggaggaggcagcctccctgttcaacaggatcggggaccccagcgtggacgaagatgcccagaagagaatgaaggctgagtacgatgcagtgaaggccaaggcccagaagcgtgtagatctgctggagcaggtggcccgggagcatgaggagtaccaggcaggtgtggacgagttccaactgtggctgaaggcggtggtggagaaggtgaatggctgcctggggcggaactgcaagctgcccatcacgcagcgcctctccacactgcaggacattgccaaagattttcccaggggcgaggagtctctggagacgctggaggagcagtctgcgggtgtcattcggaacacctctcctttgggtgcagagaagatcaccggagaactggaagagatgaggaaagttctggagaagctgcgcgccctctgggaggaggaggaggagcggctgcggggcctgctccggtccaggggagcctgggagcagcagattaagcagctggaggctgagctcagtgagttcaggatggtcctgcagaggctggcccaggagggcctgcagcctgcggcgaaagcggggaccgaggacgagctggtggcacactggagacgctactcggcaacacgggcggcgctggcctcggaggagccccgggtggaccggctgcaagcccagctgaaggagctcatcgtcttccctcacaacctgaagccactctctgatagtgtcatcgctaccatccaggagtatcagagcctgaaggtgaagagcgcgaggctgcgcaatgccgcggcggtggagctgtggcagcatttccagcggcctctgcaggatctgcagctgtggaaggccctggcccagcggctcttggaggtcactgccagcctgccggacctgccttcccttcacaccttcctgccccagatcgaggcagccctgatggaaagctcccgcctgaaagagctgctgacgatgctgcagctgaagaaagacctcctgattggcatctttggccaggagagagccacggcactcctggagcaggtggcaggttccatgagggacagagacctgctgcataacagcctcctgcagaggaaaagcaaactgcagagcctgctcgctcagcacaaagactttggagcagcttttgagcccctgcagaggaagctcttggacctccaggtcagggtccaagccgagaaggggcttcagcgggaccttcctggaaaacaggcccagctctcaaggttgcaggtgaggggtctgtgaggcctgaatcactcctgcccaggtgctcagctgcacctggaagcagcgtctccctctagcagtaaccagcaaagcaacagctgccgtgagccagaaatttagacccttagttgagatctgacctttcacctcaacagaacctctgcttatttatctgatggttcctgacctcaaacaactgagtcttgagctcagcaaaatgacaaactgtctttctgtttactcctcagttccaaagtctaacattggtatttgtttttagaattgctttgctaagtattcttaatgagtccagaggtgttcagttaaaccaactttgggattaagaataaatgttctgaaacgtggactgtaagtaggctgaccgttgatcattgttggctggataaggaacttgatggttttttaaaatgcgcgtgatacaatagttctctctttaaaacccaagcacagctcatacataaattgagagtgttctctagaagacattaaaaatagtgcattttaggccgggagcggtggctcacgcctgtaatcccagcactttgggaggtgagcagattgcctgactttaggattttgagatcagcctgggcaacatggtgaaaccctgtctctacttaaaataaaaaattttttttaaaaaagcaaaaaatttagccaggcgtggtggcgggaatctgtaaccccagctacttgggaggccgaggcaccagaatcacttgaacccaggaggcagaggttgcagtgagcccacattgtgccactgtgctccagcctgggcgacagagtgagactctgtctccaaa

SEQ ID NO: 185344 - DNA, 2826 bp, Homo sapiens
  Payload ID: 16496
  Gene Symbol: SYNE3
  Gene Name: spectrin repeat containing, nuclear envelope family member 3
  ENST ID: ENST00000554873
  CDS Start-End: 406-2604
aaaaaaactgatgattatttatttagaaagaaaacatatcactgtcataaatggaaaagatggtgccaattccaaataggtagataaccacacaaataaatacaatgaaaccgaacggagccatttggttctatttggctccacactgtttccagctgaaggcatggaaaggaagataaacaaatgtcagaaagtgttcaagacagaagcacccaacagagactttctccttgacttaatcaaatggcttgaaaaagacttatggggaaggaatagggttctcaggttgtgagtccatgctacttaaggcagacagtccagcccttgggaaggcccctctctggctctaacgcaggactccaggaatcagtgttttgcagggcagtcccaggtctgctctggaaaatgcagcaactgtattctttttccctgcctgtttttccctcacccctctaccctcttcaggacattgccaaagattttcccaggggcgaggagtctctggagacgctggaggagcagtctgcgggtgtcattcggaacacctctcctttgggtgcagagaagatcaccggagaactggaagagatgaggaaagttctggagaagctgcgcgccctctgggaggaggaggaggagcggctgcggggcctgctccggtccaggggagcctgggagcagcagattaagcagctggaggctgagctcagtgagttcaggatggtcctgcagaggctggcccaggagggcctgcagcctgcggcgaaagcggggaccgaggacgagctggtggcacactggagacgctactcggcaacacgggcggcgctggcctcggaggagccccgggtggaccggctgcaagcccagctgaaggagctcatcgtcttccctcacaacctgaagccactctctgatagtgtcatcgctaccatccaggagtatcagagcctgaaggtgaagagcgcgaggctgcgcaatgccgcggcggtggagctgtggcagcatttccagcggcctctgcaggatctgcagctgtggaaggccctggcccagcggctcttggaggtcactgccagcctgccggacctgccttcccttcacaccttcctgccccagatcgaggcagccctgatggaaagctcccgcctgaaagagctgctgacgatgctgcagctgaagaaagacctcctgattggcatctttggccaggagagagccacggcactcctggagcaggtggcaggttccatgagggacagagacctgctgcataacagcctcctgcagaggaaaagcaaactgcagagcctgctcgctcagcacaaagactttggagcagcttttgagcccctgcagaggaagctcttggacctccaggtcagggtccaagccgagaaggggcttcagcgggaccttcctggaaaacaggcccagctctcaaggttgcaggggctgcaggaagaggggctggacttgggggcacagatggaggctgcaaggcctctggtccaggagaaccccaaccaccagcacaaaatggaccagctttcctccgacttccaggccctgcagaggtctctggaggaccttgtggacaggtgtcggcagagtgtgcaggagcactgcaccttcagccaccagctgctggagctgcggcagtggatcgttgtgaccacgcaaaagctggaggcacaccggggagaggcgggcccgggggatgccgagtcccaagaggccgagtttgagaggctggtggcagaattcccggagaaggaggcccagctgtccctggtggaagcgcagggctggctggtgatggagaagtcttctccggagggtgctgccgtggtgcaggaggagctcagggagctggcagagtcgtggcgggccttgaggctgctggaagaaagtctgctgagcctcatcagaaactggcatctgcagaggatggaagtggattcggggaagaaaatggttttcaccaacaacatcccaaagtcaggatttctcatcaatcccatggatcctattcccaggcatcgtcgacgcgcaaatcttctacaggaagaagaagggagccatgaagatttctcccagctcctgaggaactttgggcagtggttgcaggtggaaaactccaagctggttagaatcatcgcaatgagaacttctacagctgaggacttgaggaccagaaaatcgaagctgcaggagctggaggctcgggtgccagaaggtcagcatctctttgagaacctccttcgtctcgggccagcaagggggacctcggatgagctggaagatctgcgctaccagtggatgctgtacaagtccaagctgaaggactctggccacctgctgacacaaagttctccaggggagccgactggattccaaaagactcggcggtggcgaggactgggctccctcttccggagggcgtgctgtgtggcgctcccactgcagctgcttctgctgctgttcctcctcctgctgttcctgctcccaatcagggaagaggaccgcagctgcaccctggccaacaacttcgcccgctccttcacgctcatgctgcgctacaatggcccaccacccacctaacccactggggcacacaggtgactttctcctccaacctccatcagtcccagggcccctcctgaggatgctcgccagggaaactggaaacaggggcagggcaaagactgcagagctgcatccatatcagtgctgtgtcagcgttcccagaagacacttactttttatacagtgttgtcttagtctatttatactaaatgtgtactacatgtgactagggaataa

SEQ ID NO: 185345 - DNA, 1354 bp, Homo sapiens
  Payload ID: 16497
  Gene Symbol: SYNE4
  Gene Name: spectrin repeat containing, nuclear envelope family member 4
  Uniprot ID: Q8N205
  ENST ID: ENST00000324444
  CDS Start-End: 113-1327
ctgcagcctcaggcccgggtgactccagcggaggagctctgggacacccttgtctagggaagaggtcttactggctgccctcacctgactttgtgtccccaggcccccagccatggccctgtccctgcctctgggccctagacttggctcagagcccctcaaccacccaccgggagcacctagagaggcggacattgttggatgcaccgtctgccccgcgtccggagaggagagcacgagcccagagcaggcccagaccctgggacaggactccttgggccctcctgagcacttccagggtgggccaaggggcaatgagcctgccgctcaccccccgagatggtcaacaccctcttcctacgaggacccagctgggggcaaacactgtgagcaccccatttctggcctggaggtactagaggctgagcagaacagcctgcacctgtgcctgctggggctgggccgccggctgcaggacctggagcaaggcctggggcactgggcattggcccagagtgggatggtgcagctgcaggccctccaggtggacctacgaggggcagctgagcgtgtggaggcgctgctagcgtttggtgaggggctggcacagcggagtgagcccagggcctgggcagccctggagcagatcctgcgggccctgggagcttaccgagactccatcttccggcggctctggcagctgcaggcccagctggtcagctacagcctggtgttcgaggaggccaacacgctggaccaggacttggaggtcgagggagactcggactggccaggacctggtggggtctgggggccctgggcacccagtagcctccccacttccacagagttggagtgggatccggcgggggacattgggggccttgggcccttgggacaaaagacagcccggacactaggagtgccctgtgagctgtgtggccagagggggccccagggcaggggacaaggccttgaggaagcagacacctctcactcccgacaggacatgctggagtctggcctcggccaccagaaacgcttagcacgtcaccaaagacactccctgctccggaagcctcaggacaagaagaggcaagcatctcctcatctccaggatgtgaggctggaggggaatccaggggcccccgatcctgcatccaggcagcctctgaccttcctccttatcctcttcctcctcttcctcctcctggtgggtgccatgtttctcctgcccgcgtcaggaggcccctgctgctctcatgcccgaatacccaggacaccctacctggtgctcagctatgtcaatggtcttcccccagtctgatgtgtgtaataaatggtcactgtcaaa

SEQ ID NO: 185346 - DNA, 1004 bp, Homo sapiens
  Payload ID: 16497
  Gene Symbol: SYNE4
  Gene Name: spectrin repeat containing, nuclear envelope family member 4
  Uniprot ID: Q8N205
  ENST ID: ENST00000340477
  CDS Start-End: 102-977
ggcccgggtgactccagcggaggagctctgggacacccttgtctagggaagaggtcttactggctgccctcacctgactttgtgtccccaggcccccagccatggccctgtccctgcctctgggccctagacttggctcagagcccctcaaccacccaccgggagcacctagagaggcggacattgttggatgcaccgtctgccccgcgtccggagaggagagcacgagcccagagcaggcccagaccctgggacaggactccttgggccctcctgagcacttccagggtgggccaaggggcaatgagcctgccgctcaccccccgagatggtcaacaccctcttcctacgaggacccagctgggggcaaacactgtgaggtgttcgaggaggccaacacgctggaccaggacttggaggtcgagggagactcggactggccaggacctggtggggtctgggggccctgggcacccagtagcctccccacttccacagagttggagtgggatccggcgggggacattgggggccttgggcccttgggacaaaagacagcccggacactaggagtgccctgtgagctgtgtggccagagggggccccagggcaggggacaaggccttgaggaagcagacacctctcactcccgacaggacatgctggagtctggcctcggccaccagaaacgcttagcacgtcaccaaagacactccctgctccggaagcctcaggacaagaagaggcaagcatctcctcatctccaggatgtgaggctggaggggaatccaggggcccccgatcctgcatccaggcagcctctgaccttcctccttatcctcttcctcctcttcctcctcctggtgggtgccatgtttctcctgcccgcgtcaggaggcccctgctgctctcatgcccgaatacccaggacaccctacctggtgctcagctatgtcaatggtcttcccccagtctgatgtgtgtaataaatggtcactgtcaaa

SEQ ID NO: 185347 - DNA, 382 bp, Homo sapiens
  Payload ID: 16497
  Gene Symbol: SYNE4
  Gene Name: spectrin repeat containing, nuclear envelope family member 4
  ENST ID: ENST00000397428
  CDS Start-End: 28-382
agcacctagagaggcggacattgttggatgcaccgtctgccccgcgtccggagaggagagcacgaggaagcagacacctctcactcccgacaggacatgctggagtctggcctcggccaccagaaacgcttagcacgtcaccaaagacactccctgctccggaagcctcagggcccccgatcctgcatccaggcagcctctgaccttcctccttatcctcttcctcctcttcctcctcctggtgggtgccatgtttctcctgcccgcgtcaggaggcccctgctgctctcatgcccgaatacccaggacaccctacctggtgctcagctatgtcaatggtcttcccccagtctgatgtgtgtaataaatggtcactgtcaaa

SEQ ID NO: 185348 - DNA, 1175 bp, Homo sapiens
  Payload ID: 16497
  Gene Symbol: SYNE4
  Gene Name: spectrin repeat containing, nuclear envelope family member 4
  ENST ID: ENST00000490730
  CDS Start-End: 113-1175
ctgcagcctcaggcccgggtgactccagcggaggagctctgggacacccttgtctagggaagaggtcttactggctgccctcacctgactttgtgtccccaggcccccagccatggccctgtccctgcctctgggccctagacttggctcagagcccctcaaccacccaccgggagcacctagagaggcggacattgttggatgcaccgtctgccccgcgtccggagaggagagcacgagcccagagcaggcccagaccctgggacaggactccttgggccctcctgagcacttccagggtgggccaaggggcaatgagcctgccgctcaccccccgagatggtcaacaccctcttcctacgaggacccagctgggggcaaacactgtgagcaccccatttctggcctggaggtactagaggctgagcagaacagcctgcacctgtgcctgctggggctgggccgccggctgcaggacctggagcaaggcctggggcactgggcattggcccagagtgggatggtgcagctgcaggccctccaggtggacctacgaggggcagctgagcgtgtggaggcgctgctagcgtttggtgaggggctggcacagcggagtgagcccagggcctgggcagccctggagcagatcctgcgggccctgggagcttaccgagactccatcttccggcggctctggcagctgcaggcccagctggtcagctacagcctggtgttcgaggaggccaacacgctggaccaggacttggaggtcgagggagactcggactggccaggacctggaagcagacacctctcactcccgacaggacatgctggagtctggcctcggccaccagaaacgcttagcacgtcaccaaagacactccctgctccggaagcctcaggacaagaagaggcaagcatctcctcatctccaggatgtgaggctggaggggaatccaggggcccccgatcctgcatccaggcagcctctgaccttcctccttatcctcttcctcctcttcctcctcctggtgggtgccatgtttctcctgcccgcgtcaggaggcccctgctgctctcatgcccgaatacccaggacaccctacctggtgctcagctatgtcaatggtcttcccccagtctgatgtgtgtaataaatggtcactgtcaaa

SEQ ID NO: 185349 - DNA, 453 bp, Homo sapiens
  Payload ID: 16497
  Gene Symbol: SYNE4
  Gene Name: spectrin repeat containing, nuclear envelope family member 4
  ENST ID: ENST00000503121
  CDS Start-End: 1-453
cagagcccctcaaccacccaccgggagcacctagagaggcggacattgttggatgcaccgtctgccccgcgtccggagaggagagcacgagcccagagcaggcccagaccctgggacaggactccttgggccctcctgagcacttccagggtgggccaaggggcaatgagcctgccgctcaccccccgagatggtcaacaccctcttcctacgaggacccagctgggggcaaacactgtgagggcccccgatcctgcatccaggcagcctctgaccttcctccttatcctcttcctcctcttcctcctcctggtgggtgccatgtttctcctgcccgcgtcaggaggcccctgctgctctcatgcccgaatacccaggacaccctacctggtgctcagctatgtcaatggtcttcccccagtctgatgtgtgtaataaatggtcactgtcaaa

SEQ ID NO: 185350 - DNA, 7999 bp, Homo sapiens
  Payload ID: 16498
  Gene Symbol: SPTA1
  Gene Name: spectrin, alpha, erythrocytic 1
  Uniprot ID: P02549
  ENST ID: ENST00000368147
  CDS Start-End: 182-7441
tgtcgattgtgtatggctgatgggattctaggaccaagcaagaggtttttttttttcccccacatacttaacgtttctatatttctatttgaattcgactggacagttccatttgaattatttctctctctctctctctctgacacattttatcttgccaggttctaaacctttaggaaaaatggagcaatttccaaaggaaaccgttgtggagagcagtgggccaaaggttttggaaacagcagaagagatccaggagaggcgtcaggaagtgttgactcggtatcaaagtttcaaggagcgggtcgctgagaggggtcagaagcttgaggattcctatcacttacaagttttcaagcgagatgcagatgatctggggaagtggatcatggagaaagtcaatatcttaaccgataagagctatgaagacccaactaatatacaggggaaatatcagaagcatcaatcccttgaagcagaggtgcaaacaaaatcaagactcatgtctgaactggaaaaaacaagggaagaacgatttaccatgggtcattctgcccacgaagaaacgaaggcccatatagaggagctacgccacctgtgggacctgctgttagagctgaccctggagaagggtgaccagttgctgcgggccctgaagttccagcagtatgtacaggagtgtgctgacatcttagagtggattggagacaaggaggctatagcgacatcagtggagctaggtgaagactgggagcgcaccgaagttctgcataagaaatttgaagacttccaagtggagctggtagctaaagaagggagagttgttgaagtgaaccaatatgccaatgagtgtgccgaggaaaaccatcctgacctacccttaattcagtctaagcaaaatgaggtgaatgctgcctgggagcgccttcgtggtttggctctccagagacagaaagctctgtccaatgctgcaaacttacaacgattcaaaagggatgtgactgaagccatccagtggatcaaggagaaggaacctgtactcacctctgaggactatggcaaagaccttgttgcctctgaaggactgtttcacagtcacaagggacttgagagaaatcttgctgtcatgagtgacaaggtgaaggagttatgtgctaaagcagagaagctgacactttcccatccttcagatgcacctcagatccaggagatgaaagaagatctggtctccagctgggagcatattcgtgccctggccaccagcagatatgaaaaactgcaggctacttattggtaccatcgattttcatctgactttgatgaactctcaggctggatgaacgagaagactgctgcgatcaatgctgatgagctgccaacagatgtggctggtggagaagttctgctggacaggcatcagcagcataagcatgagattgactcttacgatgaccgatttcaatctgctgatgagactggtcaagacctcgtgaatgccaatcatgaagcctctgatgaagttcgggaaaagatggaaatacttgacaacaactggactgccctgctggaactgtgggacgagcgtcatcgtcagtatgagcagtgcttggactttcatctcttctacagagacagtgagcaagtggacagttggatgagtagacaagaggccttcctggaaaacgaggatctgggaaactcactgggcagtgcagaagcccttcttcagaagcatgaagactttgaggaagcctttactgcccaggaagagaagatcataactgtagacaagactgcaaccaaattgattggtgatgaccattatgattcagagaacatcaaggctatccgtgacgggctgttagcccggcgggatgccctacgtgaaaaggctgccactagacgtagattgctgaaggagtcattgcttctgcaaaaactgtatgaggactcagatgacctaaagaactggatcaacaagaagaaaaagttggcagatgatgaagattacaaggacatacagaacttgaagagcagggttcaaaagcagcaagtctttgaaaaggagttggcagttaataagacccagctggaaaacatacagaaaactggccaagagatgattgagggtggtcactatgcctctgacaatgtgaccactcgtctgagtgaagttgccagcctctgggaggagttgctggaggctacaaaacagaaagggacccagttgcatgaggccaaccagcagctgcaatttgaaaataatgcagaagatttgcagcgctggctggaggatgttgagtggcaagtcacctctgaggattatgggaaaggcctggccgaggtacagaatcgactcaggaaacacggcctcctggagtcggctgtggctgctcgtcaggatcaggtggatatccttacagacctggctgcatattttgaagaaataggccatcctgattctaaggatataagggcaaggcaagagtccttggtatgccgatttgaagctctgaaagagccactggccacccgaaagaagaagctcttagaccttctccatctgcagctgatttgtagagacacagaggatgaggaggcctggatccaagagactgaaccctcagctacttccacctaccttggaaaggacctgattgcttccaaaaagcttctgaataggcatagagtcatcctggagaacattgccagccatgaaccacgcattcaagagataacagaaaggggaaacaaaatggtagaggaaggacactttgctgcagaagatgtggcctctagggtcaagagtttgaaccagaatatggagtctctccgtgctcgagctgctaggcgacaaaatgatcttgaagccaatgtccagttccagcagtacctggctgacctgcatgaagcagaaacatggatcagagagaaggaacctattgtagataatactaactatggtgctgatgaagaagcagctggggctcttctaaagaagcatgaggcctttctattagatctcaattcatttggagacagtatgaaagctctgcggaatcaggcaaacgcctgccagcaacaacaggctgcaccagtggagggagttgctggagaacaaagggtcatggctttatatgacttccaggcccgcagcccccgagaagtcaccatgaagaaaggtgatgtcttaacgctgctcagttccatcaataaggactggtggaaggtggaagctgctgatcatcagggcattgtcccagctgtctatgtcagaagactggcccacgatgagttcccgatgctcccacagcggcgacgagaagagccaggaaacatcacccagcgccaggagcagattgagaaccaataccgctccctcttggatcgggcagaagaacgcagacgtcgtctattgcaacgttataatgaatttttattggcctatgaggcaggagacatgctggaatggattcaagagaaaaaggcagaaaacactggagtggaactagatgatgtttgggagctgcagaaaaagtttgatgagttccaaaaggatttgaataccaatgagcctcggctaagggatatcaacaaggtagctgatgatctactatttgaaggacttctaacaccagaaggagctcaaatccggcaggaattgaattcccgctggggttctttgcagaggcttgcagatgaacagcggcagctgctgggcagtgcccatgctgttgaagtgtttcacagagaagcagatgacacgaaggagcagattgagaagaaatgccaggccctcagtgctgcagaccctggctcagatctgttcagtgttcaggctcttcagcgacggcatgagggctttgaaagggacctcgtacccctgggagataaggtgaccatactgggggagacagcagagcggctcagtgagtcccatccagatgccactgaggacctgcagagacagaaaatggagctgaatgaggcctgggaagacctgcaggggcgtacaaaggatcgtaaggagagcctaaatgaggcccagaaattctacctgttcctcagcaaggccagggatctgcagaactggatcagtagcattggtggcatggtatcatcacaggagctggccgaagacttaactggcatagagatcttgctggagagacatcaggagcaccgtgctgacatggaggcagaggctcccaccttccaggccttagaggacttcagtgcagaacttatcgacagtgggcaccatgctagccctgaaattgaaaaaaagcttcaagctgtcaagctagagagagatgatttggagaaggcttgggaaaaacgcaagaagatcctagaccagtgcctggagttgcagatgttccaggggaactgtgatcaagttgagagctggatggtggcacgtgagaattccctgaggtcagatgacaaaagttccttagacagtctggaggctttgatgaagaaacgggacgatttggacaaagcaatcactgcccaggaagggaagatcactgacctagaacattttgctgagagcctcattgctgatgaacactatgccaaagaagagattgctacgcggctccaacgtgtactagacaggtggaaggctctcaaagcacaactgattgatgagcggacaaagcttggagactatgccaacctaaaacaattctaccgagaccttgaggagctggaagaatggatcagtgagatgctgcccacagcctgtgatgaatcctacaaagacgccactaacattcagaggaaatacctgaaacaccagacctttgcacatgaagtcgatggccgatctgagcaggtgcatggcgtcatcaacctggggaactccctgattgagtgtagcgcttgtgatggcaatgaagaggccatgaaggagcaactggaacagctgaaggaacattgggatcatctgcttgagagaacaaatgacaaagggaagaagctcaatgaggccagtcgtcaacagaggttcaacacaagcatccgggactttgagttctggctctcagaggcagagacattgctggccatgaaagatcaggccagggacttggcttcagcaggaaacctactcaagaagcatcagctattggagagagagatgttggctcgagaggatgcactcaaggacctgaatacattggctgaagatttgctctccagcgggactttcaacgttgatcagattgtgaagaaaaaagataatgtcaacaagcgtttcctgaatgtccaagaattggcagctgcacaccacgaaaaattgaaagaggcctatgccttgttccagttcttccaggatctagatgatgaggaatcctggatagaggagaagttgatacgagtgagctcccaggactatgggagagatcttcagggggttcagaacttgctgaagaagcacaaacgcctagagggggagctggtggcccatgagcctgccatccagaatgtgctggatatggcagagaagctgaaagacaaggctgctgtggggcaagaggagatccagttgcggctggctcagtttgttgaacactgggagaagctcaaagagttggccaaggcccgaggacttaagttggaagaatccctagaatacttgcaattcatgcagaatgctgaggaagaggaagcttggatcaatgaaaagaatgctttggctgtccgaggagattgtggagatacattagctgctactcagagcttgctaatgaagcatgaagctttggaaaatgactttgctgtccatgagacccgagtacaaaatgtgtgtgcacaaggagaagacatcctaaataaggtgttgcaggaggaaagtcagaacaaagagatttcttccaagatagaggctctgaatgaaaagaccccttctctggctaaggcaatagctgcttggaagttgcaattggaagacgattatgcctttcaggaattcaactggaaggctgatgtggtagaggcttggatagctgataaggaaacaagcctaaagaccaatggcaatggtgcagaccttggtgacttcctcactcttctggcaaaacaggacactctggatgccagtctgcagagtttccagcaagagagacttcccgagatcactgacctgaaggacaaactgatttctgctcaacacaaccagtctaaagccattgaagagcgttatgccgctctgctgaagcgctgggaacagttgctggaagcctcggcagtccacagacagaaattgctggagaaacagctgcctctacagaaggctgaggacctgttcgtggaatttgcacataaggcttcagctttgaacaactggtgtgaaaagatggaagaaaacttgtcagagcctgtgcactgtgtctccctgaatgaaattcggcagctgcagaaagaccatgaggacttcttggcctccctggctagggctcaagcagactttaaatgtttgctggagctagaccagcagattaaggccttaggtgtgccttccagcccttatacctggttaacagtggaggtgctggaaaggacctggaagcacctatctgacatcattgaggaacgggagcaggagctgcaaaaggaagaggcaagacaggtcaagaactttgagatgtgtcaggagtttgaacagaatgccagtaccttccttcaatggatcctggaaaccagggcttactttctggatggatcattgctcaaagaaacaggaactctggaatctcagctggaagcaaataaaagaaaacagaaggagatccaggcgatgaagcgtcaactaaccaagattgtggacctgggggacaacttggaagacgctctgatccttgatatcaaatacagcaccattggattggctcagcagtgggaccagctctaccagcttgggttgcggatgcaacacaacctggagcaacagatccaggccaaggacatcaaaggtgtgagtgaagagactctaaaggaatttagcacaatctataaacactttgatgagaatttgacagggcgcctgactcacaaagagttccggtcctgcctgagaggactcaattactacttgcccatggtggaggaggatgaacatgagcccaagtttgagaagttcctggatgctgtggatccagggaggaagggctatgtctcactggaggactatactgctttcctgattgacaaggagtcagaaaacatcaagtccagtgatgaaatagagaatgccttccaagccctggcagagggcaagtcatatattaccaaagaagacatgaagcaggcccttaccccagagcaagtgtcattctgtgccacacatatgcagcaatatatggacccacggggtcgaagccatctctctggctatgactacgttggcttcaccaattcctactttggcaactaataagcagctcctcgtggatcgtagaaaatcttagtgtcgtgggaaatttactggggggcaaagagtacaggcaaatgtggaagataaagatggcctcgtgtgtgtgtgtgtgtgtgtgtgtgtgtgtgtgtgcttgtgtttgtgtgcatattacatttattgtaggatcttaaaaaatctcaagggtgggagatagaaaggttaatagagttggaggagtggaagctattttgtatgcaactagtcactgctgaggggtgtcaaagtttctatttttatttgttctgttttgcacgtctttatcattttgctttattccgattatagaataaagtaattctttttaaaaatattttttggggcaaagttaagtaaaatgttgagcttctatatttctgggaactgtactcatataagagtgggcagctaattttactgtaaagaagggccatggtatagtagataaataaaatccaaggcaattttcaaacaatttttttaaactttggaatgtgtttaaatttaaatttgaaaataaagatatttgattttctgggg

SEQ ID NO: 185351 - DNA, 465 bp, Homo sapiens
  Payload ID: 16498
  Gene Symbol: SPTA1
  Gene Name: spectrin, alpha, erythrocytic 1
  ENST ID: ENST00000467387
  CDS Start-End: 92-465
gaattcgactggacagttccatttgaattatttctctctctctctctctctgacacattttatcttgccaggttctaaacctttaggaaaaatggagcaatttccaaaggaaaccgttgtggagagcagtgggccaaaggttttggaaacagcagaagagatccaggagaggcgtcaggaagtgttgactcggtatcaaagtttcaaggagcgggtcgctgaggaaaaccatcctgacctacccttaattcagtctaagcaaaatgaggtgaatgctgcctgggagcgccttcgtggtttggctctccagagacagaaagctctgtccaatgctgcaaacttacaacgattcaaaagggatgtgactgaagccatccagtggatcaaggagaaggaacctgtactcacctctgaggactatggcaaagaccttgttgcctctgaaggactgtttcacagtcacaa

SEQ ID NO: 185352 - DNA, 7998 bp, Homo sapiens
  Payload ID: 16498
  Gene Symbol: SPTA1
  Gene Name: spectrin, alpha, erythrocytic 1
  ENST ID: ENST00000614909
  CDS Start-End: 182-7474
tgtcgattgtgtatggctgatgggattctaggaccaagcaagaggtttttttttttcccccacatacttaacgtttctatatttctatttgaattcgactggacagttccatttgaattatttctctctctctctctctctgacacattttatcttgccaggttctaaacctttaggaaaaatggagcaatttccaaaggaaaccgttgtggagagcagtgggccaaaggttttggaaacagcagaagagatccaggagaggcgtcaggaagtgttgactcggtatcaaagtttcaaggagcgggtcgctgagaggggtcagaagcttgaggattcctatcacttacaagttttcaagcgagatgcagatgatctggggaagtggatcatggagaaagtcaatatcttaaccgataagagctatgaagacccaactaatatacaggggaaatatcagaagcatcaatcccttgaagcagaggtgcaaacaaaatcaagactcatgtctgaactggaaaaaacaagggaagaacgatttaccatgggtcattctgcccacgaagaaacgaaggcccatatagaggagctacgccacctgtgggacctgctgttagagctgaccctggagaagggtgaccagttgctgcgggccctgaagttccagcagtatgtacaggagtgtgctgacatcttagagtggattggagacaaggaggctatagcgacatcagtggagctaggtgaagactgggagcgcaccgaagttctgcataagaaatttgaagacttccaagtggagctggtagctaaagaagggagagttgttgaagtgaaccaatatgccaatgagtgtgccgaggaaaaccatcctgacctacccttaattcagtctaagcaaaatgaggtgaatgctgcctgggagcgccttcgtggtttggctctccagagacagaaagctctgtccaatgctgcaaacttacaacgattcaaaagggatgtgactgaagccatccagtggatcaaggagaaggaacctgtactcacctctgaggactatggcaaagaccttgttgcctctgaaggactgtttcacagtcacaagggacttgagagaaatcttgctgtcatgagtgacaaggtgaaggagttatgtgctaaagcagagaagctgacactttcccatccttcagatgcacctcagatccaggagatgaaagaagatctggtctccagctgggagcatattcgtgccctggccaccagcagatatgaaaaactgcaggctacttattggtaccatcgattttcatctgactttgatgaactctcaggctggatgaacgagaagactgctgcgatcaatgctgatgagctgccaacagatgtggctggtggagaagttctgctggacaggcatcagcagcataagcatgagattgactcttacgatgaccgatttcaatctgctgatgagactggtcaagacctcgtgaatgccaatcatgaagcctctgatgaagttcgggaaaagatggaaatacttgacaacaactggactgccctgctggaactgtgggacgagcgtcatcgtcagtatgagcagtgcttggactttcatctcttctacagagacagtgagcaagtggacagttggatgagtagacaagaggccttcctggaaaacgaggatctgggaaactcactgggcagtgcagaagcccttcttcagaagcatgaagactttgaggaagcctttactgcccaggaagagaagatcataactgtagacaagactgcaaccaaattgattggtgatgaccattatgattcagagaacatcaaggctatccgtgacgggctgttagcccggcgggatgccctacgtgaaaaggctgccactagacgtagattgctgaaggagtcattgcttctgcaaaaactgtatgaggactcagatgacctaaagaactggatcaacaagaagaaaaagttggcagatgatgaagattacaaggacatacagaacttgaagagcagggttcaaaagcagcaagtctttgaaaaggagttggcagttaataagacccagctggaaaacatacagaaaactggccaagagatgattgagggtggtcactatgcctctgacaatgtgaccactcgtctgagtgaagttgccagcctctgggaggagttgctggaggctacaaaacagaaagggacccagttgcatgaggccaaccagcagctgcaatttgaaaataatgcagaagatttgcagcgctggctggaggatgttgagtggcaagtcacctctgaggattatgggaaaggcctggccgaggtacagaatcgactcaggaaacacggcctcctggagtcggctgtggctgctcgtcaggatcaggtggatatccttacagacctggctgcatattttgaagaaataggccatcctgattctaaggatataagggcaaggcaagagtccttggtatgccgatttgaagctctgaaagagccactggccacccgaaagaagaagctcttagaccttctccatctgcagctgatttgtagagacacagaggatgaggaggcctggatccaagagactgaaccctcagctacttccacctaccttggaaaggacctgattgcttccaaaaagcttctgaataggcatagagtcatcctggagaacattgccagccatgaaccacgcattcaagagataacagaaaggggaaacaaaatggtagaggaaggacactttgctgcagaagatgtggcctctagggtcaagagtttgaaccagaatatggagtctctccgtgctcgagctgctaggcgacaaaatgatcttgaagccaatgtccagttccagcagtacctggctgacctgcatgaagcagaaacatggatcagagagaaggaacctattgtagataatactaactatggtgctgatgaagaagcagctggggctcttctaaagaagcatgaggcctttctattagatctcaattcatttggagacagtatgaaagctctgcggaatcaggcaaacgcctgccagcaacaacaggctgcaccagtggagggagttgctggagaacaaagggtcatggctttatatgacttccaggcccgcagcccccgagaagtcaccatgaagaaaggtgatgtcttaacgctgctcagttccatcaataaggactggtggaaggtggaagctgctgatcatcagggcattgtcccagctgtctatgtcagaagactggcccacgatgagttcccgatgctcccacagcggcgacgagaagagccaggaaacatcacccagcgccaggagcagattgagaaccaataccgctccctcttggatcgggcagaagaacgcagacgtcgtctattgcaacgttataatgaatttttattggcctatgaggcaggagacatgctggaatggattcaagagaaaaaggcagaaaacactggagtggaactagatgatgtttgggagctgcagaaaaagtttgatgagttccaaaaggatttgaataccaatgagcctcggctaagggatatcaacaaggtagctgatgatctactatttgaaggacttctaacaccagaaggagctcaaatccggcaggaattgaattcccgctggggttctttgcagaggcttgcagatgaacagcggcagctgctgggcagtgcccatgctgttgaagtgtttcacagagaagcagatgacacgaaggagcagattgagaagaaatgccaggccctcagtgctgcagaccctggctcagatctgttcagtgttcaggctcttcagcgacggcatgagggctttgaaagggacctcgtacccctgggagataaggtgaccatactgggggagacagcagagcggctcagtgagtcccatccagatgccactgaggacctgcagagacagaaaatggagctgaatgaggcctgggaagacctgcaggggcgtacaaaggatcgtaaggagagcctaaatgaggcccagaaattctacctgttcctcagcaaggccagggatctgcagaactggatcagtagcattggtggcatggtatcatcacaggagctggccgaagacttaactggcatagagatcttgctggagagacatcaggagcaccgtgctgacatggaggcagaggctcccaccttccaggccttagaggacttcagtgcagaacttatcgacagtgggcaccatgctagccctgaaattgaaaaaaagcttcaagctgtcaagctagagagagatgatttggagaaggcttgggaaaaacgcaagaagatcctagaccagtgcctggagttgcagatgttccaggggaactgtgatcaagttgagagctggatggtggcacgtgagaattccctgaggtcagatgacaaaagttccttagacagtctggaggctttgatgaagaaacgggacgatttggacaaagcaatcactgcccaggaagggaagatcactgacctagaacattttgctgagagcctcattgctgatgaacactatgccaaagaagagattgctacgcggctccaacgtgtactagacaggtggaaggctctcaaagcacaactgattgatgagcggacaaagcttggagactatgccaacctaaaacaattctaccgagaccttgaggagctggaagaatggatcagtgagatgctgcccacagcctgtgatgaatcctacaaagacgccactaacattcagaggaaatacctgaaacaccagacctttgcacatgaagtcgatggccgatctgagcaggtgcatggcgtcatcaacctggggaactccctgattgagtgtagcgcttgtgatggcaatgaagaggccatgaaggagcaactggaacagctgaaggaacattgggatcatctgcttgagagaacaaatgacaaagggaagaagctcaatgaggccagtcgtcaacagaggttcaacacaagcatccgggactttgagttctggctctcagaggcagagacattgctggccatgaaagatcaggccagggacttggcttcagcaggaaacctactcaagaagcatcagctattggagagagagatgttggctcgagaggatgcactcaaggacctgaatacattggctgaagatttgctctccagcgggactttcaacgttgatcagattgtgaagaaaaaagataatgtcaacaagcgtttcctgaatgtccaagaattggcagctgcacaccacgaaaaattgaaagaggcctatgccttgttccagttcttccaggatctagatgatgaggaatcctggatagaggagaagttgatacgagtgagctcccaggactatgggagagatcttcagggggttcagaacttgctgaagaagcacaaacgcctagagggggagctggtggcccatgagcctgccatccagaatgtgctggatatggcagagaagctgaaagacaaggctgctgtggggcaagaggagatccagttgcggctggctcagtttgttgaacactgggagaagctcaaagagttggccaaggcccgaggacttaagttggaagaatccctagaatacttgcaattcatgcagaatgctgaggaagaggaagcttggatcaatgaaaagaatgctttggctgtccgaggagattgtggagatacattagctgctactcagagcttgctaatgaagcatgaagctttggaaaatgactttgctgtccatgagacccgagtacaaaatgtgtgtgcacaaggagaagacatcctaaataaggtgttgcaggaggaaagtcagaacaaagagatttcttccaagatagaggctctgaatgaaaagaccccttctctggctaaggcaatagctgcttggaagttgcaattggaagacgattatgcctttcaggaattcaactggaaggctgatgtggtagaggcttggatagctgataaggaaacaagcctaaagaccaatggcaatggtgcagaccttggtgacttcctcactcttctggcaaaacaggacactctggatgccagtctgcagagtttccagcaagagagacttcccgagatcactgacctgaaggacaaactgatttctgctcaacacaaccagtctaaagccattgaagagcgttatgccgctctgctgaagcgctgggaacagttgctggaagcctcggcagtccacagacagaaattgctggagaaacagctgcctctacagaaggctgaggacctgttcgtggaatttgcacataaggcttcagctttgaacaactggtgtgaaaagatggaagaaaacttgtcagagcctgtgcactgtgtctccctgaatgaaattcggcagctgcagaaagaccatgaggacttcttggcctccctggctagggctcaagcagactttaaatgtttgctggagctagaccagcagattaaggccttaggtgtgccttccagcccttatacctggttaacagtggaggtgctggaaaggacctggaagcacctatctgacatcattgaggaacgggagcaggagctgcaaaaggaagaggcaagacaggtcaagaactttgagatgtgtcaggagtttgaacagaatgccagtaccttccttcaatggatcctggaaaccagggcttactttctggatggatcattgctcaaagaaacaggaactctggaatctcagctggaagcaaataaaagaaaacagaaggagatccaggcgatgaagcgtcaactaaccaagattgtggacctgggggacaacttggaagacgctctgatccttgatatcaaatacagcaccattggattggctcagcagtgggaccagctctaccagcttgggttgcggatgcaacacaacctggagcaacagatccaggccaaggacatcaaaggtgtgagtgaagagactctaaaggaatttagcacaatctataaacactttgatgagaatttgacagggcgcctgactcacaaagagttccggtcctgcctgagaggactcaattactacttgcccatggtggaggaggatgaacatgagcccaagtttgagaagttcctggatgctgtggatccagggaggaagggctatgtctcactggaggactatactgctttcctgattgacaaggagtcagaaaacatcaagtccagtgatgaaatagagaatgccttccaagccctggcagagggcaagtcatatattaccaaagaagacatgaagcaggcccttaccccagagcaagtgtcattctgtgccacacatatgcagcaatatatggacccacgggtcgaagccatctctctggctatgactacgttggcttcaccaattcctactttggcaactaataagcagctcctcgtggatcgtagaaaatcttagtgtcgtgggaaatttactggggggcaaagagtacaggcaaatgtggaagataaagatggcctcgtgtgtgtgtgtgtgtgtgtgtgtgtgtgtgtgtgcttgtgtttgtgtgcatattacatttattgtaggatcttaaaaaatctcaagggtgggagatagaaaggttaatagagttggaggagtggaagctattttgtatgcaactagtcactgctgaggggtgtcaaagtttctatttttatttgttctgttttgcacgtctttatcattttgctttattccgattatagaataaagtaattctttttaaaaatattttttggggcaaagttaagtaaaatgttgagcttctatatttctgggaactgtactcatataagagtgggcagctaattttactgtaaagaagggccatggtatagtagataaataaaatccaaggcaattttcaaacaatttttttaaactttggaatgtgtttaaatttaaatttgaaaataaagatatttgattttctgggg

SEQ ID NO: 185353 - DNA, 7794 bp, Homo sapiens
  Payload ID: 16499
  Gene Symbol: SPTAN1
  Gene Name: spectrin, alpha, non-erythrocytic 1
  Uniprot ID: Q13813
  ENST ID: ENST00000358161
  CDS Start-End: 108-7466
acccgctgcggagtgaacggtgtggagcggaggccgcggaggctcctcggtccttcagcacccctcggcccgacgcacccacgcccctcaccccccgagagccgaaaatggacccaagtggggtcaaagtgctggaaacagcagaggacatccaggagaggcggcagcaggtcctagaccgataccaccgcttcaaggaactctcaacccttaggcgtcagaagctggaagattcctatcgattccagttctttcaaagagatgctgaagagctggagaaatggatacaggaaaaacttcagattgcatctgatgagaattataaagacccaaccaacttgcagggaaagcttcagaagcatcaagcatttgaagctgaagtgcaggccaactcaggagccattgttaagctggatgaaactggaaacctgatgatctcagaagggcattttgcatctgaaaccatacggacccgtttgatggagctgcaccgccagtgggaattacttttggagaagatgcgagaaaaaggaatcaaactgctgcaggcccagaagttggtgcagtacttacgagaatgtgaggacgtgatggactggatcaatgacaaggaagcaattgttacttctgaagagctgggccaggatctggagcatgtagaggttttacagaagaaatttgaagagtttcaaacagatatggctgctcatgaagaaagagttaatgaagtgaaccagtttgctgccaaactcatacaggagcagcaccctgaggaggaactgatcaagactaagcaggatgaagtcaatgcagcctggcagcggctgaagggcctggctctgcagaggcaggggaagctctttggggcagcagaagttcagcgctttaacagggatgtggatgagactatcagttggattaaggaaaaggagcagttaatggcctctgatgattttggccgagacctggcaagtgttcaggctctgcttcggaagcacgagggtctggagagagatcttgctgctctagaagacaaggtcaaagccctgtgtgctgaggctgaccgcctgcaacagtcccaccctctgagtgcaacacagattcaagtgaagcgagaggaactgattacaaactgggagcagatccgcaccttggcggcagagagacatgcacggctcaatgattcatacaggcttcaacgcttccttgctgacttccgtgacctcaccagctgggtgactgagatgaaagccctcatcaatgcagatgagcttgccagtgatgtggctggggctgaagccctgctagatagacaccaagagcacaagggtgaaattgatgcccatgaagacagcttcaaatctgcagatgaatctggacaggcactgcttgctgctggtcactatgcctcagatgaagtgagggagaagctgaccgtcctttccgaggagagagcggcgctgctggagctgtgggagctgcgcaggcagcagtacgagcagtgcatggacctgcagctcttctaccgggacactgagcaggtggacaactggatgagcaagcaggaggcgttcctgttgaatgaagacttgggagattccttggatagtgtggaagcgcttcttaagaagcacgaagactttgagaaatcccttagtgcccaggaggaaaagattacagcattagatgaatttgcaaccaagctaattcagaacaaccactatgcaatggaagatgtggccactcgccgagatgctctgttgagccgccgcaatgcccttcacgagagagccatgcgtcgccgggcccagctagccgattctttccatctgcagcagtttttccgtgattctgatgagctcaagagttgggtcaatgagaagatgaaaactgccacagatgaagcttataaagatccatccaacctacaaggaaaagtacagaagcatcaggcttttgaggctgagctctcagcaaaccagagccgaattgatgccttggagaaagctggccaaaagctgattgatgtcaaccactatgccaaggatgaagtggcagctcgtatgaatgaggtgatcagtttgtggaagaaactgctagaggccactgaactgaaaggaataaagcttcgtgaagccaaccagcaacagcaatttaatcgcaatgttgaggatattgaattgtggctatatgaagtagaaggtcacttggcttcggatgattacggcaaagatcttaccaatgtgcagaacctccagaagaaacatgcactgctagaggcagatgtggctgctcaccaggaccgaattgatggcatcaccattcaggcccgccagttccaagatgctggccattttgatgcagaaaacatcaagaagaaacaggaagccctcgtggctcgctatgaggcactcaaggagcccatggttgcccggaagcagaagctggccgattctctgcggttgcagcagctcttccgggatgttgaggatgaggagacgtggattcgagagaaagagcccattgccgcatctaccaacagaggtaaggatttaattggggtccagaatctgctaaagaaacatcaagccttacaagcagaaattgctggacatgaaccacgcatcaaagcagttacacagaaggggaatgccatggtggaggaaggccattttgctgcagaggatgtgaaggccaagcttcacgagctgaaccaaaagtgggaggcactgaaagccaaagcttcccagcgtcggcaggacctggaggactctctgcaggcccagcagtactttgctgatgctaacgaggctgaatcctggatgcgggagaaggaacccattgtgggcagcactgactatggcaaggacgaagactctgctgaggctctactgaagaaacacgaagctttgatgtcagatctcagtgcctacggcagcagcatccaggctttgcgagaacaagcacagtcctgccggcaacaagtggcccccacggatgatgagactgggaaggagctggtcttggctctctacgactatcaggagaagagtccccgagaggtcaccatgaagaagggagatatccttaccttactcaacagcaccaacaaggattggtggaaagtggaagtgaacgatcgtcagggttttgtgccggctgcgtacgtgaagaaattggaccccgcccagtcagcctcccgggagaatctcctggaggagcaaggcagcatagcactgcggcaggagcagattgacaatcaatatcattctctgctggaactgggtgagaagcgtaaaggcatgttggagaagagttgcaagaagtttatgttgttccgtgaagcgaatgaactacagcaatggatcaatgagaaggaagccgctctgacaagtgaggaggtcggagcagacttggagcaggttgaggtgctccagaagaagtttgatgacttccagaaggacctgaaggccaatgagtcacggttgaaggacattaacaaggtagctgaagacctggagtctgaaggtctcatggcagaggaggtgcaggctgtgcaacaacaggaagtgtatggcatgatgcccagggatgaaactgattccaagacagcctccccgtggaagtctgctcgtctgatggttcacaccgtggccacctttaattccatcaaggagctgaatgagcgctggcggtccctacagcagctggccgaggaacggagccagctcttgggcagcgcccatgaagtacagaggttccacagagatgctgatgaaaccaaagaatggattgaagagaagaatcaagctctaaacacagacaattatggacatgatctcgccagtgtccaggccctgcaacgcaagcatgagggcttcgagagggaccttgcggctctcggtgacaaggtaaactcccttggtgaaacagcagagcgcctgatccagtcccatcccgagtcagcagaagacctgcaggaaaagtgcacagagttaaaccaggcctggagcagcctggggaaacgtgcagatcagcgcaaggcaaagttgggtgactcccacgacctgcagcgcttccttagcgatttccgggacctcatgtcttggatcaatggaatacgggggttggtgtcctcagatgagctagccaaggatgtcaccggagctgaggcattgctggagcgacaccaggaacaccggacagaaatcgatgccagggctggcactttccaggcatttgagcagtttggacagcagctgttggctcacggacactatgccagccctgagatcaagcagaaacttgatattcttgaccaggagcgtgcagacctggagaaggcctgggttcagcgcaggatgatgctggatcagtgccttgaactgcagctgttccatcgggactgtgagcaagctgagaactggatggctgcccgggaggccttcttgaataccgaagacaaaggagactcactggacagcgtagaggctctgatcaaaaaacatgaagactttgacaaagcgattaacgtccaggaagagaagattgctgctctgcaggcctttgccgaccagctcatcgctgccggccattatgccaagggagacatttctagccggcgcaatgaggtcttggacaggtggcgacgtctgaaagcccagatgattgagaaaaggtcaaagctaggagaatctcaaaccctccaacagttcagccgggatgtggatgagattgaggcttggatcagtgaaaaattgcaaacagcgagtgatgagtcgtacaaggatcccaccaacatccagagcaagcaccagaagcaccaggcttttgaagcagagctgcatgccaacgctgaccggatccgtggggttatcgacatgggcaactccctcattgaacgtggagcctgtgccggcagtgaggatgctgtcaaggcccgcctggctgccttagctgaccagtggcagttcttggtgcaaaagtcagcggaaaagagccagaaactgaaagaagccaacaagcagcagaacttcaacacagggatcaaggactttgacttctggctgtctgaggtggaggccctgctggcatccgaagattatggcaaagacctagcttctgtgaacaacctgctgaaaaagcatcaactgctggaagcagatatatctgcccatgaggatcgcctgaaggacctgaacagccaggcagacagcctgatgaccagcagtgccttcgacacctcccaagtaaaggacaagagggacaccatcaacgggcgcttccagaagatcaagagcatggcggcctcccggcgagccaagctgaatgaatcccatcgcctgcaccagttcttccgggacatggatgacgaggagtcctggatcaaggagaagaagctgctggtgggctcagaggactacggccgggacctaaccggcgtgcagaacctgaggaagaagcacaagcggctggaagcagaactggctgcgcatgagccggctattcagggtgtcctggacactggcaagaagctgtccgatgacaacaccatcgggaaagaggagatccagcagcggctggcgcagtttgtggagcactggaaagagctgaagcagctggcagctgcccggggtcagcggctggaagagtccttggaatatcagcagtttgtagccaatgtggaagaggaagaagcctggatcaatgagaaaatgaccctggtggccagcgaagattatggcgacactcttgccgccatccagggcttactgaagaaacatgaagcttttgagacagacttcaccgtccacaaggatcgcgtgaatgatgtctgcaccaatggacaagacctcattaagaagaacaatcaccatgaggagaacatctcttcaaagatgaagggcctgaacgggaaagtgtcagacctggagaaagctgcagcccagagaaaggcgaagctggatgagaactcggccttccttcagttcaactggaaggcggacgtggtggagtcctggatcggtgaaaaggagaacagcttgaagacagatgattatggccgagacctgtcttctgtgcagacgctcctcaccaaacaggaaacttttgacgctgggctgcaggccttccagcaggaaggcattgccaacatcactgccctcaaagatcagcttctcgccgccaaacacgttcagtccaaggccatcgaggcccggcacgcctccctcatgaagaggtggagccagcttctggccaactcagccgcccgcaagaagaagcttctggaggctcagagtcacttccgcaaggtggaggacctcttcctgaccttcgccaaaaaggcttctgccttcaacagctggtttgaaaatgcagaggaggacttaacagaccccgtgcgctgcaactccttggaagaaatcaaagctttgcgcgaggcccacgacgccttccgctcctccctcagctctgcccaggctgacttcaaccagctggccgagctggaccgccagatcaagagcttccgcgtagcctccaacccctacacctggtttaccatggaggccctggaggagacctggaggaacctacagaaaatcatcaaggagagggagctggagctgcagaaggaacagcggcggcaggaggagaacgacaagctgcgccaggagtttgcccagcacgccaacgccttccaccagtggatccaagagaccaggacatacctcctcgatgggtcctgtatggtggaagagtcggggaccctcgaatcccagcttgaagctaccaaacgcaagcaccaggaaatccgagccatgagaagtcagctcaaaaagatcgaggacctgggggccgccatggaggaggccctcatcctggacaacaagtacacggagcacagcaccgtgggcctcgcccagcagtgggaccagctggaccagctgggcatgcgcatgcagcacaacctggagcagcagatccaggccaggaacacaacaggtgtgactgaggaggccctcaaagaattcagcatgatgtttaaacactttgacaaggacaagtctggcaggctgaaccatcaggagttcaaatcttgcctgcgctccctgggctatgacctgcccatggtggaggaaggggaacctgaccctgagttcgaggcaatcctggacacggtggatccgaacagagatggccatgtctccttgcaagaatacatggctttcatgatcagccgcgaaactgagaacgtcaagtccagcgaggagattgagagcgccttccgggccctcagctcagagggaaagccttacgtgaccaaggaggagctctaccagaacctgacccgggaacaagccgactactgcgtctcccacatgaagccctacgtggacggcaagggccgcgagctccccaccgcgttcgactacgtggagttcacccgctcgcttttcgtgaactgagccactccctgggtcacccacccctcgctgcttgccctgcgtcgccttgctgcatgtccgctcctctgtgtgctctcactttccactgtaaccttaagcctgcttagcttggaataagacttaggagaaaatggtgcttcactaacccgcttccggtccagtcacaatcatcatgtcactgtggggacccagatctgtgtcttgaagcagctgccctcattccgacttcagaaaatcgaagcagctggctcctccccttgttctctctcccaccctcccccaaatctgttttcatgtaaaagacaaataaatgatgacttcccccaaa

SEQ ID NO: 185354 - DNA, 7889 bp, Homo sapiens
  Payload ID: 16499
  Gene Symbol: SPTAN1
  Gene Name: spectrin, alpha, non-erythrocytic 1
  Uniprot ID: Q13813
  ENST ID: ENST00000372731
  CDS Start-End: 143-7561
tataaaagaggcggggcgcgcgcgtcgccgccactacccgctgcggagtgaacggtgtggagcggaggccgcggaggctcctcggtccttcagcacccctcggcccgacgcacccacgcccctcaccccccgagagccgaaaatggacccaagtggggtcaaagtgctggaaacagcagaggacatccaggagaggcggcagcaggtcctagaccgataccaccgcttcaaggaactctcaacccttaggcgtcagaagctggaagattcctatcgattccagttctttcaaagagatgctgaagagctggagaaatggatacaggaaaaacttcagattgcatctgatgagaattataaagacccaaccaacttgcagggaaagcttcagaagcatcaagcatttgaagctgaagtgcaggccaactcaggagccattgttaagctggatgaaactggaaacctgatgatctcagaagggcattttgcatctgaaaccatacggacccgtttgatggagctgcaccgccagtgggaattacttttggagaagatgcgagaaaaaggaatcaaactgctgcaggcccagaagttggtgcagtacttacgagaatgtgaggacgtgatggactggatcaatgacaaggaagcaattgttacttctgaagagctgggccaggatctggagcatgtagaggttttacagaagaaatttgaagagtttcaaacagatatggctgctcatgaagaaagagttaatgaagtgaaccagtttgctgccaaactcatacaggagcagcaccctgaggaggaactgatcaagactaagcaggatgaagtcaatgcagcctggcagcggctgaagggcctggctctgcagaggcaggggaagctctttggggcagcagaagttcagcgctttaacagggatgtggatgagactatcagttggattaaggaaaaggagcagttaatggcctctgatgattttggccgagacctggcaagtgttcaggctctgcttcggaagcacgagggtctggagagagatcttgctgctctagaagacaaggtcaaagccctgtgtgctgaggctgaccgcctgcaacagtcccaccctctgagtgcaacacagattcaagtgaagcgagaggaactgattacaaactgggagcagatccgcaccttggcggcagagagacatgcacggctcaatgattcatacaggcttcaacgcttccttgctgacttccgtgacctcaccagctgggtgactgagatgaaagccctcatcaatgcagatgagcttgccagtgatgtggctggggctgaagccctgctagatagacaccaagagcacaagggtgaaattgatgcccatgaagacagcttcaaatctgcagatgaatctggacaggcactgcttgctgctggtcactatgcctcagatgaagtgagggagaagctgaccgtcctttccgaggagagagcggcgctgctggagctgtgggagctgcgcaggcagcagtacgagcagtgcatggacctgcagctcttctaccgggacactgagcaggtggacaactggatgagcaagcaggaggcgttcctgttgaatgaagacttgggagattccttggatagtgtggaagcgcttcttaagaagcacgaagactttgagaaatcccttagtgcccaggaggaaaagattacagcattagatgaatttgcaaccaagctaattcagaacaaccactatgcaatggaagatgtggccactcgccgagatgctctgttgagccgccgcaatgcccttcacgagagagccatgcgtcgccgggcccagctagccgattctttccatctgcagcagtttttccgtgattctgatgagctcaagagttgggtcaatgagaagatgaaaactgccacagatgaagcttataaagatccatccaacctacaaggaaaagtacagaagcatcaggcttttgaggctgagctctcagcaaaccagagccgaattgatgccttggagaaagctggccaaaagctgattgatgtcaaccactatgccaaggatgaagtggcagctcgtatgaatgaggtgatcagtttgtggaagaaactgctagaggccactgaactgaaaggaataaagcttcgtgaagccaaccagcaacagcaatttaatcgcaatgttgaggatattgaattgtggctatatgaagtagaaggtcacttggcttcggatgattacggcaaagatcttaccaatgtgcagaacctccagaagaaacatgcactgctagaggcagatgtggctgctcaccaggaccgaattgatggcatcaccattcaggcccgccagttccaagatgctggccattttgatgcagaaaacatcaagaagaaacaggaagccctcgtggctcgctatgaggcactcaaggagcccatggttgcccggaagcagaagctggccgattctctgcggttgcagcagctcttccgggatgttgaggatgaggagacgtggattcgagagaaagagcccattgccgcatctaccaacagaggtaaggatttaattggggtccagaatctgctaaagaaacatcaagccttacaagcagaaattgctggacatgaaccacgcatcaaagcagttacacagaaggggaatgccatggtggaggaaggccattttgctgcagaggatgtgaaggccaagcttcacgagctgaaccaaaagtgggaggcactgaaagccaaagcttcccagcgtcggcaggacctggaggactctctgcaggcccagcagtactttgctgatgctaacgaggctgaatcctggatgcgggagaaggaacccattgtgggcagcactgactatggcaaggacgaagactctgctgaggctctactgaagaaacacgaagctttgatgtcagatctcagtgcctacggcagcagcatccaggctttgcgagaacaagcacagtcctgccggcaacaagtggcccccacggatgatgagactgggaaggagctggtcttggctctctacgactatcaggagaagagtccccgagaggtcaccatgaagaagggagatatccttaccttactcaacagcaccaacaaggattggtggaaagtggaagtgaacgatcgtcagggttttgtgccggctgcgtacgtgaagaaattggaccccgcccagtcagcctcccgggagaatctcctggaggagcaaggcagcatagcactgcggcaggagcagattgacaatcagacacgcataactaaggaggccggcagtgtatctctgcgtatgaagcaggtggaagaactatatcattctctgctggaactgggtgagaagcgtaaaggcatgttggagaagagttgcaagaagtttatgttgttccgtgaagcgaatgaactacagcaatggatcaatgagaaggaagccgctctgacaagtgaggaggtcggagcagacttggagcaggttgaggtgctccagaagaagtttgatgacttccagaaggacctgaaggccaatgagtcacggttgaaggacattaacaaggtagctgaagacctggagtctgaaggtctcatggcagaggaggtgcaggctgtgcaacaacaggaagtgtatggcatgatgcccagggatgaaactgattccaagacagcctccccgtggaagtctgctcgtctgatggttcacaccgtggccacctttaattccatcaaggagctgaatgagcgctggcggtccctacagcagctggccgaggaacggagccagctcttgggcagcgcccatgaagtacagaggttccacagagatgctgatgaaaccaaagaatggattgaagagaagaatcaagctctaaacacagacaattatggacatgatctcgccagtgtccaggccctgcaacgcaagcatgagggcttcgagagggaccttgcggctctcggtgacaaggtaaactcccttggtgaaacagcagagcgcctgatccagtcccatcccgagtcagcagaagacctgcaggaaaagtgcacagagttaaaccaggcctggagcagcctggggaaacgtgcagatcagcgcaaggcaaagttgggtgactcccacgacctgcagcgcttccttagcgatttccgggacctcatgtcttggatcaatggaatacgggggttggtgtcctcagatgagctagccaaggatgtcaccggagctgaggcattgctggagcgacaccaggaacaccggacagaaatcgatgccagggctggcactttccaggcatttgagcagtttggacagcagctgttggctcacggacactatgccagccctgagatcaagcagaaacttgatattcttgaccaggagcgtgcagacctggagaaggcctgggttcagcgcaggatgatgctggatcagtgccttgaactgcagctgttccatcgggactgtgagcaagctgagaactggatggctgcccgggaggccttcttgaataccgaagacaaaggagactcactggacagcgtagaggctctgatcaaaaaacatgaagactttgacaaagcgattaacgtccaggaagagaagattgctgctctgcaggcctttgccgaccagctcatcgctgccggccattatgccaagggagacatttctagccggcgcaatgaggtcttggacaggtggcgacgtctgaaagcccagatgattgagaaaaggtcaaagctaggagaatctcaaaccctccaacagttcagccgggatgtggatgagattgaggcttggatcagtgaaaaattgcaaacagcgagtgatgagtcgtacaaggatcccaccaacatccagagcaagcaccagaagcaccaggcttttgaagcagagctgcatgccaacgctgaccggatccgtggggttatcgacatgggcaactccctcattgaacgtggagcctgtgccggcagtgaggatgctgtcaaggcccgcctggctgccttagctgaccagtggcagttcttggtgcaaaagtcagcggaaaagagccagaaactgaaagaagccaacaagcagcagaacttcaacacagggatcaaggactttgacttctggctgtctgaggtggaggccctgctggcatccgaagattatggcaaagacctagcttctgtgaacaacctgctgaaaaagcatcaactgctggaagcagatatatctgcccatgaggatcgcctgaaggacctgaacagccaggcagacagcctgatgaccagcagtgccttcgacacctcccaagtaaaggacaagagggacaccatcaacgggcgcttccagaagatcaagagcatggcggcctcccggcgagccaagctgaatgaatcccatcgcctgcaccagttcttccgggacatggatgacgaggagtcctggatcaaggagaagaagctgctggtgggctcagaggactacggccgggacctaaccggcgtgcagaacctgaggaagaagcacaagcggctggaagcagaactggctgcgcatgagccggctattcagggtgtcctggacactggcaagaagctgtccgatgacaacaccatcgggaaagaggagatccagcagcggctggcgcagtttgtggagcactggaaagagctgaagcagctggcagctgcccggggtcagcggctggaagagtccttggaatatcagcagtttgtagccaatgtggaagaggaagaagcctggatcaatgagaaaatgaccctggtggccagcgaagattatggcgacactcttgccgccatccagggcttactgaagaaacatgaagcttttgagacagacttcaccgtccacaaggatcgcgtgaatgatgtctgcaccaatggacaagacctcattaagaagaacaatcaccatgaggagaacatctcttcaaagatgaagggcctgaacgggaaagtgtcagacctggagaaagctgcagcccagagaaaggcgaagctggatgagaactcggccttccttcagttcaactggaaggcggacgtggtggagtcctggatcggtgaaaaggagaacagcttgaagacagatgattatggccgagacctgtcttctgtgcagacgctcctcaccaaacaggaaacttttgacgctgggctgcaggccttccagcaggaaggcattgccaacatcactgccctcaaagatcagcttctcgccgccaaacacgttcagtccaaggccatcgaggcccggcacgcctccctcatgaagaggtggagccagcttctggccaactcagccgcccgcaagaagaagcttctggaggctcagagtcacttccgcaaggtggaggacctcttcctgaccttcgccaaaaaggcttctgccttcaacagctggtttgaaaatgcagaggaggacttaacagaccccgtgcgctgcaactccttggaagaaatcaaagctttgcgcgaggcccacgacgccttccgctcctccctcagctctgcccaggctgacttcaaccagctggccgagctggaccgccagatcaagagcttccgcgtagcctccaacccctacacctggtttaccatggaggccctggaggagacctggaggaacctacagaaaatcatcaaggagagggagctggagctgcagaaggaacagcggcggcaggaggagaacgacaagctgcgccaggagtttgcccagcacgccaacgccttccaccagtggatccaagagaccaggacatacctcctcgatgggtcctgtatggtggaagagtcggggaccctcgaatcccagcttgaagctaccaaacgcaagcaccaggaaatccgagccatgagaagtcagctcaaaaagatcgaggacctgggggccgccatggaggaggccctcatcctggacaacaagtacacggagcacagcaccgtgggcctcgcccagcagtgggaccagctggaccagctgggcatgcgcatgcagcacaacctggagcagcagatccaggccaggaacacaacaggtgtgactgaggaggccctcaaagaattcagcatgatgtttaaacactttgacaaggacaagtctggcaggctgaaccatcaggagttcaaatcttgcctgcgctccctgggctatgacctgcccatggtggaggaaggggaacctgaccctgagttcgaggcaatcctggacacggtggatccgaacagagatggccatgtctccttgcaagaatacatggctttcatgatcagccgcgaaactgagaacgtcaagtccagcgaggagattgagagcgccttccgggccctcagctcagagggaaagccttacgtgaccaaggaggagctctaccagaacctgacccgggaacaagccgactactgcgtctcccacatgaagccctacgtggacggcaagggccgcgagctccccaccgcgttcgactacgtggagttcacccgctcgcttttcgtgaactgagccactccctgggtcacccacccctcgctgcttgccctgcgtcgccttgctgcatgtccgctcctctgtgtgctctcactttccactgtaaccttaagcctgcttagcttggaataagacttaggagaaaatggtgcttcactaacccgcttccggtccagtcacaatcatcatgtcactgtggggacccagatctgtgtcttgaagcagctgccctcattccgacttcagaaaatcgaagcagctggctcctccccttgttctctctcccaccctcccccaaatctgttttcatgtaaaagacaaataaatgatgacttcccccaaa

SEQ ID NO: 185355 - DNA, 7868 bp, Homo sapiens
  Payload ID: 16499
  Gene Symbol: SPTAN1
  Gene Name: spectrin, alpha, non-erythrocytic 1
  Uniprot ID: Q13813
  ENST ID: ENST00000372739
  CDS Start-End: 111-7544
actacccgctgcggagtgaacggtgtggagcggaggccgcggaggctcctcggtccttcagcacccctcggcccgacgcacccacgcccctcaccccccgagagccgaaaatggacccaagtggggtcaaagtgctggaaacagcagaggacatccaggagaggcggcagcaggtcctagaccgataccaccgcttcaaggaactctcaacccttaggcgtcagaagctggaagattcctatcgattccagttctttcaaagagatgctgaagagctggagaaatggatacaggaaaaacttcagattgcatctgatgagaattataaagacccaaccaacttgcagggaaagcttcagaagcatcaagcatttgaagctgaagtgcaggccaactcaggagccattgttaagctggatgaaactggaaacctgatgatctcagaagggcattttgcatctgaaaccatacggacccgtttgatggagctgcaccgccagtgggaattacttttggagaagatgcgagaaaaaggaatcaaactgctgcaggcccagaagttggtgcagtacttacgagaatgtgaggacgtgatggactggatcaatgacaaggaagcaattgttacttctgaagagctgggccaggatctggagcatgtagaggttttacagaagaaatttgaagagtttcaaacagatatggctgctcatgaagaaagagttaatgaagtgaaccagtttgctgccaaactcatacaggagcagcaccctgaggaggaactgatcaagactaagcaggatgaagtcaatgcagcctggcagcggctgaagggcctggctctgcagaggcaggggaagctctttggggcagcagaagttcagcgctttaacagggatgtggatgagactatcagttggattaaggaaaaggagcagttaatggcctctgatgattttggccgagacctggcaagtgttcaggctctgcttcggaagcacgagggtctggagagagatcttgctgctctagaagacaaggtcaaagccctgtgtgctgaggctgaccgcctgcaacagtcccaccctctgagtgcaacacagattcaagtgaagcgagaggaactgattacaaactgggagcagatccgcaccttggcggcagagagacatgcacggctcaatgattcatacaggcttcaacgcttccttgctgacttccgtgacctcaccagctgggtgactgagatgaaagccctcatcaatgcagatgagcttgccagtgatgtggctggggctgaagccctgctagatagacaccaagagcacaagggtgaaattgatgcccatgaagacagcttcaaatctgcagatgaatctggacaggcactgcttgctgctggtcactatgcctcagatgaagtgagggagaagctgaccgtcctttccgaggagagagcggcgctgctggagctgtgggagctgcgcaggcagcagtacgagcagtgcatggacctgcagctcttctaccgggacactgagcaggtggacaactggatgagcaagcaggaggcgttcctgttgaatgaagacttgggagattccttggatagtgtggaagcgcttcttaagaagcacgaagactttgagaaatcccttagtgcccaggaggaaaagattacagcattagatgaatttgcaaccaagctaattcagaacaaccactatgcaatggaagatgtggccactcgccgagatgctctgttgagccgccgcaatgcccttcacgagagagccatgcgtcgccgggcccagctagccgattctttccatctgcagcagtttttccgtgattctgatgagctcaagagttgggtcaatgagaagatgaaaactgccacagatgaagcttataaagatccatccaacctacaaggaaaagtacagaagcatcaggcttttgaggctgagctctcagcaaaccagagccgaattgatgccttggagaaagctggccaaaagctgattgatgtcaaccactatgccaaggatgaagtggcagctcgtatgaatgaggtgatcagtttgtggaagaaactgctagaggccactgaactgaaaggaataaagcttcgtgaagccaaccagcaacagcaatttaatcgcaatgttgaggatattgaattgtggctatatgaagtagaaggtcacttggcttcggatgattacggcaaagatcttaccaatgtgcagaacctccagaagaaacatgcactgctagaggcagatgtggctgctcaccaggaccgaattgatggcatcaccattcaggcccgccagttccaagatgctggccattttgatgcagaaaacatcaagaagaaacaggaagccctcgtggctcgctatgaggcactcaaggagcccatggttgcccggaagcagaagctggccgattctctgcggttgcagcagctcttccgggatgttgaggatgaggagacgtggattcgagagaaagagcccattgccgcatctaccaacagaggtaaggatttaattggggtccagaatctgctaaagaaacatcaagccttacaagcagaaattgctggacatgaaccacgcatcaaagcagttacacagaaggggaatgccatggtggaggaaggccattttgctgcagaggatgtgaaggccaagcttcacgagctgaaccaaaagtgggaggcactgaaagccaaagcttcccagcgtcggcaggacctggaggactctctgcaggcccagcagtactttgctgatgctaacgaggctgaatcctggatgcgggagaaggaacccattgtgggcagcactgactatggcaaggacgaagactctgctgaggctctactgaagaaacacgaagctttgatgtcagatctcagtgcctacggcagcagcatccaggctttgcgagaacaagcacagtcctgccggcaacaagtggcccccacggatgatgagactgggaaggagctggtcttggctctctacgactatcaggagaagagtccccgagaggtcaccatgaagaagggagatatccttaccttactcaacagcaccaacaaggattggtggaaagtggaagtgaacgatcgtcagggttttgtgccggctgcgtacgtgaagaaattggaccccgcccagtcagcctcccgggagaatctcctggaggagcaaggcagcatagcactgcggcaggagcagattgacaatcagacacgcataactaaggaggccggcagtgtatctctgcgtatgaagcaggtggaagaactatatcattctctgctggaactgggtgagaagcgtaaaggcatgttggagaagagttgcaagaagtttatgttgttccgtgaagcgaatgaactacagcaatggatcaatgagaaggaagccgctctgacaagtgaggaggtcggagcagacttggagcaggttgaggtgctccagaagaagtttgatgacttccagaaggacctgaaggccaatgagtcacggttgaaggacattaacaaggtagctgaagacctggagtctgaaggtctcatggcagaggaggtgcaggctgtgcaacaacaggaagtgtatggcatgatgcccagggatgaaactgattccaagacagcctccccgtggaagtctgctcgtctgatggttcacaccgtggccacctttaattccatcaaggagctgaatgagcgctggcggtccctacagcagctggccgaggaacggagccagctcttgggcagcgcccatgaagtacagaggttccacagagatgctgatgaaaccaaagaatggattgaagagaagaatcaagctctaaacacagacaattatggacatgatctcgccagtgtccaggccctgcaacgcaagcatgagggcttcgagagggaccttgcggctctcggtgacaaggtaaactcccttggtgaaacagcagagcgcctgatccagtcccatcccgagtcagcagaagacctgcaggaaaagtgcacagagttaaaccaggcctggagcagcctggggaaacgtgcagatcagcgcaaggcaaagttgggtgactcccacgacctgcagcgcttccttagcgatttccgggacctcatgtcttggatcaatggaatacgggggttggtgtcctcagatgagctagccaaggatgtcaccggagctgaggcattgctggagcgacaccaggaacaccggacagaaatcgatgccagggctggcactttccaggcatttgagcagtttggacagcagctgttggctcacggacactatgccagccctgagatcaagcagaaacttgatattcttgaccaggagcgtgcagacctggagaaggcctgggttcagcgcaggatgatgctggatcagtgccttgaactgcagctgttccatcgggactgtgagcaagctgagaactggatggctgcccgggaggccttcttgaataccgaagacaaaggagactcactggacagcgtagaggctctgatcaaaaaacatgaagactttgacaaagcgattaacgtccaggaagagaagattgctgctctgcaggcctttgccgaccagctcatcgctgccggccattatgccaagggagacatttctagccggcgcaatgaggtcttggacaggtggcgacgtctgaaagcccagatgattgagaaaaggtcaaagctaggagaatctcaaaccctccaacagttcagccgggatgtggatgagattgaggcttggatcagtgaaaaattgcaaacagcgagtgatgagtcgtacaaggatcccaccaacatccagctttccaagctgctgagcaagcaccagaagcaccaggcttttgaagcagagctgcatgccaacgctgaccggatccgtggggttatcgacatgggcaactccctcattgaacgtggagcctgtgccggcagtgaggatgctgtcaaggcccgcctggctgccttagctgaccagtggcagttcttggtgcaaaagtcagcggaaaagagccagaaactgaaagaagccaacaagcagcagaacttcaacacagggatcaaggactttgacttctggctgtctgaggtggaggccctgctggcatccgaagattatggcaaagacctagcttctgtgaacaacctgctgaaaaagcatcaactgctggaagcagatatatctgcccatgaggatcgcctgaaggacctgaacagccaggcagacagcctgatgaccagcagtgccttcgacacctcccaagtaaaggacaagagggacaccatcaacgggcgcttccagaagatcaagagcatggcggcctcccggcgagccaagctgaatgaatcccatcgcctgcaccagttcttccgggacatggatgacgaggagtcctggatcaaggagaagaagctgctggtgggctcagaggactacggccgggacctaaccggcgtgcagaacctgaggaagaagcacaagcggctggaagcagaactggctgcgcatgagccggctattcagggtgtcctggacactggcaagaagctgtccgatgacaacaccatcgggaaagaggagatccagcagcggctggcgcagtttgtggagcactggaaagagctgaagcagctggcagctgcccggggtcagcggctggaagagtccttggaatatcagcagtttgtagccaatgtggaagaggaagaagcctggatcaatgagaaaatgaccctggtggccagcgaagattatggcgacactcttgccgccatccagggcttactgaagaaacatgaagcttttgagacagacttcaccgtccacaaggatcgcgtgaatgatgtctgcaccaatggacaagacctcattaagaagaacaatcaccatgaggagaacatctcttcaaagatgaagggcctgaacgggaaagtgtcagacctggagaaagctgcagcccagagaaaggcgaagctggatgagaactcggccttccttcagttcaactggaaggcggacgtggtggagtcctggatcggtgaaaaggagaacagcttgaagacagatgattatggccgagacctgtcttctgtgcagacgctcctcaccaaacaggaaacttttgacgctgggctgcaggccttccagcaggaaggcattgccaacatcactgccctcaaagatcagcttctcgccgccaaacacgttcagtccaaggccatcgaggcccggcacgcctccctcatgaagaggtggagccagcttctggccaactcagccgcccgcaagaagaagcttctggaggctcagagtcacttccgcaaggtggaggacctcttcctgaccttcgccaaaaaggcttctgccttcaacagctggtttgaaaatgcagaggaggacttaacagaccccgtgcgctgcaactccttggaagaaatcaaagctttgcgcgaggcccacgacgccttccgctcctccctcagctctgcccaggctgacttcaaccagctggccgagctggaccgccagatcaagagcttccgcgtagcctccaacccctacacctggtttaccatggaggccctggaggagacctggaggaacctacagaaaatcatcaaggagagggagctggagctgcagaaggaacagcggcggcaggaggagaacgacaagctgcgccaggagtttgcccagcacgccaacgccttccaccagtggatccaagagaccaggacatacctcctcgatgggtcctgtatggtggaagagtcggggaccctcgaatcccagcttgaagctaccaaacgcaagcaccaggaaatccgagccatgagaagtcagctcaaaaagatcgaggacctgggggccgccatggaggaggccctcatcctggacaacaagtacacggagcacagcaccgtgggcctcgcccagcagtgggaccagctggaccagctgggcatgcgcatgcagcacaacctggagcagcagatccaggccaggaacacaacaggtgtgactgaggaggccctcaaagaattcagcatgatgtttaaacactttgacaaggacaagtctggcaggctgaaccatcaggagttcaaatcttgcctgcgctccctgggctatgacctgcccatggtggaggaaggggaacctgaccctgagttcgaggcaatcctggacacggtggatccgaacagagatggccatgtctccttgcaagaatacatggctttcatgatcagccgcgaaactgagaacgtcaagtccagcgaggagattgagagcgccttccgggccctcagctcagagggaaagccttacgtgaccaaggaggagctctaccagaacctgacccgggaacaagccgactactgcgtctcccacatgaagccctacgtggacggcaagggccgcgagctccccaccgcgttcgactacgtggagttcacccgctcgcttttcgtgaactgagccactccctgggtcacccacccctcgctgcttgccctgcgtcgccttgctgcatgtccgctcctctgtgtgctctcactttccactgtaaccttaagcctgcttagcttggaataagacttaggagaaaatggtgcttcactaacccgcttccggtccagtcacaatcatcatgtcactgtggggacccagatctgtgtcttgaagcagctgccctcattccgacttcagaaaatcgaagcagctggctcctccccttgttctctctcccaccctcccccaaatctgttttcatgtaaaagacaaataaatgatgacttcccc

SEQ ID NO: 185356 - DNA, 7812 bp, Homo sapiens
  Payload ID: 16499
  Gene Symbol: SPTAN1
  Gene Name: spectrin, alpha, non-erythrocytic 1
  ENST ID: ENST00000630804
  CDS Start-End: 114-7487
gccactacccgctgcggagtgaacggtgtggagcggaggccgcggaggctcctcggtccttcagcacccctcggcccgacgcacccacgcccctcaccccccgagagccgaaaatggacccaagtggggtcaaagtgctggaaacagcagaggacatccaggagaggcggcagcaggtcctagaccgataccaccgcttcaaggaactctcaacccttaggcgtcagaagctggaagattcctatcgattccagttctttcaaagagatgctgaagagctggagaaatggatacaggaaaaacttcagattgcatctgatgagaattataaagacccaaccaacttgcagggaaagcttcagaagcatcaagcatttgaagctgaagtgcaggccaactcaggagccattgttaagctggatgaaactggaaacctgatgatctcagaagggcattttgcatctgaaaccatacggacccgtttgatggagctgcaccgccagtgggaattacttttggagaagatgcgagaaaaaggaatcaaactgctgcaggcccagaagttggtgcagtacttacgagaatgtgaggacgtgatggactggatcaatgacaaggaagcaattgttacttctgaagagctgggccaggatctggagcatgtagaggttttacagaagaaatttgaagagtttcaaacagatatggctgctcatgaagaaagagttaatgaagtgaaccagtttgctgccaaactcatacaggagcagcaccctgaggaggaactgatcaagactaagcaggatgaagtcaatgcagcctggcagcggctgaagggcctggctctgcagaggcaggggaagctctttggggcagcagaagttcagcgctttaacagggatgtggatgagactatcagttggattaaggaaaaggagcagttaatggcctctgatgattttggccgagacctggcaagtgttcaggctctgcttcggaagcacgagggtctggagagagatcttgctgctctagaagacaaggtcaaagccctgtgtgctgaggctgaccgcctgcaacagtcccaccctctgagtgcaacacagattcaagtgaagcgagaggaactgattacaaactgggagcagatccgcaccttggcggcagagagacatgcacggctcaatgattcatacaggcttcaacgcttccttgctgacttccgtgacctcaccagctgggtgactgagatgaaagccctcatcaatgcagatgagcttgccagtgatgtggctggggctgaagccctgctagatagacaccaagagcacaagggtgaaattgatgcccatgaagacagcttcaaatctgcagatgaatctggacaggcactgcttgctgctggtcactatgcctcagatgaagtgagggagaagctgaccgtcctttccgaggagagagcggcgctgctggagctgtgggagctgcgcaggcagcagtacgagcagtgcatggacctgcagctcttctaccgggacactgagcaggtggacaactggatgagcaagcaggaggcgttcctgttgaatgaagacttgggagattccttggatagtgtggaagcgcttcttaagaagcacgaagactttgagaaatcccttagtgcccaggaggaaaagattacagcattagatgaatttgcaaccaagctaattcagaacaaccactatgcaatggaagatgtggccactcgccgagatgctctgttgagccgccgcaatgcccttcacgagagagccatgcgtcgccgggcccagctagccgattctttccatctgcagcagtttttccgtgattctgatgagctcaagagttgggtcaatgagaagatgaaaactgccacagatgaagcttataaagatccatccaacctacaaggaaaagtacagaagcatcaggcttttgaggctgagctctcagcaaaccagagccgaattgatgccttggagaaagctggccaaaagctgattgatgtcaaccactatgccaaggatgaagtggcagctcgtatgaatgaggtgatcagtttgtggaagaaactgctagaggccactgaactgaaaggaataaagcttcgtgaagccaaccagcaacagcaatttaatcgcaatgttgaggatattgaattgtggctatatgaagtagaaggtcacttggcttcggatgattacggcaaagatcttaccaatgtgcagaacctccagaagaaacatgcactgctagaggcagatgtggctgctcaccaggaccgaattgatggcatcaccattcaggcccgccagttccaagatgctggccattttgatgcagaaaacatcaagaagaaacaggaagccctcgtggctcgctatgaggcactcaaggagcccatggttgcccggaagcagaagctggccgattctctgcggttgcagcagctcttccgggatgttgaggatgaggagacgtggattcgagagaaagagcccattgccgcatctaccaacagaggtaaggatttaattggggtccagaatctgctaaagaaacatcaagccttacaagcagaaattgctggacatgaaccacgcatcaaagcagttacacagaaggggaatgccatggtggaggaaggccattttgctgcagaggatgtgaaggccaagcttcacgagctgaaccaaaagtgggaggcactgaaagccaaagcttcccagcgtcggcaggacctggaggactctctgcaggcccagcagtactttgctgatgctaacgaggctgaatcctggatgcgggagaaggaacccattgtgggcagcactgactatggcaaggacgaagactctgctgaggctctactgaagaaacacgaagctttgatgtcagatctcagtgcctacggcagcagcatccaggctttgcgagaacaagcacagtcctgccggcaacaagtggcccccacggatgatgagactgggaaggagctggtcttggctctctacgactatcaggagaagagtccccgagaggtcaccatgaagaagggagatatccttaccttactcaacagcaccaacaaggattggtggaaagtggaagtgaacgatcgtcagggttttgtgccggctgcgtacgtgaagaaattggaccccgcccagtcagcctcccgggagaatctcctggaggagcaaggcagcatagcactgcggcaggagcagattgacaatcaatatcattctctgctggaactgggtgagaagcgtaaaggcatgttggagaagagttgcaagaagtttatgttgttccgtgaagcgaatgaactacagcaatggatcaatgagaaggaagccgctctgacaagtgaggaggtcggagcagacttggagcaggttgaggtgctccagaagaagtttgatgacttccagaaggacctgaaggccaatgagtcacggttgaaggacattaacaaggtagctgaagacctggagtctgaaggtctcatggcagaggaggtgcaggctgtgcaacaacaggaagtgtatggcatgatgcccagggatgaaactgattccaagacagcctccccgtggaagtctgctcgtctgatggttcacaccgtggccacctttaattccatcaaggagctgaatgagcgctggcggtccctacagcagctggccgaggaacggagccagctcttgggcagcgcccatgaagtacagaggttccacagagatgctgatgaaaccaaagaatggattgaagagaagaatcaagctctaaacacagacaattatggacatgatctcgccagtgtccaggccctgcaacgcaagcatgagggcttcgagagggaccttgcggctctcggtgacaaggtaaactcccttggtgaaacagcagagcgcctgatccagtcccatcccgagtcagcagaagacctgcaggaaaagtgcacagagttaaaccaggcctggagcagcctggggaaacgtgcagatcagcgcaaggcaaagttgggtgactcccacgacctgcagcgcttccttagcgatttccgggacctcatgtcttggatcaatggaatacgggggttggtgtcctcagatgagctagccaaggatgtcaccggagctgaggcattgctggagcgacaccaggaacaccggacagaaatcgatgccagggctggcactttccaggcatttgagcagtttggacagcagctgttggctcacggacactatgccagccctgagatcaagcagaaacttgatattcttgaccaggagcgtgcagacctggagaaggcctgggttcagcgcaggatgatgctggatcagtgccttgaactgcagctgttccatcgggactgtgagcaagctgagaactggatggctgcccgggaggccttcttgaataccgaagacaaaggagactcactggacagcgtagaggctctgatcaaaaaacatgaagactttgacaaagcgattaacgtccaggaagagaagattgctgctctgcaggcctttgccgaccagctcatcgctgccggccattatgccaagggagacatttctagccggcgcaatgaggtcttggacaggtggcgacgtctgaaagcccagatgattgagaaaaggtcaaagctaggagaatctcaaaccctccaacagttcagccgggatgtggatgagattgaggcttggatcagtgaaaaattgcaaacagcgagtgatgagtcgtacaaggatcccaccaacatccagctttccaagctgctgagcaagcaccagaagcaccaggcttttgaagcagagctgcatgccaacgctgaccggatccgtggggttatcgacatgggcaactccctcattgaacgtggagcctgtgccggcagtgaggatgctgtcaaggcccgcctggctgccttagctgaccagtggcagttcttggtgcaaaagtcagcggaaaagagccagaaactgaaagaagccaacaagcagcagaacttcaacacagggatcaaggactttgacttctggctgtctgaggtggaggccctgctggcatccgaagattatggcaaagacctagcttctgtgaacaacctgctgaaaaagcatcaactgctggaagcagatatatctgcccatgaggatcgcctgaaggacctgaacagccaggcagacagcctgatgaccagcagtgccttcgacacctcccaagtaaaggacaagagggacaccatcaacgggcgcttccagaagatcaagagcatggcggcctcccggcgagccaagctgaatgaatcccatcgcctgcaccagttcttccgggacatggatgacgaggagtcctggatcaaggagaagaagctgctggtgggctcagaggactacggccgggacctaaccggcgtgcagaacctgaggaagaagcacaagcggctggaagcagaactggctgcgcatgagccggctattcagggtgtcctggacactggcaagaagctgtccgatgacaacaccatcgggaaagaggagatccagcagcggctggcgcagtttgtggagcactggaaagagctgaagcagctggcagctgcccggggtcagcggctggaagagtccttggaatatcagcagtttgtagccaatgtggaagaggaagaagcctggatcaatgagaaaatgaccctggtggccagcgaagattatggcgacactcttgccgccatccagggcttactgaagaaacatgaagcttttgagacagacttcaccgtccacaaggatcgcgtgaatgatgtctgcaccaatggacaagacctcattaagaagaacaatcaccatgaggagaacatctcttcaaagatgaagggcctgaacgggaaagtgtcagacctggagaaagctgcagcccagagaaaggcgaagctggatgagaactcggccttccttcagttcaactggaaggcggacgtggtggagtcctggatcggtgaaaaggagaacagcttgaagacagatgattatggccgagacctgtcttctgtgcagacgctcctcaccaaacaggaaacttttgacgctgggctgcaggccttccagcaggaaggcattgccaacatcactgccctcaaagatcagcttctcgccgccaaacacgttcagtccaaggccatcgaggcccggcacgcctccctcatgaagaggtggagccagcttctggccaactcagccgcccgcaagaagaagcttctggaggctcagagtcacttccgcaaggtggaggacctcttcctgaccttcgccaaaaaggcttctgccttcaacagctggtttgaaaatgcagaggaggacttaacagaccccgtgcgctgcaactccttggaagaaatcaaagctttgcgcgaggcccacgacgccttccgctcctccctcagctctgcccaggctgacttcaaccagctggccgagctggaccgccagatcaagagcttccgcgtagcctccaacccctacacctggtttaccatggaggccctggaggagacctggaggaacctacagaaaatcatcaaggagagggagctggagctgcagaaggaacagcggcggcaggaggagaacgacaagctgcgccaggagtttgcccagcacgccaacgccttccaccagtggatccaagagaccaggacatacctcctcgatgggtcctgtatggtggaagagtcggggaccctcgaatcccagcttgaagctaccaaacgcaagcaccaggaaatccgagccatgagaagtcagctcaaaaagatcgaggacctgggggccgccatggaggaggccctcatcctggacaacaagtacacggagcacagcaccgtgggcctcgcccagcagtgggaccagctggaccagctgggcatgcgcatgcagcacaacctggagcagcagatccaggccaggaacacaacaggtgtgactgaggaggccctcaaagaattcagcatgatgtttaaacactttgacaaggacaagtctggcaggctgaaccatcaggagttcaaatcttgcctgcgctccctgggctatgacctgcccatggtggaggaaggggaacctgaccctgagttcgaggcaatcctggacacggtggatccgaacagagatggccatgtctccttgcaagaatacatggctttcatgatcagccgcgaaactgagaacgtcaagtccagcgaggagattgagagcgccttccgggccctcagctcagagggaaagccttacgtgaccaaggaggagctctaccagaacctgacccgggaacaagccgactactgcgtctcccacatgaagccctacgtggacggcaagggccgcgagctccccaccgcgttcgactacgtggagttcacccgctcgcttttcgtgaactgagccactccctgggtcacccacccctcgctgcttgccctgcgtcgccttgctgcatgtccgctcctctgtgtgctctcactttccactgtaaccttaagcctgcttagcttggaataagacttaggagaaaatggtgcttcactaacccgcttccggtccagtcacaatcatcatgtcactgtggggacccagatctgtgtcttgaagcagctgccctcattccgacttcagaaaatcgaagcagctggctcctccccttgttctctctcccaccctcccccaaatctgttttcatgtaaaagacaaataaatgatgacttccccc

SEQ ID NO: 185357 - DNA, 585 bp, Homo sapiens
  Payload ID: 16499
  Gene Symbol: SPTAN1
  Gene Name: spectrin, alpha, non-erythrocytic 1
  ENST ID: ENST00000627441
  CDS Start-End: 126-585
actacccgctgcggagtgaacggtgtggagcggaggccgcggaggctcctcggtccttcagcacccctcggcccgacgcacccacgcccctcaccccccgagagccgactccacattcctccatcatgttgtcatcgtttcgtaaacgcagagtccagaaaatggacccaagtggggtcaaagtgctggaaacagcagaggacatccaggagaggcggcagcaggtcctagaccgataccaccgcttcaaggaactctcaacccttaggcgtcagaagctggaagattcctatcgattccagttctttcaaagagatgctgaagagctggagaaatggatacaggaaaaacttcagattgcatctgatgagaattataaagacccaaccaacttgcagggaaagcttcagaagcatcaagcatttgaagctgaagtgcaggccaactcaggagccattgttaagctggatgaaactggaaacctgatgatctcagaagggcattttgcatctgaaaccatacggacccgtttgatggagctgcaccgccagtgggaattacttttggagaagatgcgagaaaaag

SEQ ID NO: 185358 - DNA, 416 bp, Homo sapiens
  Payload ID: 16499
  Gene Symbol: SPTAN1
  Gene Name: spectrin, alpha, non-erythrocytic 1
  ENST ID: ENST00000630981
  CDS Start-End: 1-205
cgaggcaatcctggacacggtggatccgaacagagatggccatgtctccttgcaagaatacatggctttcatgatcagccgcgaaactgagaacgtcaagtccagcgaggagattgagagcgccttccgggccctcagctcagagggaaagccttacgtgaccaaggaggagctctaccaggtatgggcctcaggaggtgggtgaagaggtgtcctttggaaaactaaagccaaatttgtggcagagctgagtctggggtaacaggccctgcgctgggtattctccccatttacaaatcaaactcagtatggacagaagtcccggatctgcttgtagaagcagctccgagcccccagcatcctgagacctgggaggtcgggtttgaagtgggtgcagctggctcaggcaccaggtg

SEQ ID NO: 185359 - DNA, 7498 bp, Homo sapiens
  Payload ID: 16499
  Gene Symbol: SPTAN1
  Gene Name: spectrin, alpha, non-erythrocytic 1
  ENST ID: ENST00000630866
  CDS Start-End: 1-7497
atggacccaagtggggtcaaagtgctggaaacagcagaggacatccaggagaggcggcagcaggtcctagaccgataccaccgcttcaaggaactctcaacccttaggcgtcagaagctggaagattcctatcgattccagttctttcaaagagatgctgaagagctggagaaatggatacaggaaaaacttcagattgcatctgatgagaattataaagacccaaccaacttgcagggaaagcttcagaagcatcaagcatttgaagctgaagtgcaggccaactcaggagccattgttaagctggatgaaactggaaacctgatgatctcagaagggcattttgcatctgaaaccatacggacccgtttgatggagctgcaccgccagtgggaattacttttggagaagatgcgagaaaaaggaatcaaactgctgcaggcccagaagttggtgcagtacttacgagaatgtgaggacgtgatggactggatcaatgacaaggaagcaattgttacttctgaagagctgggccaggatctggagcatgtagaggttttacagaagaaatttgaagagtttcaaacagatatggctgctcatgaagaaagagttaatgaagtgaaccagtttgctgccaaactcatacaggagcagcaccctgaggaggaactgatcaagactaagcaggatgaagtcaatgcagcctggcagcggctgaagggcctggctctgcagaggcaggggaagctctttggggcagcagaagttcagcgctttaacagggatgtggatgagactatcagttggattaaggaaaaggagcagttaatggcctctgatgattttggccgagacctggcaagtgttcaggctctgcttcggaagcacgagggtctggagagagatcttgctgctctagaagacaaggtcaaagccctgtgtgctgaggctgaccgcctgcaacagtcccaccctctgagtgcaacacagattcaagtgaagcgagaggaactgattacaaactgggagcagatccgcaccttggcggcagagagacatgcacggctcaatgattcatacaggcttcaacgcttccttgctgacttccgtgacctcaccagctgggtgactgagatgaaagccctcatcaatgcagatgagcttgccagtgatgtggctggggctgaagccctgctagatagacaccaagagcacaagggtgaaattgatgcccatgaagacagcttcaaatctgcagatgaatctggacaggcactgcttgctgctggtcactatgcctcagatgaagtgagggagaagctgaccgtcctttccgaggagagagcggcgctgctggagctgtgggagctgcgcaggcagcagtacgagcagtgcatggacctgcagctcttctaccgggacactgagcaggtggacaactggatgagcaagcaggaggcgttcctgttgaatgaagacttgggagattccttggatagtgtggaagcgcttcttaagaagcacgaagactttgagaaatcccttagtgcccaggaggaaaagattacagcattagatgaatttgcaaccaagctaattcagaacaaccactatgcaatggaagatgtggccactcgccgagatgctctgttgagccgccgcaatgcccttcacgagagagccatgcgtcgccgggcccagctagccgattctttccatctgcagcagtttttccgtgattctgatgagctcaagagttgggtcaatgagaagatgaaaactgccacagatgaagcttataaagatccatccaacctacaaggaaaagtacagaagcatcaggcttttgaggctgagctctcagcaaaccagagccgaattgatgccttggagaaagctggccaaaagctgattgatgtcaaccactatgccaaggatgaagtggcagctcgtatgaatgaggtgatcagtttgtggaagaaactgctagaggccactgaactgaaaggaataaagcttcgtgaagccaaccagcaacagcaatttaatcgcaatgttgaggatattgaattgtggctatatgaagtagaaggtcacttggcttcggatgattacggcaaagatcttaccaatgtgcagaacctccagaagaaacatgcactgctagaggcagatgtggctgctcaccaggaccgaattgatggcatcaccattcaggcccgccagttccaagatgctggccattttgatgcagaaaacatcaagaagaaacaggaagccctcgtggctcgctatgaggcactcaaggagcccatggttgcccggaagcagaagctggccgattctctgcggttgcagcagctcttccgggatgttgaggatgaggagacgtggattcgagagaaagagcccattgccgcatctaccaacagaggtaaggatttaattggggtccagaatctgctaaagaaacatcaagccttacaagcagaaattgctggacatgaaccacgcatcaaagcagttacacagaaggggaatgccatggtggaggaaggccattttgctgcagaggatgtgaaggccaagcttcacgagctgaaccaaaagtgggaggcactgaaagccaaagcttcccagcgtcggcaggacctggaggactctctgcaggcccagcagtactttgctgatgctaacgaggctgaatcctggatgcgggagaaggaacccattgtgggcagcactgactatggcaaggacgaagactctgctgaggctctactgaagaaacacgaagctttgatgtcagatctcagtgcctacggcagcagcatccaggctttgcgagaacaagcacagtcctgccggcaacaagtggcccccacggatgatgagactgggaaggagctggtcttggctctctacgactatcaggagaagagtccccgagaggtcaccatgaagaagggagatatccttaccttactcaacagcaccaacaaggattggtggaaagtggaagtgaacgatcgtcagggttttgtgccggctgcgtacgtgaagaaattggaccccgcccagtcagcctcccgggagaatctcctggaggagcaaggcagcatagcactgcggcaggagcagattgacaatcagacacgcataactaaggaggccggcagtgtatctctgcgtatgaagcaggtggaagaactatatcattctctgctggaactgggtgagaagcgtaaaggcatgttggagaagagttgcaagaagtttatgttgttccgtgaagcgaatgaactacagcaatggatcaatgagaaggaagccgctctgacaagtgaggaggtcggagcagacttggagcaggttgaggtgctccagaagaagtttgatgacttccagaaggacctgaaggccaatgagtcacggttgaaggacattaacaaggtagctgaagacctggagtctgaaggtctcatggcagaggaggtgcaggctgtgcaacaacaggaagtgtatggcatgatgcccagggatgaaactgattccaagacagcctccccgtggaagtctgctcgtctgatggttcacaccgtggccacctttaattccatcaaggagctgaatgagcgctggcggtccctacagcagctggccgaggaacggagccagctcttgggcagcgcccatgaagtacagaggttccacagagatgctgatgaaaccaaagaatggattgaagagaagaatcaagctctaaacacagacaattatggacatgatctcgccagtgtccaggccctgcaacgcaagcatgagggcttcgagagggaccttgcggctctcggtgacaaggtaaactcccttggtgaaacagcagagcgcctgatccagtcccatcccgagtcagcagaagacctgcaggaaaagtgcacagagttaaaccaggcctggagcagcctggggaaacgtgcagatcagcgcaaggcaaagttgggtgactcccacgacctgcagcgcttccttagcgatttccgggacctcatgtcttggatcaatggaatacgggggttggtgtcctcagatgagctagccaaggatgtcaccggagctgaggcattgctggagcgacaccaggaacaccggacagaaatcgatgccagggctggcactttccaggcatttgagcagtttggacagcagctgttggctcacggacactatgccagccctgagatcaagcagaaacttgatattcttgaccaggagcgtgcagacctggagaaggcctgggttcagcgcaggatgatgctggatcagtgccttgaactgcagctgttccatcgggactgtgagcaagctgagaactggatggctgcccgggaggccttcttgaataccgaagacaaaggagactcactggacagcgtagaggctctgatcaaaaaacatgaagactttgacaaagcgattaacgtccaggaagagaagattgctgctctgcaggcctttgccgaccagctcatcgctgccggccattatgccaagggagacatttctagccggcgcaatgaggtcttggacaggtggcgacgtctgaaagcccagatgattgagaaaaggtcaaagctaggagaatctcaaaccctccaacagttcagccgggatgtggatgagattgaggcttggatcagtgaaaaattgcaaacagcgagtgatgagtcgtacaaggatcccaccaacatccagctttccaagctgctgagcaagcaccagaagcaccaggcttttgaagcagagctgcatgccaacgctgaccggatccgtggggttatcgacatgggcaactccctcattgaacgtggagcctgtgccggcagtgaggatgctgtcaaggcccgcctggctgccttagctgaccagtggcagttcttggtgcaaaagtcagcggaaaagagccagaaactgaaagaagccaacaagcagcagaacttcaacacagggatcaaggactttgacttctggctgtctgaggtggaggccctgctggcatccgaagattatggcaaagacctagcttctgtgaacaacctgctgaaaaagcatcaactgctggaagcagatatatctgcccatgaggatcgcctgaaggacctgaacagccaggcagacagcctgatgaccagcagtgccttcgacacctcccaagtaaaggacaagagggacaccatcaacgggcgcttccagaagatcaagagcatggcggcctcccggcgagccaagctgaatgaatcccatcgcctgcaccagttcttccgggacatggatgacgaggagtcctggatcaaggagaagaagctgctggtgggctcagaggactacggccgggacctaaccggcgtgcagaacctgaggaagaagcacaagcggctggaagcagaactggctgcgcatgagccggctattcagggtgtcctggacactggcaagaagctgtccgatgacaacaccatcgggaaagaggagatccagcagcggctggcgcagtttgtggagcactggaaagagctgaagcagctggcagctgcccggggtcagcggctggaagagtccttggaatatcagcagtttgtagccaatgtggaagaggaagaagcctggatcaatgagaaaatgaccctggtggccagcgaagattatggcgacactcttgccgccatccagggcttactgaagaaacatgaagcttttgagacagacttcaccgtccacaaggatcgcgtgaatgatgtctgcaccaatggacaagacctcattaagaagaacaatcaccatgaggagaacatctcttcaaagatgaagggcctgaacgggaaagtgtcagacctggagaaagctgcagcccagagaaaggcgaagctggatgagaactcggccttccttcagttcaactggaaggcggacgtggtggagtcctggatcggtgaaaaggagaacagcttgaagacagatgattatggccgagacctgtcttctgtgcagacgctcctcaccaaacaggaaacttttgacgctgggctgcaggccttccagcaggaaggcattgccaacatcactgccctcaaagatcagcttctcgccgccaaacacgttcagtccaaggccatcgaggcccggcacgcctccctcatgaagaggtggagccagcttctggccaactcagccgcccgcaagaagaagcttctggaggctcagagtcacttccgcaaggtggaggacctcttcctgaccttcgccaaaaaggcttctgccttcaacagctggtttgaaaatgcagaggaggacttaacagaccccgtgcgctgcaactccttggaagaaatcaaagctttgcgcgaggcccacgacgccttccgctcctccctcagctctgcccaggctgacttcaaccagctggccgagctggaccgccagatcaagagcttccgcgtagcctccaacccctacacctggtttaccatggaggccctggaggagacctggaggaacctacagaaaatcatcaaggagagggagctggagctgcagaaggaacagcggcggcaggaggagaacgacaagctgcgccaggagtttgcccagcacgccaacgccttccaccagtggatccaagagaccaggacatacctcctcgatggcatagcatatcgtcgggtcattcgtgtctatcagtatgaagttggggatgatctgtctggaaggtcctgtatggtggaagagtcggggaccctcgaatcccagcttgaagctaccaaacgcaagcaccaggaaatccgagccatgagaagtcagctcaaaaagatcgaggacctgggggccgccatggaggaggccctcatcctggacaacaagtacacggagcacagcaccgtgggcctcgcccagcagtgggaccagctggaccagctgggcatgcgcatgcagcacaacctggagcagcagatccaggccaggaacacaacaggtgtgactgaggaggccctcaaagaattcagcatgatgtttaaacactttgacaaggacaagtctggcaggctgaaccatcaggagttcaaatcttgcctgcgctccctgggctatgacctgcccatggtggaggaaggggaacctgaccctgagttcgaggcaatcctggacacggtggatccgaacagagatggccatgtctccttgcaagaatacatggctttcatgatcagccgcgaaactgagaacgtcaagtccagcgaggagattgagagcgccttccgggccctcagctcagagggaaagccttacgtgaccaaggaggagctctaccagaacctgacccgggaacaagccgactactgcgtctcccacatgaagccctacgtggacggcaagggccgcgagctccccaccgcgttcgactacgtggagttcacccgctcgcttttcgtgaactgag

SEQ ID NO: 185360 - DNA, 6321 bp, Homo sapiens
  Payload ID: 16500
  Gene Symbol: SPTB
  Gene Name: spectrin, beta, erythrocytic
  Uniprot ID: P11277
  ENST ID: ENST00000389720
  CDS Start-End: 1-6321
atgacatcggccacagagtttgaaaatgtgggcaaccagccaccttacagcaggatcaatgcccgctgggacgccccagacgacgagctggataatgacaacagctcagccaggctctttgagaggtcccggataaaggccttggcagatgagcgggaagttgttcagaaaaagaccttcacgaaatgggtgaactcgcacctggctcgagtgtcctgccgcatcaccgatctctacaaggacctgcgggatgggcgcatgctcatcaagctgctggaggtgctctctggagagatgctgccaaagcccaccaaggggaagatgcgcatccactgcctggagaatgtggacaaggctctccagttcctcaaggagcagcgtgtacacctggagaacatgggctcccacgacattgtagatggcaaccaccgcctggtcctgggcctcatctggaccatcatcctccgcttccagattcaggacattgtggtccaaactcaggaaggtcgtgaaacacgctcagccaaggatgcgttgctgttgtggtgtcagatgaagacggcaggctaccctcatgttaatgtcaccaactttacctccagctggaaggatggcttggcctttaatgccctgatacacaagcaccggcccgacctgatcgactttgataagctgaaggactccaatgcccggcacaacctggagcacgcattcaatgtggctgagcgccagctgggcatcatcccgctcctcgaccccgaagatgtctttacggaaaaccctgatgagaaatccatcatcacctatgtggtggccttttaccactacttctccaagatgaaggtgctggcagtggagggcaagcgtgtcggcaaggttattgaccatgccattgagactgagaagatgattgaaaagtacagcgggctagcctcggacctgctcacctggatcgagcagaccatcactgtcctgaacagccgcaagtttgccaactcgctgacgggcgtccagcagcagctgcaggccttcagcacctaccgcaccgtggagaagccgcccaagtttcaagagaaggggaatctggaagttctactttttaccatccagtcccggatgagagccaacaatcagaaagtgtacacaccccacgatgggaaactagtgtctgacatcaacagggcctgggaaagcctggaggaagctgagtatcggcgggagctggccctgagaaatgagctcattcggcaggagaagctagagcaactggcccggcgctttgaccggaaggccgcaatgagagagacctggctcagtgaaaaccagcgcctcgtggcccaggataactttgggtatgacctggcagctgtggaggccgccaagaagaagcatgaggccatcgagaccgacacggctgcctacgaggagcgggtgagagccctggaggacctggctcaggagctggagaaagagaactaccatgaccagaagcgcatcacggcccgcaaggacaatatactgcgcctatggagctacctgcaggagctgctgcagtcccggcgccagaggctcgagaccaccctggcactgcagaagctcttccaggacatgctgcacagcatcgactggatggatgagatcaaggctcacctcttgtctgccgagtttgggaagcacttgttggaggttgaagacctgctacagaagcacaagttgatggaagctgacatcgccatccaaggggacaaagtgaaggccatcaccgcagccaccctgaagttcaccgaggggaaagggtaccagccttgtgacccccaggtcatccaggaccgcatcagccacttggagcagtgctttgaggagctgagcaacatggcagctgggcggaaggcccaactggagcagtccaaacgactctggaagttcttctgggagatggatgaggctgagagctggatcaaggagaaggagcagatctattcttccctggactatggcaaagacctgaccagtgtgctcatcttacagcgcaagcacaaggcctttgaggatgagctccgtgggctggatgctcacctggagcagatcttccaggaggctcatggcatggttgcgcgcaagcagtttgggcacccgcagatcgaggcccgcataaaggaggtgtcggcacagtgggaccagctgaaggacctggctgccttctgcaagaagaacctccaggatgctgagaactttttccagttccagggcgatgcggatgacctgaaggcttggctgcaagacgcccaccggctgctctctggtgaagatgtggggcaggacgaaggggccacgcgggccctggggaaaaagcacaaggacttcctggaggagctggaggagagccgtggggtgatggagcacctggagcagcaggcccagggattccccgaagagtttcgggattccccagatgtgacccatcggctgcaggccctgcgggagctctaccaacaggtggtggcccaggcggacctgcgtcagcagaggctgcaggaagccctggacctgtacacggtgttcggggagacagacgcctgtgagctgtggatgggagagaaggagaagtggctggccgagatggaaatgccagacaccctggaggacctggaggtcgtgcagcacaggttcgacatcctggaccaggagatgaagaccttgatgactcagattgatggtgtgaacctcgctgccaacagcttggtagagagtggccacccacgcagcagggaggtgaagcagtaccaggaccatctgaacaccaggtggcaggcatttcagaccctggtgtcggagcggcgggaggctgtggactcagccctccgagtgcacaactactgcgtagattgcgaggagaccagcaagtggatcacggacaagacaaaggtagtggagtccacaaaagacctggggcgggacctggcaggtatcatcgccatccagaggaagttgtcagggctggagcgtgacgtggccgccatccaggcccgtgtggatgccctggagcgtgagtcccagcagctgatggactcgcaccctgagcagaaggaggatattggtcagcggcaaaaacacttggaggagctgtggcagggcctgcagcaatccctgcagggccaggaggacttgctgggggaagtcagccagctgcaggccttcctgcaggatctggatgacttccaggcctggctctccatcacccagaaggctgtggcctctgaggacatgcccgaatccctcccagaggctgagcagctcctgcagcagcatgcaggtatcaaggatgagattgacgggcaccaagacagctaccagcgtgttaaggagtctggggagaaagtgatccaaggccagacggacccagagtatctgcttctgggccagcggctggagggcctggatactggctggaatgccctgggcaggatgtgggagagccgcagccacaccctcgctcagtgccttggcttccaggagttccagaaagatgccaagcaggctgaagccatcctcagcaaccaggaatacactctggctcacttggagcccccagactccctggaagctgcagaggctgggatccggaagtttgaggatttcttggggtctatggagaacaaccgggataaggtcttgagtcctgtggactctggaaacaagctggtagctgagggaaacctatactcagacaagatcaaggagaaggtgcagctgattgaggacaggcacaggaagaacaacgagaaggcccaggaggcctctgtcctactgagagacaacctggagctacagaacttcctccagaactgccaggagctcactctctggatcaacgacaagctgctgacatctcaggatgtctcctatgatgaagcacgaaaccttcacaataaatggctaaagcaccaggcgtttgtggcagagctggcttcccatgaagggtggctagagaacatcgatgcggaaggaaagcagctgatggatgagaagccccagtttacagccctggtgtcccaaaagctggaagccctgcaccggctctgggacgagctgcaggccaccacaaaggagaagacccagcacctctcggctgccaggagctccgacctgcgcttgcagacccatgctgacctcaacaagtggatcagcgccatggaggaccagctgcggtcagacgacccgggcaaggacctgaccagtgtcaatcggatgttggctaagctgaagcgagtggaggaccaagtgaatgtgcgaaaagaggagctgggggagctgtttgcccaggtgccttcaatgggagaggagggaggagatgcagacttgagcatcgagaagcggttcctggacctcctggaacccctaggaaggaggaagaagcagctggaatcatccagagccaagctgcagatcagccgggacttagaggatgagacgctttgggtggaggagaggctgcctctggcccagtcagccgactatggcactaatctgcaaactgtgcaactgttcatgaagaagaaccagacactgcagaatgagattctgggccatacgccgcgggttgaggatgtgctgcagagagggcagcagctggtggaggcggcggagatcgactgccaggaccttgaggagcgcctggggcacctgcagagctcctgggacaggctgcgggaggcagcggccgggaggctgcagcgactgagggacgccaacgaggcacagcagtactacctggatgcagacgaggctgaggcctggattggcgagcaggagctctacgtcatctccgatgagatccccaaggatgaagagggcgccattgtgatgctgaagcgacatttgcggcagcagcgtgcggtggaggactacggccggaacatcaagcagctggccagccgggcccagggcctgctgtctgcaggccaccctgagggggaacagatcatcagacttcaggggcaagtggacaagcactacgcagggctgaaggacgtggcggaagagcgcaagcgcaagctggagaacatgtaccacctgttccagctcaagcgggagaccgacgacctggagcagtggatttcagaaaaggagctagtggcctcttccccggaaatggggcaagactttgaccacgtgactcttctgcgggacaagttccgggactttgcccgggagaccggggcgattgggcaggagcgggtggacaatgtgaatgccttcatcgagcgactcatcgacgcgggccacagcgaggcggccaccatcgccgagtggaaggacgggctgaacgagatgtgggcagacctcctggagctcattgacacgcgcatgcagctgctggccgcctcctatgacctgcaccgctacttctacacgggtgccgagatcctgggcctcatcgacgagaagcaccgcgagctgcccgaggacgtggggctggacgccagcacggccgagtccttccaccgggtgcacacagccttcgagcgggagctccacctgctgggtgtccaggtgcagcagttccaggacgtggccacccgtctgcagacagcatatgctggggagaaggcagaggccatccagaacaaggagcaggaggtgtctgccgcgtggcaggcgctgctcgatgcctgtgccgggcgccggacccagctagtggacacggcggataaattccgcttcttcagcatggcccgtgacctcctctcctggatggagagcatcatccggcagatcgagacccaggagaggcccagggatgtctcctctgtggaactgctcatgaagtatcaccagggcatcaatgcagagattgaaacccggagcaagaacttcagtgcctgcctggagcttggcgagtccctgctgcagcggcagcaccaggcctcagaggagatccgcgagaaactgcagcaggtgatgtccaggaggaaagagatgaatgagaagtgggaagcccgctgggagcggctccgcatgttgctggaggtgtgccagttctcgagggatgcctctgtggctgaggcgtggctgattgcccaggagccctacctggccagcggggactttggacacacagtggacagtgtggagaagctcatcaagaggcatgaggcttttgagaagtccacggccagctgggcagagcgctttgctgccctggagaagcccaccacggcctcaagaggaggaaggcgagacagcaggggaggctccagtttcccaccatgcggccaccgagagaacgtccccggtcagtctctggtctcgtttgtctag

SEQ ID NO: 185361 - DNA, 6705 bp, Homo sapiens
  Payload ID: 16500
  Gene Symbol: SPTB
  Gene Name: spectrin, beta, erythrocytic
  Uniprot ID: P11277
  ENST ID: ENST00000389721
  CDS Start-End: 34-6447
tgaggcaggcggagctgctaagagcctgctgacatgacatcggccacagagtttgaaaatgtgggcaaccagccaccttacagcaggatcaatgcccgctgggacgccccagacgacgagctggataatgacaacagctcagccaggctctttgagaggtcccggataaaggccttggcagatgagcgggaagttgttcagaaaaagaccttcacgaaatgggtgaactcgcacctggctcgagtgtcctgccgcatcaccgatctctacaaggacctgcgggatgggcgcatgctcatcaagctgctggaggtgctctctggagagatgctgccaaagcccaccaaggggaagatgcgcatccactgcctggagaatgtggacaaggctctccagttcctcaaggagcagcgtgtacacctggagaacatgggctcccacgacattgtagatggcaaccaccgcctggtcctgggcctcatctggaccatcatcctccgcttccagattcaggacattgtggtccaaactcaggaaggtcgtgaaacacgctcagccaaggatgcgttgctgttgtggtgtcagatgaagacggcaggctaccctcatgttaatgtcaccaactttacctccagctggaaggatggcttggcctttaatgccctgatacacaagcaccggcccgacctgatcgactttgataagctgaaggactccaatgcccggcacaacctggagcacgcattcaatgtggctgagcgccagctgggcatcatcccgctcctcgaccccgaagatgtctttacggaaaaccctgatgagaaatccatcatcacctatgtggtggccttttaccactacttctccaagatgaaggtgctggcagtggagggcaagcgtgtcggcaaggttattgaccatgccattgagactgagaagatgattgaaaagtacagcgggctagcctcggacctgctcacctggatcgagcagaccatcactgtcctgaacagccgcaagtttgccaactcgctgacgggcgtccagcagcagctgcaggccttcagcacctaccgcaccgtggagaagccgcccaagtttcaagagaaggggaatctggaagttctactttttaccatccagtcccggatgagagccaacaatcagaaagtgtacacaccccacgatgggaaactagtgtctgacatcaacagggcctgggaaagcctggaggaagctgagtatcggcgggagctggccctgagaaatgagctcattcggcaggagaagctagagcaactggcccggcgctttgaccggaaggccgcaatgagagagacctggctcagtgaaaaccagcgcctcgtggcccaggataactttgggtatgacctggcagctgtggaggccgccaagaagaagcatgaggccatcgagaccgacacggctgcctacgaggagcgggtgagagccctggaggacctggctcaggagctggagaaagagaactaccatgaccagaagcgcatcacggcccgcaaggacaatatactgcgcctatggagctacctgcaggagctgctgcagtcccggcgccagaggctcgagaccaccctggcactgcagaagctcttccaggacatgctgcacagcatcgactggatggatgagatcaaggctcacctcttgtctgccgagtttgggaagcacttgttggaggttgaagacctgctacagaagcacaagttgatggaagctgacatcgccatccaaggggacaaagtgaaggccatcaccgcagccaccctgaagttcaccgaggggaaagggtaccagccttgtgacccccaggtcatccaggaccgcatcagccacttggagcagtgctttgaggagctgagcaacatggcagctgggcggaaggcccaactggagcagtccaaacgactctggaagttcttctgggagatggatgaggctgagagctggatcaaggagaaggagcagatctattcttccctggactatggcaaagacctgaccagtgtgctcatcttacagcgcaagcacaaggcctttgaggatgagctccgtgggctggatgctcacctggagcagatcttccaggaggctcatggcatggttgcgcgcaagcagtttgggcacccgcagatcgaggcccgcataaaggaggtgtcggcacagtgggaccagctgaaggacctggctgccttctgcaagaagaacctccaggatgctgagaactttttccagttccagggcgatgcggatgacctgaaggcttggctgcaagacgcccaccggctgctctctggtgaagatgtggggcaggacgaaggggccacgcgggccctggggaaaaagcacaaggacttcctggaggagctggaggagagccgtggggtgatggagcacctggagcagcaggcccagggattccccgaagagtttcgggattccccagatgtgacccatcggctgcaggccctgcgggagctctaccaacaggtggtggcccaggcggacctgcgtcagcagaggctgcaggaagccctggacctgtacacggtgttcggggagacagacgcctgtgagctgtggatgggagagaaggagaagtggctggccgagatggaaatgccagacaccctggaggacctggaggtcgtgcagcacaggttcgacatcctggaccaggagatgaagaccttgatgactcagattgatggtgtgaacctcgctgccaacagcttggtagagagtggccacccacgcagcagggaggtgaagcagtaccaggaccatctgaacaccaggtggcaggcatttcagaccctggtgtcggagcggcgggaggctgtggactcagccctccgagtgcacaactactgcgtagattgcgaggagaccagcaagtggatcacggacaagacaaaggtagtggagtccacaaaagacctggggcgggacctggcaggtatcatcgccatccagaggaagttgtcagggctggagcgtgacgtggccgccatccaggcccgtgtggatgccctggagcgtgagtcccagcagctgatggactcgcaccctgagcagaaggaggatattggtcagcggcaaaaacacttggaggagctgtggcagggcctgcagcaatccctgcagggccaggaggacttgctgggggaagtcagccagctgcaggccttcctgcaggatctggatgacttccaggcctggctctccatcacccagaaggctgtggcctctgaggacatgcccgaatccctcccagaggctgagcagctcctgcagcagcatgcaggtatcaaggatgagattgacgggcaccaagacagctaccagcgtgttaaggagtctggggagaaagtgatccaaggccagacggacccagagtatctgcttctgggccagcggctggagggcctggatactggctggaatgccctgggcaggatgtgggagagccgcagccacaccctcgctcagtgccttggcttccaggagttccagaaagatgccaagcaggctgaagccatcctcagcaaccaggaatacactctggctcacttggagcccccagactccctggaagctgcagaggctgggatccggaagtttgaggatttcttggggtctatggagaacaaccgggataaggtcttgagtcctgtggactctggaaacaagctggtagctgagggaaacctatactcagacaagatcaaggagaaggtgcagctgattgaggacaggcacaggaagaacaacgagaaggcccaggaggcctctgtcctactgagagacaacctggagctacagaacttcctccagaactgccaggagctcactctctggatcaacgacaagctgctgacatctcaggatgtctcctatgatgaagcacgaaaccttcacaataaatggctaaagcaccaggcgtttgtggcagagctggcttcccatgaagggtggctagagaacatcgatgcggaaggaaagcagctgatggatgagaagccccagtttacagccctggtgtcccaaaagctggaagccctgcaccggctctgggacgagctgcaggccaccacaaaggagaagacccagcacctctcggctgccaggagctccgacctgcgcttgcagacccatgctgacctcaacaagtggatcagcgccatggaggaccagctgcggtcagacgacccgggcaaggacctgaccagtgtcaatcggatgttggctaagctgaagcgagtggaggaccaagtgaatgtgcgaaaagaggagctgggggagctgtttgcccaggtgccttcaatgggagaggagggaggagatgcagacttgagcatcgagaagcggttcctggacctcctggaacccctaggaaggaggaagaagcagctggaatcatccagagccaagctgcagatcagccgggacttagaggatgagacgctttgggtggaggagaggctgcctctggcccagtcagccgactatggcactaatctgcaaactgtgcaactgttcatgaagaagaaccagacactgcagaatgagattctgggccatacgccgcgggttgaggatgtgctgcagagagggcagcagctggtggaggcggcggagatcgactgccaggaccttgaggagcgcctggggcacctgcagagctcctgggacaggctgcgggaggcagcggccgggaggctgcagcgactgagggacgccaacgaggcacagcagtactacctggatgcagacgaggctgaggcctggattggcgagcaggagctctacgtcatctccgatgagatccccaaggatgaagagggcgccattgtgatgctgaagcgacatttgcggcagcagcgtgcggtggaggactacggccggaacatcaagcagctggccagccgggcccagggcctgctgtctgcaggccaccctgagggggaacagatcatcagacttcaggggcaagtggacaagcactacgcagggctgaaggacgtggcggaagagcgcaagcgcaagctggagaacatgtaccacctgttccagctcaagcgggagaccgacgacctggagcagtggatttcagaaaaggagctagtggcctcttccccggaaatggggcaagactttgaccacgtgactcttctgcgggacaagttccgggactttgcccgggagaccggggcgattgggcaggagcgggtggacaatgtgaatgccttcatcgagcgactcatcgacgcgggccacagcgaggcggccaccatcgccgagtggaaggacgggctgaacgagatgtgggcagacctcctggagctcattgacacgcgcatgcagctgctggccgcctcctatgacctgcaccgctacttctacacgggtgccgagatcctgggcctcatcgacgagaagcaccgcgagctgcccgaggacgtggggctggacgccagcacggccgagtccttccaccgggtgcacacagccttcgagcgggagctccacctgctgggtgtccaggtgcagcagttccaggacgtggccacccgtctgcagacagcatatgctggggagaaggcagaggccatccagaacaaggagcaggaggtgtctgccgcgtggcaggcgctgctcgatgcctgtgccgggcgccggacccagctagtggacacggcggataaattccgcttcttcagcatggcccgtgacctcctctcctggatggagagcatcatccggcagatcgagacccaggagaggcccagggatgtctcctctgtggaactgctcatgaagtatcaccagggcatcaatgcagagattgaaacccggagcaagaacttcagtgcctgcctggagcttggcgagtccctgctgcagcggcagcaccaggcctcagaggagatccgcgagaaactgcagcaggtgatgtccaggaggaaagagatgaatgagaagtgggaagcccgctgggagcggctccgcatgttgctggaggtgtgccagttctcgagggatgcctctgtggctgaggcgtggctgattgcccaggagccctacctggccagcggggactttggacacacagtggacagtgtggagaagctcatcaagaggcatgaggcttttgagaagtccacggccagctgggcagagcgctttgctgccctggagaagcccaccacgcttgagctgaaagaacgccagattgcagagagacccgcagaggagactgggcctcaagaggaggaaggcgagacagcaggggaggctccagtttcccaccatgcggccaccgagagaacgtccccggtcagtctctggtctcgtttgtctagttcctgggagtcactgcagccagagccctctcacccctactaggctcagcccaggtggaggcgagatgagctggcgcagccccgccctccatcctccccacatccctgcagccacctcccagcagagcaggctacgtcctcactgaggtgttcttcatgagagtactagcctcctccactcctccccacagcgcagaggaaacaggccagcccagtgacatgacgttattagttttgttttacctaatgtaataaattttattgtataaatatatcaccatttacatgaggggaaacacta

SEQ ID NO: 185362 - DNA, 10063 bp, Homo sapiens
  Payload ID: 16500
  Gene Symbol: SPTB
  Gene Name: spectrin, beta, erythrocytic
  Uniprot ID: P11277
  ENST ID: ENST00000389722
  CDS Start-End: 55-7041
cagggatccttccatgaagactgaggcaggcggagctgctaagagcctgctgacatgacatcggccacagagtttgaaaatgtgggcaaccagccaccttacagcaggatcaatgcccgctgggacgccccagacgacgagctggataatgacaacagctcagccaggctctttgagaggtcccggataaaggccttggcagatgagcgggaagttgttcagaaaaagaccttcacgaaatgggtgaactcgcacctggctcgagtgtcctgccgcatcaccgatctctacaaggacctgcgggatgggcgcatgctcatcaagctgctggaggtgctctctggagagatgctgccaaagcccaccaaggggaagatgcgcatccactgcctggagaatgtggacaaggctctccagttcctcaaggagcagcgtgtacacctggagaacatgggctcccacgacattgtagatggcaaccaccgcctggtcctgggcctcatctggaccatcatcctccgcttccagattcaggacattgtggtccaaactcaggaaggtcgtgaaacacgctcagccaaggatgcgttgctgttgtggtgtcagatgaagacggcaggctaccctcatgttaatgtcaccaactttacctccagctggaaggatggcttggcctttaatgccctgatacacaagcaccggcccgacctgatcgactttgataagctgaaggactccaatgcccggcacaacctggagcacgcattcaatgtggctgagcgccagctgggcatcatcccgctcctcgaccccgaagatgtctttacggaaaaccctgatgagaaatccatcatcacctatgtggtggccttttaccactacttctccaagatgaaggtgctggcagtggagggcaagcgtgtcggcaaggttattgaccatgccattgagactgagaagatgattgaaaagtacagcgggctagcctcggacctgctcacctggatcgagcagaccatcactgtcctgaacagccgcaagtttgccaactcgctgacgggcgtccagcagcagctgcaggccttcagcacctaccgcaccgtggagaagccgcccaagtttcaagagaaggggaatctggaagttctactttttaccatccagtcccggatgagagccaacaatcagaaagtgtacacaccccacgatgggaaactagtgtctgacatcaacagggcctgggaaagcctggaggaagctgagtatcggcgggagctggccctgagaaatgagctcattcggcaggagaagctagagcaactggcccggcgctttgaccggaaggccgcaatgagagagacctggctcagtgaaaaccagcgcctcgtggcccaggataactttgggtatgacctggcagctgtggaggccgccaagaagaagcatgaggccatcgagaccgacacggctgcctacgaggagcgggtgagagccctggaggacctggctcaggagctggagaaagagaactaccatgaccagaagcgcatcacggcccgcaaggacaatatactgcgcctatggagctacctgcaggagctgctgcagtcccggcgccagaggctcgagaccaccctggcactgcagaagctcttccaggacatgctgcacagcatcgactggatggatgagatcaaggctcacctcttgtctgccgagtttgggaagcacttgttggaggttgaagacctgctacagaagcacaagttgatggaagctgacatcgccatccaaggggacaaagtgaaggccatcaccgcagccaccctgaagttcaccgaggggaaagggtaccagccttgtgacccccaggtcatccaggaccgcatcagccacttggagcagtgctttgaggagctgagcaacatggcagctgggcggaaggcccaactggagcagtccaaacgactctggaagttcttctgggagatggatgaggctgagagctggatcaaggagaaggagcagatctattcttccctggactatggcaaagacctgaccagtgtgctcatcttacagcgcaagcacaaggcctttgaggatgagctccgtgggctggatgctcacctggagcagatcttccaggaggctcatggcatggttgcgcgcaagcagtttgggcacccgcagatcgaggcccgcataaaggaggtgtcggcacagtgggaccagctgaaggacctggctgccttctgcaagaagaacctccaggatgctgagaactttttccagttccagggcgatgcggatgacctgaaggcttggctgcaagacgcccaccggctgctctctggtgaagatgtggggcaggacgaaggggccacgcgggccctggggaaaaagcacaaggacttcctggaggagctggaggagagccgtggggtgatggagcacctggagcagcaggcccagggattccccgaagagtttcgggattccccagatgtgacccatcggctgcaggccctgcgggagctctaccaacaggtggtggcccaggcggacctgcgtcagcagaggctgcaggaagccctggacctgtacacggtgttcggggagacagacgcctgtgagctgtggatgggagagaaggagaagtggctggccgagatggaaatgccagacaccctggaggacctggaggtcgtgcagcacaggttcgacatcctggaccaggagatgaagaccttgatgactcagattgatggtgtgaacctcgctgccaacagcttggtagagagtggccacccacgcagcagggaggtgaagcagtaccaggaccatctgaacaccaggtggcaggcatttcagaccctggtgtcggagcggcgggaggctgtggactcagccctccgagtgcacaactactgcgtagattgcgaggagaccagcaagtggatcacggacaagacaaaggtagtggagtccacaaaagacctggggcgggacctggcaggtatcatcgccatccagaggaagttgtcagggctggagcgtgacgtggccgccatccaggcccgtgtggatgccctggagcgtgagtcccagcagctgatggactcgcaccctgagcagaaggaggatattggtcagcggcaaaaacacttggaggagctgtggcagggcctgcagcaatccctgcagggccaggaggacttgctgggggaagtcagccagctgcaggccttcctgcaggatctggatgacttccaggcctggctctccatcacccagaaggctgtggcctctgaggacatgcccgaatccctcccagaggctgagcagctcctgcagcagcatgcaggtatcaaggatgagattgacgggcaccaagacagctaccagcgtgttaaggagtctggggagaaagtgatccaaggccagacggacccagagtatctgcttctgggccagcggctggagggcctggatactggctggaatgccctgggcaggatgtgggagagccgcagccacaccctcgctcagtgccttggcttccaggagttccagaaagatgccaagcaggctgaagccatcctcagcaaccaggaatacactctggctcacttggagcccccagactccctggaagctgcagaggctgggatccggaagtttgaggatttcttggggtctatggagaacaaccgggataaggtcttgagtcctgtggactctggaaacaagctggtagctgagggaaacctatactcagacaagatcaaggagaaggtgcagctgattgaggacaggcacaggaagaacaacgagaaggcccaggaggcctctgtcctactgagagacaacctggagctacagaacttcctccagaactgccaggagctcactctctggatcaacgacaagctgctgacatctcaggatgtctcctatgatgaagcacgaaaccttcacaataaatggctaaagcaccaggcgtttgtggcagagctggcttcccatgaagggtggctagagaacatcgatgcggaaggaaagcagctgatggatgagaagccccagtttacagccctggtgtcccaaaagctggaagccctgcaccggctctgggacgagctgcaggccaccacaaaggagaagacccagcacctctcggctgccaggagctccgacctgcgcttgcagacccatgctgacctcaacaagtggatcagcgccatggaggaccagctgcggtcagacgacccgggcaaggacctgaccagtgtcaatcggatgttggctaagctgaagcgagtggaggaccaagtgaatgtgcgaaaagaggagctgggggagctgtttgcccaggtgccttcaatgggagaggagggaggagatgcagacttgagcatcgagaagcggttcctggacctcctggaacccctaggaaggaggaagaagcagctggaatcatccagagccaagctgcagatcagccgggacttagaggatgagacgctttgggtggaggagaggctgcctctggcccagtcagccgactatggcactaatctgcaaactgtgcaactgttcatgaagaagaaccagacactgcagaatgagattctgggccatacgccgcgggttgaggatgtgctgcagagagggcagcagctggtggaggcggcggagatcgactgccaggaccttgaggagcgcctggggcacctgcagagctcctgggacaggctgcgggaggcagcggccgggaggctgcagcgactgagggacgccaacgaggcacagcagtactacctggatgcagacgaggctgaggcctggattggcgagcaggagctctacgtcatctccgatgagatccccaaggatgaagagggcgccattgtgatgctgaagcgacatttgcggcagcagcgtgcggtggaggactacggccggaacatcaagcagctggccagccgggcccagggcctgctgtctgcaggccaccctgagggggaacagatcatcagacttcaggggcaagtggacaagcactacgcagggctgaaggacgtggcggaagagcgcaagcgcaagctggagaacatgtaccacctgttccagctcaagcgggagaccgacgacctggagcagtggatttcagaaaaggagctagtggcctcttccccggaaatggggcaagactttgaccacgtgactcttctgcgggacaagttccgggactttgcccgggagaccggggcgattgggcaggagcgggtggacaatgtgaatgccttcatcgagcgactcatcgacgcgggccacagcgaggcggccaccatcgccgagtggaaggacgggctgaacgagatgtgggcagacctcctggagctcattgacacgcgcatgcagctgctggccgcctcctatgacctgcaccgctacttctacacgggtgccgagatcctgggcctcatcgacgagaagcaccgcgagctgcccgaggacgtggggctggacgccagcacggccgagtccttccaccgggtgcacacagccttcgagcgggagctccacctgctgggtgtccaggtgcagcagttccaggacgtggccacccgtctgcagacagcatatgctggggagaaggcagaggccatccagaacaaggagcaggaggtgtctgccgcgtggcaggcgctgctcgatgcctgtgccgggcgccggacccagctagtggacacggcggataaattccgcttcttcagcatggcccgtgacctcctctcctggatggagagcatcatccggcagatcgagacccaggagaggcccagggatgtctcctctgtggaactgctcatgaagtatcaccagggcatcaatgcagagattgaaacccggagcaagaacttcagtgcctgcctggagcttggcgagtccctgctgcagcggcagcaccaggcctcagaggagatccgcgagaaactgcagcaggtgatgtccaggaggaaagagatgaatgagaagtgggaagcccgctgggagcggctccgcatgttgctggaggtgtgccagttctcgagggatgcctctgtggctgaggcgtggctgattgcccaggagccctacctggccagcggggactttggacacacagtggacagtgtggagaagctcatcaagaggcatgaggcttttgagaagtccacggccagctgggcagagcgctttgctgccctggagaagcccaccacgcttgagctgaaagaacgccagattgcagagagacccgcagaggagactgggcctcaagaggaggaaggcgagacagcaggggaggctccagtttcccaccatgcggccaccgagagaacgtccccgggggaagaagagggaacgtggcctcagaacctgcagcagccaccaccgccgggtcagcacaaggatgggcagaaatccactggggatgagaggcccaccacggagcccctctttaaggtcctagatacgcctctgagcgagggtgatgagcccgcaacgctgccggccccgcgggaccatgggcagagtgtgcagatggaaggctacctgggccgcaagcatgacctggaggggcccaacaagaaggcttccaacaggtcctggaacaacctgtactgtgtgctcaggaacagtgagctaaccttctacaaggatgccaagaacctggccctggggatgccctaccatggggaggaacccctggccctgagacatgccatctgtgagattgctgccaactacaagaagaagaagcacgtctttaagctgaggctgagtaatggcagcgagtggctcttccatggcaaggatgaggaggagatgctgtcctggctgcagggcgtgagcaccgccatcaacgagtcccagagcatccgcgtcaaggcgcagagcctgcccctgccttccctctccggccccgacgccagcctcggcaagaaagacaaggagaagagattcagcttcttccccaaaaagaagtagcaggtggggctggcgggcgcggcggagtcgggacgcgcagagaccgggcagcccaggccttggcctcctctcgccgccgcccgccggtcgaatcgagatgagtcgagtcgcgggccgggcccccgggccccacgctgcactgcaaaagctgccttcgcccgcgtgtcctgggccgacgccccctccatgccctcgcccgcgctggctccgctccagggacaggggctcccagctcctctggcgcctttggggcctccaggcctgggggcaggaaacggttctctgaggcacacgccctcctctcccaccctcctcctgagccgagggggcacaggccccttacccccaaccaaaaaaaaaaaaaaaaaagagctggagaaggctgatggggttcttcaaacgctgcccgttcctaaagcaagtcttgcttcgggtcacctcccacctggtggcagccagggaaaggggaaaggaagaagacactggaaatgcatggccagccccctaggggcatgaggaaggagccttcaggtggcccacaaagccctagctctgggccaggggctctggggggctgaggggaccagactgggtgcagggccttgggagctgccagcctccttcccactgggcttccgcagaactgggactctcacttcaggggccaccacatccctcctctctgcttctccccccagatcaaagggtaccctcccacggttggcagggcctggctgagtgcctctagcaccctttgtgccaccacaggcggtcccaggaagggcagcaaggtcagaccattcctcattgaaaaccgtggctagggcacagggctctgatctgaaggagtgacaggtgcgtcacaacactgcctaaggctctccctctcaatgctgggaccctcgccccactcccagtggcagccaaaccagcaatatccaacagacataggccccctacgggacagtgtgggcccccagatataagatggataccccccgcacctgcagtaaagcatcccaaagccaaatgctcaattgcatcctgtctgcagctgggactttggagggtaatggctgggcagacagtaaagttgatcatctgttttctcggggtggcagacgcagccatgtcttggtatcaccacccatgtgacagctactcctgcacaactgggacaaatgtcagggccagagccatgaaggtgtggtaccccttgatcagcttctccacgtcctggccccaggtcttggcggggagggggtcacatgagtacagaggtcaaatatctaccaccctccagccctgagcaccagaagctctgcaaccaacgtccccaggaatggccttccccttgctgctcaggtcatacttctggaggaagagaaagctcattccatattttccccaccactctactccgaaagcaacacagttctggcccagtatcaaactagggttaggtccaagagagcagtcaagcgggtcgggggtgggggggagggcggagggcagcaggcattttcccccaaggaaaccatgaaagtccccagggcctgcagtcaagtttctatcaccttccccgtgagaaggaccttagttccatggagatgaagtgggtgaggttcaggtagaagccacaggggcaggcatccagaatgaggccccctgaggaaccctgagtgctgaccagtgccggcagaaatcagttccaccctgtggccctgacactatatgtcagggtgacaccaactgcagcaggcaggagccacaggaaggaagacgtcatccgatggagcctgacatccccaggttcccgccctggtgagcaaggtcttcatttggctttggtacatatgaccctatacagggaacctagtgtgtatcactcaccagcctctttctgtatctggggaaaccaaggcagtgaggtgactgcactcacctagcaataaagtaggcctttggtgcacttgcaggcatgtcctcctctggggcagagagcaggttccttgctgaagggcagatggtggcaaacatctccctcaactgtttccctgggccagtctttagggagcctagggacaagggcccaccctcccccttccacgtgtgccaaatcagcacctgaagtgaggcatttccagcaagcaactccacagacccgagaaaggaagggctctagtggaagagctagcatctcaccaccccaggtcccctggcctggtccagggcagccagctgcatgtgaccattctgttgccagctccccacacatccctcctgtcacccaggctccaagacattcgaccaactagactgaaaatgcaggcatccagctttgggagaccctgtgtgtgccacaccagggctaagctctcccagtgccctagcaaggtctttttttttttttctctccttattctactctacagtcttttgacagtattcccaaacgaggttgacacagctccagtccacaccagcataccaggcttccttcccagggcagtttagaggaagctccttctgggcaaggtcaggcggtcctccttccctctctccttcccctttgtcccagcctcaactgactctggctgtgggaggtgtggagggtccttaggcttccctccccaacctggcctccaccaacacccctaacaggaggcccgtggaaggctcagcctctcctccgcatccctcctccttcctgcctatcggagggagccagggtcccctaggctgaccctgaatcctcttcctcccttcatgggaggggggcaggaatccagaggaggatgaagccagcgggaccacatggcttggtggcttggacaaacaagctcagggaggaaatgaggaggcggcggctgcagaggaatgcaaccctgttgggcacagaccatgcaatctggggctggccctggggccagctgggtcctgtcctccacctgctcaaccgtgcttccaccaaccagaggaaacccatttactagtttttctaataaatcaataatgctcc

SEQ ID NO: 185363 - DNA, 3456 bp, Homo sapiens
  Payload ID: 16500
  Gene Symbol: SPTB
  Gene Name: spectrin, beta, erythrocytic
  ENST ID: ENST00000553938
  CDS Start-End: 1-3087
ggaaagcagctgatggatgagaagccccagtttacagccctggtgtcccaaaagctggaagccctgcaccggctctgggacgagctgcaggccaccacaaaggagaagacccagcacctctcggctgccaggagctccgacctgcgcttgcagacccatgctgacctcaacaagtggatcagcgccatggaggaccagctgcggtcagacgacccgggcaaggacctgaccagtgtcaatcggatgttggctaagctgaagcgagtggaggaccaagtgaatgtgcgaaaagaggagctgggggagctgtttgcccaggtgccttcaatgggagaggagggaggagatgcagacttgagcatcgagaagcggttcctggacctcctggaacccctaggaaggaggaagaagcagctggaatcatccagagccaagctgcagatcagccgggacttagaggatgagacgctttgggtggaggagaggctgcctctggcccagtcagccgactatggcactaatctgcaaactgtgcaactgttcatgaagaagaaccagacactgcagaatgagattctgggccatacgccgcgggttgaggatgtgctgcagagagggcagcagctggtggaggcggcggagatcgactgccaggaccttgaggagcgcctggggcacctgcagagctcctgggacaggctgcgggaggcagcggccgggaggctgcagcgactgagggacgccaacgaggcacagcagtactacctggatgcagacgaggctgaggcctggattggcgagcaggagctctacgtcatctccgatgagatccccaaggatgaagagggcgccattgtgatgctgaagcgacatttgcggcagcagcgtgcggtggaggactacggccggaacatcaagcagctggccagccgggcccagggcctgctgtctgcaggccaccctgagggggaacagatcatcagacttcaggggcaagtggacaagcactacgcagggctgaaggacgtggcggaagagcgcaagcgcaagctggagaacatgtaccacctgttccagctcaagcgggagaccgacgacctggagcagtggatttcagaaaaggagctagtggcctcttccccggaaatggggcaagactttgaccacgtgactcttctgcgggacaagttccgggactttgcccgggagaccggggcgattgggcaggagcgggtggacaatgtgaatgccttcatcgagcgactcatcgacgcgggccacagcgaggcggccaccatcgccgagtggaaggacgggctgaacgagatgtgggcagacctcctggagctcattgacacgcgcatgcagctgctggccgcctcctatgacctgcaccgctacttctacacgggtgccgagatcctgggcctcatcgacgagaagcaccgcgagctgcccgaggacgtggggctggacgccagcacggccgagtccttccaccgggtgcacacagccttcgagcgggagctccacctgctgggtgtccaggtgcagcagttccaggacgtggccacccgtctgcagacagcatatgctggggagaaggcagaggccatccagaacaaggagcaggaggtgtctgccgcgtggcaggcgctgctcgatgcctgtgccgggcgccggacccagctagtggacacggcggataaattccgcttcttcagcatggcccgtgacctcctctcctggatggagagcatcatccggcagatcgagacccaggagaggcccagggatgtctcctctgtggaactgctcatgaagtatcaccagggcatcaatgcagagattgaaacccggagcaagaacttcagtgcctgcctggagcttggcgagtccctgctgcagcggcagcaccaggcctcagaggagatccgcgagaaactgcagcaggtgatgtccaggaggaaagagatgaatgagaagtgggaagcccgctgggagcggctccgcatgttgctggaggtgtgccagttctcgagggatgcctctgtggctgaggcgtggctgattgcccaggagccctacctggccagcggggactttggacacacagtggacagtgtggagaagctcatcaagaggcatgaggcttttgagaagtccacggccagctgggcagagcgctttgctgccctggagaagcccaccacgcttgagctgaaagaacgccagattgcagagagacccgcagaggagactgggcctcaagaggaggaaggcgagacagcaggggaggctccagtttcccaccatgcggccaccgagagaacgtccccgggggaagaagagggaacgtggcctcagaacctgcagcagccaccaccgccgggtcagcacaaggatgggcagaaatccactggggatgagaggcccaccacggagcccctctttaaggtcctagatacgcctctgagcgagggtgatgagcccgcaacgctgccggccccgcgggaccatgggcagagtgtgcagatggaaggctacctgggccgcaagcatgacctggaggggcccaacaagaaggcttccaacagtaagggagaagagggagaggagaggagggagacagaagaggaggatgaagaggaggaggaaacagagtctgttgctgtagaaatgcagcaacatgcttcccacgtgtcctggaacaacctgtactgtgtgctcaggaacagtgagctaaccttctacaaggatgccaagaacctggccctggggatgccctaccatggggaggaacccctggccctgagacatgccatctgtgagattgctgccaactacaagaagaagaagcacgtctttaagctgaggctgagtaatggcagcgagtggctcttccatggcaaggatgaggaggagatgctgtcctggctgcagggcgtgagcaccgccatcaacgagtcccagagcatccgcgtcaaggcgcagagcctgcccctgccttccctctccggccccgacgccagcctcggcaagaaagacaaggagaagagattcagcttcttccccaaaaagaagtagcaggtggggctggcgggcgcggcggagtcgggacgcgcagagaccgggcagcccaggccttggcctcctctcgccgccgcccgccggtcgaatcgagatgagtcgagtcgcgggccgggcccccgggccccacgctgcactgcaaaagctgccttcgcccgcgtgtcctgggccgacgccccctccatgccctcgcccgcgctggctccgctccagggacaggggctcccagctcctctggcgcctttggggcctccaggcctgggggcaggaaacggttctctgaggcacacgccctcctctcccaccctcctcctgagccgagggggcacaggccccttacccccaaccaaaaaaaaaaaaaaaaaa

SEQ ID NO: 185364 - DNA, 10153 bp, Homo sapiens
  Payload ID: 16500
  Gene Symbol: SPTB
  Gene Name: spectrin, beta, erythrocytic
  Uniprot ID: P11277
  ENST ID: ENST00000556626
  CDS Start-End: 144-7130
gtgccaggagccccgcgctgccctcctccccctgcgccgccgccgccgccacccccgggctcggggtggcccccgcttcagtcccagggcagggatccttccatgaagactgaggcaggcggagctgctaagagcctgctgacatgacatcggccacagagtttgaaaatgtgggcaaccagccaccttacagcaggatcaatgcccgctgggacgccccagacgacgagctggataatgacaacagctcagccaggctctttgagaggtcccggataaaggccttggcagatgagcgggaagttgttcagaaaaagaccttcacgaaatgggtgaactcgcacctggctcgagtgtcctgccgcatcaccgatctctacaaggacctgcgggatgggcgcatgctcatcaagctgctggaggtgctctctggagagatgctgccaaagcccaccaaggggaagatgcgcatccactgcctggagaatgtggacaaggctctccagttcctcaaggagcagcgtgtacacctggagaacatgggctcccacgacattgtagatggcaaccaccgcctggtcctgggcctcatctggaccatcatcctccgcttccagattcaggacattgtggtccaaactcaggaaggtcgtgaaacacgctcagccaaggatgcgttgctgttgtggtgtcagatgaagacggcaggctaccctcatgttaatgtcaccaactttacctccagctggaaggatggcttggcctttaatgccctgatacacaagcaccggcccgacctgatcgactttgataagctgaaggactccaatgcccggcacaacctggagcacgcattcaatgtggctgagcgccagctgggcatcatcccgctcctcgaccccgaagatgtctttacggaaaaccctgatgagaaatccatcatcacctatgtggtggccttttaccactacttctccaagatgaaggtgctggcagtggagggcaagcgtgtcggcaaggttattgaccatgccattgagactgagaagatgattgaaaagtacagcgggctagcctcggacctgctcacctggatcgagcagaccatcactgtcctgaacagccgcaagtttgccaactcgctgacgggcgtccagcagcagctgcaggccttcagcacctaccgcaccgtggagaagccgcccaagtttcaagagaaggggaatctggaagttctactttttaccatccagtcccggatgagagccaacaatcagaaagtgtacacaccccacgatgggaaactagtgtctgacatcaacagggcctgggaaagcctggaggaagctgagtatcggcgggagctggccctgagaaatgagctcattcggcaggagaagctagagcaactggcccggcgctttgaccggaaggccgcaatgagagagacctggctcagtgaaaaccagcgcctcgtggcccaggataactttgggtatgacctggcagctgtggaggccgccaagaagaagcatgaggccatcgagaccgacacggctgcctacgaggagcgggtgagagccctggaggacctggctcaggagctggagaaagagaactaccatgaccagaagcgcatcacggcccgcaaggacaatatactgcgcctatggagctacctgcaggagctgctgcagtcccggcgccagaggctcgagaccaccctggcactgcagaagctcttccaggacatgctgcacagcatcgactggatggatgagatcaaggctcacctcttgtctgccgagtttgggaagcacttgttggaggttgaagacctgctacagaagcacaagttgatggaagctgacatcgccatccaaggggacaaagtgaaggccatcaccgcagccaccctgaagttcaccgaggggaaagggtaccagccttgtgacccccaggtcatccaggaccgcatcagccacttggagcagtgctttgaggagctgagcaacatggcagctgggcggaaggcccaactggagcagtccaaacgactctggaagttcttctgggagatggatgaggctgagagctggatcaaggagaaggagcagatctattcttccctggactatggcaaagacctgaccagtgtgctcatcttacagcgcaagcacaaggcctttgaggatgagctccgtgggctggatgctcacctggagcagatcttccaggaggctcatggcatggttgcgcgcaagcagtttgggcacccgcagatcgaggcccgcataaaggaggtgtcggcacagtgggaccagctgaaggacctggctgccttctgcaagaagaacctccaggatgctgagaactttttccagttccagggcgatgcggatgacctgaaggcttggctgcaagacgcccaccggctgctctctggtgaagatgtggggcaggacgaaggggccacgcgggccctggggaaaaagcacaaggacttcctggaggagctggaggagagccgtggggtgatggagcacctggagcagcaggcccagggattccccgaagagtttcgggattccccagatgtgacccatcggctgcaggccctgcgggagctctaccaacaggtggtggcccaggcggacctgcgtcagcagaggctgcaggaagccctggacctgtacacggtgttcggggagacagacgcctgtgagctgtggatgggagagaaggagaagtggctggccgagatggaaatgccagacaccctggaggacctggaggtcgtgcagcacaggttcgacatcctggaccaggagatgaagaccttgatgactcagattgatggtgtgaacctcgctgccaacagcttggtagagagtggccacccacgcagcagggaggtgaagcagtaccaggaccatctgaacaccaggtggcaggcatttcagaccctggtgtcggagcggcgggaggctgtggactcagccctccgagtgcacaactactgcgtagattgcgaggagaccagcaagtggatcacggacaagacaaaggtagtggagtccacaaaagacctggggcgggacctggcaggtatcatcgccatccagaggaagttgtcagggctggagcgtgacgtggccgccatccaggcccgtgtggatgccctggagcgtgagtcccagcagctgatggactcgcaccctgagcagaaggaggatattggtcagcggcaaaaacacttggaggagctgtggcagggcctgcagcaatccctgcagggccaggaggacttgctgggggaagtcagccagctgcaggccttcctgcaggatctggatgacttccaggcctggctctccatcacccagaaggctgtggcctctgaggacatgcccgaatccctcccagaggctgagcagctcctgcagcagcatgcaggtatcaaggatgagattgacgggcaccaagacagctaccagcgtgttaaggagtctggggagaaagtgatccaaggccagacggacccagagtatctgcttctgggccagcggctggagggcctggatactggctggaatgccctgggcaggatgtgggagagccgcagccacaccctcgctcagtgccttggcttccaggagttccagaaagatgccaagcaggctgaagccatcctcagcaaccaggaatacactctggctcacttggagcccccagactccctggaagctgcagaggctgggatccggaagtttgaggatttcttggggtctatggagaacaaccgggataaggtcttgagtcctgtggactctggaaacaagctggtagctgagggaaacctatactcagacaagatcaaggagaaggtgcagctgattgaggacaggcacaggaagaacaacgagaaggcccaggaggcctctgtcctactgagagacaacctggagctacagaacttcctccagaactgccaggagctcactctctggatcaacgacaagctgctgacatctcaggatgtctcctatgatgaagcacgaaaccttcacaataaatggctaaagcaccaggcgtttgtggcagagctggcttcccatgaagggtggctagagaacatcgatgcggaaggaaagcagctgatggatgagaagccccagtttacagccctggtgtcccaaaagctggaagccctgcaccggctctgggacgagctgcaggccaccacaaaggagaagacccagcacctctcggctgccaggagctccgacctgcgcttgcagacccatgctgacctcaacaagtggatcagcgccatggaggaccagctgcggtcagacgacccgggcaaggacctgaccagtgtcaatcggatgttggctaagctgaagcgagtggaggaccaagtgaatgtgcgaaaagaggagctgggggagctgtttgcccaggtgccttcaatgggagaggagggaggagatgcagacttgagcatcgagaagcggttcctggacctcctggaacccctaggaaggaggaagaagcagctggaatcatccagagccaagctgcagatcagccgggacttagaggatgagacgctttgggtggaggagaggctgcctctggcccagtcagccgactatggcactaatctgcaaactgtgcaactgttcatgaagaagaaccagacactgcagaatgagattctgggccatacgccgcgggttgaggatgtgctgcagagagggcagcagctggtggaggcggcggagatcgactgccaggaccttgaggagcgcctggggcacctgcagagctcctgggacaggctgcgggaggcagcggccgggaggctgcagcgactgagggacgccaacgaggcacagcagtactacctggatgcagacgaggctgaggcctggattggcgagcaggagctctacgtcatctccgatgagatccccaaggatgaagagggcgccattgtgatgctgaagcgacatttgcggcagcagcgtgcggtggaggactacggccggaacatcaagcagctggccagccgggcccagggcctgctgtctgcaggccaccctgagggggaacagatcatcagacttcaggggcaagtggacaagcactacgcagggctgaaggacgtggcggaagagcgcaagcgcaagctggagaacatgtaccacctgttccagctcaagcgggagaccgacgacctggagcagtggatttcagaaaaggagctagtggcctcttccccggaaatggggcaagactttgaccacgtgactcttctgcgggacaagttccgggactttgcccgggagaccggggcgattgggcaggagcgggtggacaatgtgaatgccttcatcgagcgactcatcgacgcgggccacagcgaggcggccaccatcgccgagtggaaggacgggctgaacgagatgtgggcagacctcctggagctcattgacacgcgcatgcagctgctggccgcctcctatgacctgcaccgctacttctacacgggtgccgagatcctgggcctcatcgacgagaagcaccgcgagctgcccgaggacgtggggctggacgccagcacggccgagtccttccaccgggtgcacacagccttcgagcgggagctccacctgctgggtgtccaggtgcagcagttccaggacgtggccacccgtctgcagacagcatatgctggggagaaggcagaggccatccagaacaaggagcaggaggtgtctgccgcgtggcaggcgctgctcgatgcctgtgccgggcgccggacccagctagtggacacggcggataaattccgcttcttcagcatggcccgtgacctcctctcctggatggagagcatcatccggcagatcgagacccaggagaggcccagggatgtctcctctgtggaactgctcatgaagtatcaccagggcatcaatgcagagattgaaacccggagcaagaacttcagtgcctgcctggagcttggcgagtccctgctgcagcggcagcaccaggcctcagaggagatccgcgagaaactgcagcaggtgatgtccaggaggaaagagatgaatgagaagtgggaagcccgctgggagcggctccgcatgttgctggaggtgtgccagttctcgagggatgcctctgtggctgaggcgtggctgattgcccaggagccctacctggccagcggggactttggacacacagtggacagtgtggagaagctcatcaagaggcatgaggcttttgagaagtccacggccagctgggcagagcgctttgctgccctggagaagcccaccacgcttgagctgaaagaacgccagattgcagagagacccgcagaggagactgggcctcaagaggaggaaggcgagacagcaggggaggctccagtttcccaccatgcggccaccgagagaacgtccccgggggaagaagagggaacgtggcctcagaacctgcagcagccaccaccgccgggtcagcacaaggatgggcagaaatccactggggatgagaggcccaccacggagcccctctttaaggtcctagatacgcctctgagcgagggtgatgagcccgcaacgctgccggccccgcgggaccatgggcagagtgtgcagatggaaggctacctgggccgcaagcatgacctggaggggcccaacaagaaggcttccaacaggtcctggaacaacctgtactgtgtgctcaggaacagtgagctaaccttctacaaggatgccaagaacctggccctggggatgccctaccatggggaggaacccctggccctgagacatgccatctgtgagattgctgccaactacaagaagaagaagcacgtctttaagctgaggctgagtaatggcagcgagtggctcttccatggcaaggatgaggaggagatgctgtcctggctgcagggcgtgagcaccgccatcaacgagtcccagagcatccgcgtcaaggcgcagagcctgcccctgccttccctctccggccccgacgccagcctcggcaagaaagacaaggagaagagattcagcttcttccccaaaaagaagtagcaggtggggctggcgggcgcggcggagtcgggacgcgcagagaccgggcagcccaggccttggcctcctctcgccgccgcccgccggtcgaatcgagatgagtcgagtcgcgggccgggcccccgggccccacgctgcactgcaaaagctgccttcgcccgcgtgtcctgggccgacgccccctccatgccctcgcccgcgctggctccgctccagggacaggggctcccagctcctctggcgcctttggggcctccaggcctgggggcaggaaacggttctctgaggcacacgccctcctctcccaccctcctcctgagccgagggggcacaggccccttacccccaaccaaaaaaaaaaaaaaaaaagagctggagaaggctgatggggttcttcaaacgctgcccgttcctaaagcaagtcttgcttcgggtcacctcccacctggtggcagccagggaaaggggaaaggaagaagacactggaaatgcatggccagccccctaggggcatgaggaaggagccttcaggtggcccacaaagccctagctctgggccaggggctctggggggctgaggggaccagactgggtgcagggccttgggagctgccagcctccttcccactgggcttccgcagaactgggactctcacttcaggggccaccacatccctcctctctgcttctccccccagatcaaagggtaccctcccacggttggcagggcctggctgagtgcctctagcaccctttgtgccaccacaggcggtcccaggaagggcagcaaggtcagaccattcctcattgaaaaccgtggctagggcacagggctctgatctgaaggagtgacaggtgcgtcacaacactgcctaaggctctccctctcaatgctgggaccctcgccccactcccagtggcagccaaaccagcaatatccaacagacataggccccctacgggacagtgtgggcccccagatataagatggataccccccgcacctgcagtaaagcatcccaaagccaaatgctcaattgcatcctgtctgcagctgggactttggagggtaatggctgggcagacagtaaagttgatcatctgttttctcggggtggcagacgcagccatgtcttggtatcaccacccatgtgacagctactcctgcacaactgggacaaatgtcagggccagagccatgaaggtgtggtaccccttgatcagcttctccacgtcctggccccaggtcttggcggggagggggtcacatgagtacagaggtcaaatatctaccaccctccagccctgagcaccagaagctctgcaaccaacgtccccaggaatggccttccccttgctgctcaggtcatacttctggaggaagagaaagctcattccatattttccccaccactctactccgaaagcaacacagttctggcccagtatcaaactagggttaggtccaagagagcagtcaagcgggtcgggggtgggggggagggcggagggcagcaggcattttcccccaaggaaaccatgaaagtccccagggcctgcagtcaagtttctatcaccttccccgtgagaaggaccttagttccatggagatgaagtgggtgaggttcaggtagaagccacaggggcaggcatccagaatgaggccccctgaggaaccctgagtgctgaccagtgccggcagaaatcagttccaccctgtggccctgacactatatgtcagggtgacaccaactgcagcaggcaggagccacaggaaggaagacgtcatccgatggagcctgacatccccaggttcccgccctggtgagcaaggtcttcatttggctttggtacatatgaccctatacagggaacctagtgtgtatcactcaccagcctctttctgtatctggggaaaccaaggcagtgaggtgactgcactcacctagcaataaagtaggcctttggtgcacttgcaggcatgtcctcctctggggcagagagcaggttccttgctgaagggcagatggtggcaaacatctccctcaactgtttccctgggccagtctttagggagcctagggacaagggcccaccctcccccttccacgtgtgccaaatcagcacctgaagtgaggcatttccagcaagcaactccacagacccgagaaaggaagggctctagtggaagagctagcatctcaccaccccaggtcccctggcctggtccagggcagccagctgcatgtgaccattctgttgccagctccccacacatccctcctgtcacccaggctccaagacattcgaccaactagactgaaaatgcaggcatccagctttgggagaccctgtgtgtgccacaccagggctaagctctcccagtgccctagcaaggtctttttttttttttctctccttattctactctacagtcttttgacagtattcccaaacgaggttgacacagctccagtccacaccagcataccaggcttccttcccagggcagtttagaggaagctccttctgggcaaggtcaggcggtcctccttccctctctccttcccctttgtcccagcctcaactgactctggctgtgggaggtgtggagggtccttaggcttccctccccaacctggcctccaccaacacccctaacaggaggcccgtggaaggctcagcctctcctccgcatccctcctccttcctgcctatcggagggagccagggtcccctaggctgaccctgaatcctcttcctcccttcatgggaggggggcaggaatccagaggaggatgaagccagcgggaccacatggcttggtggcttggacaaacaagctcagggaggaaatgaggaggcggcggctgcagaggaatgcaaccctgttgggcacagaccatgcaatctggggctggccctggggccagctgggtcctgtcctccacctgctcaaccgtgcttccaccaaccagaggaaacccatttactagtttttctaataaatcaataatgctcca

SEQ ID NO: 185365 - DNA, 9075 bp, Homo sapiens
  Payload ID: 16501
  Gene Symbol: SPTBN1
  Gene Name: spectrin, beta, non-erythrocytic 1
  Uniprot ID: Q01082
  ENST ID: ENST00000333896
  CDS Start-End: 386-6853
ggtgtgcgcgctgcgcccgcgagctcccgggctcggcaaccgtggcatgcttaggattggccatatttaaaagttctgaagtagaacctgcgcctcctctctgcttctccctcctcctcagtaatttatttcgagcttccaggcaagggccacggaagaagggaaagcaagaaattagatgcctgtgtggtaactcctcgcggagctaaggtggactctcttgcagccaacttcccatcagatcaccctgctggacttgcagaccggaatggggctcgcctaaggagccgagcgctgcggaggctgctgcgtgttggatgggagtgggagggggctggagcgagatttccagggcgcagtcctccggggcgttacgccgggcataatggaattgcagaggacgtctagtatctccgggccgctgtcgccggcgtacacggggcaggtgccttacaactacaaccagctggaaggcagattcaagcagctgcaagatgagcgtgaagccgtgcagaagaagaccttcaccaagtgggtcaattcccaccttgcccgtgtgtcctgccggatcacagacctgtacactgaccttcgagatggacggatgctcatcaagctgctggaggtcctctctggagagaggctgcctaaacccaccaagggacgaatgcgcatccactgcttagagaatgtggacaaggcccttcagttcctgaaggagcagagagtccatcttgagaacatggggtcccatgacatcgtggatggaaaccaccggctgacccttggcctcatctggaccatcatcctgcgcttccagatccaggatatcagtgtggaaactgaagacaacaaagagaagaaatctgccaaggatgcattgctgttgtggtgccagatgaagacagctgggtaccccaatgtcaacattcacaatttcaccactagctggagggacggcatggccttcaatgcactgatacacaaacaccggcctgacctgatagattttgacaaactaaagaaatctaacgcacactacaacctgcagaatgcatttaatctggcagaacagcacctcggcctcactaaactgttggaccccgaagacatcagcgtggaccatcctgatgagaagtccataatcacttatgtggtgacttattaccactacttctctaagatgaaggccttagctgttgaaggaaaacgaattggaaaggtgcttgacaatgctattgaaacagaaaaaatgattgaaaagtatgaatcacttgcctctgaccttctggaatggattgaacaaaccatcatcattctgaacaatcgcaaatttgccaattcactggtcggggttcaacagcagcttcaggcattcaacacttaccgcactgtggagaaaccacccaaatttactgagaaggggaacttggaagtgctgctcttcaccattcagagcaagatgagggccaacaaccagaaggtctacatgccccgggaggggaagctcatctctgacatcaacaaggcctgggaaagactggaaaaagcggaacacgaaagagaactggctttgcggaatgagctcataagacaggagaaactggaacagctcgcccgcagatttgatcgcaaggcagctatgagggagacttggctgagcgaaaaccagcgtctggtgtctcaggacaactttgggtttgaccttcctgcagttgaggccgccacaaaaaagcacgaggccattgagacagacattgccgcatacgaggagcgtgtgcaggctgtggtagccgtggccagggagctcgaggccgagaattaccacgacatcaagcgcatcacagcgaggaaggacaatgtcatccggctctgggaatacctactggaactgctcagggcccggagacagcggctcgagatgaacctggggctgcagaagatattccaggaaatgctctacattatggactggatggatgaaatgaaggtgctagtattgtctcaagactatggcaaacacttacttggtgtggaagacctgttacagaagcacaccctggttgaagcagacattggcatccaggcagagcgggtgagaggtgtcaatgcctccgcccagaagttcgcaacagacggggaaggttacaagccctgtgacccccaggtgatccgagaccgcgtggcccacatggagttctgttatcaagagctttgccagctggcggctgagcgcagggcccgtctggaagagtcccgccgcctctggaagttcttctgggagatggcagaagaggaaggctggatacgggagaaggagaagatcctgtcctcggacgattacgggaaagacctgaccagcgtcatgcgcctgctcagcaagcaccgggcgttcgaggacgagatgagcggccgcagtggccactttgagcaggccatcaaggaaggcgaagacatgatcgcggaggagcacttcgggtcggagaagatccgtgagaggatcatttacatccgggagcagtgggccaacctagagcagctctcggccattcggaagaagcgcctggaggaggcctccctgctgcaccagttccaggcagatgctgatgacattgatgcctggatgctggacatcctcaagattgtctccagcagcgacgtgggccacgatgagtattccacacagtctctggtcaagaaacacaaggacgtggcggaagagatcgccaattacaggcccacccttgacacgctgcacgaacaagccagcgccctcccccaggagcatgccgagtctccagacgtgaggggcaggctgtcgggcatcgaggagcggtataaggaggtggcagagctgacgcggctgcggaagcaggcactccaggacactctggccctgtacaagatgttcagcgaggctgatgcctgtgagctctggatcgacgagaaggagcagtggctcaacaacatgcagatcccagagaagctggaggatctggaggtcatccagcacagatttgagagcctagaaccagaaatgaacaaccaggcttcccgggttgcagtggtgaaccagattgcacgccagctgatgcacagcggccacccaagtgagaaggaaatcaaagcccagcaggacaaactcaacacaaggtggagccagttcagagaactggttgacaggaagaaggatgccctcctgtctgccctgagcatccagaactaccacctcgagtgcaatgaaaccaaatcctggattcgggaaaagaccaaggtcatcgagtccacccaggacctgggcaatgacctggctggcgtcatggccctgcagcgcaagctgaccggcatggagcgggacttggtggccattgaggcaaagctgagtgacctgcagaaggaggcggagaagctggagtccgagcaccccgaccaggcccaggccatcctgtctcggctggccgagatcagcgacgtgtgggaggagatgaagaccaccctgaaaaaccgagaggcctccctgggagaggccagcaagctgcagcagttcctacgggacttggacgacttccagtcctggctctctaggacccagacagcgatcgcctcggaggacatgccaaacaccctgaccgaggctgagaagctgctcacgcagcacgagaacatcaagaacgagatcgacaactacgaggaggactaccagaagatgagggacatgggcgagatggtcacccaggggcagaccgatgcccagtacatgtttctgcggcagcggctgcaggccctggacactggatggaacgagctccacaagatgtgggagaacagacaaaatctcctatcccagtcacatgcctaccagcagttcctcagagacacgaagcaagccgaagcctttcttaacaaccaggagtatgttctggctcacactgaaatgcctaccaccttggaaggagctgaagcagcaattaaaaagcaagaggacttcatgaccaccatggacgccaatgaggagaagatcaatgctgtggtggagactggccggaggctggtgagcgatgggaacatcaactcagatcgcatccaggagaaggtggactctattgatgacagacataggaagaatcgtgagacagccagtgaacttttgatgaggttgaaggacaacagggatctacagaaattcctgcaagattgtcaagagctgtctctctggatcaatgagaagatgctcacagcccaggacatgtcttacgatgaagccagaaatctgcacagtaaatggttgaagcatcaagcatttatggcagaacttgcatccaacaaagaatggcttgacaaaatcgagaaggaaggaatgcagctcatttcagaaaagcctgagacggaagctgtggtgaaggagaaactcactggtttacataaaatgtgggaagtccttgaatccactacccagacaaaggcccagcggctctttgatgcaaacaaggccgaacttttcacccagagctgtgcagatctagacaaatggctgcacggcctggagagtcagattcagtctgatgactatggcaaagacctgaccagtgtcaatatcctgctgaaaaagcaacagatgctggagaatcagatggaagtgcggaagaaggagatcgaagagctccaaagccaagcccaggccctgagtcaggaagggaagagcaccgacgaggtagacagcaagcgcctcaccgtgcagaccaagttcatggagttgctggagcccttgaacgagaggaagcataacctgctggcctccaaagagatccatcagttcaacagggatgtggaggacgagatcttgtgggttggagagaggatgcctttggcaacttccacggatcatggccacaacctccagactgtgcagctgttaataaagaaaaatcagaccctccagaaagaaatccaggggcaccagcctcgcattgacgacatctttgagaggagccaaaacatcgtcactgacagcagcagcctcagcgctgaggccatcagacagaggcttgccgacctgaagcagctgtggggtctcctcattgaggagacagagaaacgccacaggcggctggaggaggcgcacagggcccagcagtactactttgacgctgctgaggccgaagcctggatgagcgagcaggagctgtacatgatgtcagaggagaaggccaaggatgagcagagtgctgtctccatgttgaagaagcaccagatcttagaacaagctgtggaggactatgcagagaccgtgcatcagctctccaagaccagccgggccctggtggccgacagccatcctgaaagtgagcgcattagcatgcggcagtccaaagtggataaactgtacgctggtctgaaagaccttgctgaagagagaagaggcaagctggatgagagacacaggttattccagctcaaccgggaggtggacgacctggagcagtggatcgctgagagggaggtggtcgcagggtcccatgaactgggacaggactatgagcatgtcacgatgttacaagaacgattccgggagtttgcccgagacaccgggaacattgggcaggagcgcgtggacacggtcaatcacctggcagatgagctcatcaactctggacattcagatgccgccaccatcgctgaatggaaggatggcctcaatgaagcctgggccgacctcctggagctcattgacacaagaacacagattcttgccgcttcctatgaactgcacaagttttaccacgatgccaaggagatctttgggcgtatacaggacaaacacaagaaactccctgaggagcttgggagagatcagaacacagtggagaccttacagagaatgcacactacatttgagcatgacatccaggctctgggcacacaggtgaggcagctgcaggaggatgcagcccgcctccaggcggcctatgcgggtgacaaggccgacgatatccagaagcgcgagaacgaggtcctggaagcctggaagtccctcctggacgcctgtgagagccgcagggtgcggctggtggacacaggggacaagttccgcttcttcagcatggtgcgcgacctcatgctctggatggaggatgtcatccggcagatcgaggcccaggagaagccaagggatgtatcatctgttgaactcttaatgaataatcatcaaggcatcaaagctgaaattgatgcacgtaatgacagtttcacaacctgcattgaacttgggaaatccctgttggcgagaaaacactatgcatctgaggagatcaaggaaaaattactgcagttgacggaaaagaggaaagaaatgatcgacaagtgggaagaccgatgggaatggttaagactgattctggaggtccatcagttctcaagagacgccagtgtggccgaggcctggctgcttggacaggagccgtacctatccagccgagagataggccagagcgtggacgaggtggagaagctcatcaagcgccacgaggcatttgaaaagtctgcagcaacctgggatgagaggttctctgccctggaaaggctgactacattggagttactggaagtgcgcagacagcaagaggaagaggagaggaagaggcggccgccttctcccgagccgagcacgaaggtttcagaggaagccgagtcccagcagcagtgggatacttcaaaaggagaacaagtttcccaaaacggtttgccagctgaacagggatctccacgggttagttaccgctctcaaacctaccaaaactacaaaaactttaatagcagacggacagccagtgaccagccatggtctggactgtgaagttcactaccatttgtcaagaatcaccctttccaaatcctctgggttttgactttttggcttccacttcacccaaaatgttaaaatttttacttaattcatagccttccttggtttcatatttgtttgcatttaattcatgtttgagtctcttaactgatggatgcccacttgccttaaagcagcatacttattttttgtttatttattgtgagctttttactttattaagattttacagcgaaacccttacatgagtaattgaaatgaaattaaatgagattacagcataatgaagaagaaaactagaatctaacaggtatgacacattcagttattctaacagggcacagtactgtgctatatgtagccgcctttacagatgttattaacctatagtagtttactattaactaggaagactggtgtatgaggagggagacattctgtaataagattaaaacctaaagtcagctgtgtaacattccatgaaagatgcattcatttattgaagatgacaaaaaagggagtcagatatattctggaagctattttaattttaggcacacaatctcatacattttgagacccttgggtcatttattactttttacaaactagttcctctctttttttctgccaagtcctgaattgaaaactgtaggcttccttgcacagatgttgcagccagcctcaggagtaaagtgcccgctgactgctgccgccacctctgtctcgctccctgtcagtgctgctggcacgtgggacgcggcaggtgacagccgttctcagcatgttttagaagcttgcctcacagacttccatgcctctccattcagccgatgacttcagggtgtcaaactgttttaatttttcaaacaaatggaacagaagccattgtggttcatcctgattacttgaacgttgcacttggtggaccgtgcctgggagcgctcgcatgccccctggcttcagaagtcatgtcagtgtctctgtagacaaactccactgtacatcttggattaatcttctgattcattgttcattttctcaagactttttgtggaattctctgataaaggaagcttttaggatggtatctatcaggccaccagcaggaattgaaaatgttttcacaaaaatccttttccttagaaataaaagctggtgacagagatggtttccttgtaccgataaaaacaaaaccaaatccatattatacatcaaaaccttgtgagacattcacttgctcttttgccatatttagatgtgtcagtggaatcagaaacctgttttgatatgtgttctctatgagttaagtctgatttgtctttttatttcatgatgcatgtcttttttttcttttgtcaggataacgtcatatagcatcttgtttgtttttccttatctctatgtacatatctatctacttctgactgtagatgggtatatagatagatgccaagcttcttatgttctgggggtagtatgcatcattattgggtctctgccttaaaacacatcaaaattcattttagacaaaaaaacttctgctttgtctttggtcattagggagctctaatgtgtgtttgtggctccaagttacattttgtgtttcattgatctatatgtatatatgtgatgttttcatatatatatgtgtgtgtgtttaaattttgtatcatcaggactgacacccaatttgacactttttgtatctagaagaccctccaaaaaaggaaccacataagcacacaagaaaagagtgctatgatgttcttagcatttgctatcatgcctatttttatctagatttttaaatgtagcttgtcataacaaaattttaattacaattggcttgtatgagaagaaaaagtatttttattgttttgagtgatgacgcagagactcagtgaacttgaaaatagcattgcttcgtgcactttgaataccaatcaggtgttttctgtgctactagttgtcacgttgcattcatgttcacctcctgatttaagtatctcgggtgtgcccagccactaaagcactctggactaatcgctaaagagaagcaacgtggggggtggggttgcgagggatgtgttcacatgtacccatcatttgatcatagcactgtgattgcttttgatgtgtgtctctagtggtgtgctgtctgttggcatgcttaaagcacatgtccattaaaattcattttgttcctttta

SEQ ID NO: 185366 - DNA, 8482 bp, Homo sapiens
  Payload ID: 16501
  Gene Symbol: SPTBN1
  Gene Name: spectrin, beta, non-erythrocytic 1
  Uniprot ID: Q01082
  ENST ID: ENST00000356805
  CDS Start-End: 282-7376
ggaatcagtgccgctgttgccgtgcaggctgcggattcctccagtccctccctcggccgcctctcctcccggagcgagcgcgcagccctgcgcagcagcgcccactggtcccgtcctgtgagccccggccccagccgcggacagacccgcggagtcgcctcccggcccacccgcccggccgccgaggagcgggaggaggacgggaccccggcgcccccaccccatccccgggagaactctaagaaggagctgatgtggaggagcagctgagacagttcaagatgacgaccacagtagccacagactatgacaacattgagatccagcagcagtacagtgatgtcaacaaccgctgggatgtcgacgactgggacaatgagaacagctctgcgcggctttttgagcggtcccgcatcaaggctctggcagatgagcgtgaagccgtgcagaagaagaccttcaccaagtgggtcaattcccaccttgcccgtgtgtcctgccggatcacagacctgtacactgaccttcgagatggacggatgctcatcaagctgctggaggtcctctctggagagaggctgcctaaacccaccaagggacgaatgcgcatccactgcttagagaatgtggacaaggcccttcagttcctgaaggagcagagagtccatcttgagaacatggggtcccatgacatcgtggatggaaaccaccggctgacccttggcctcatctggaccatcatcctgcgcttccagatccaggatatcagtgtggaaactgaagacaacaaagagaagaaatctgccaaggatgcattgctgttgtggtgccagatgaagacagctgggtaccccaatgtcaacattcacaatttcaccactagctggagggacggcatggccttcaatgcactgatacacaaacaccggcctgacctgatagattttgacaaactaaagaaatctaacgcacactacaacctgcagaatgcatttaatctggcagaacagcacctcggcctcactaaactgttggaccccgaagacatcagcgtggaccatcctgatgagaagtccataatcacttatgtggtgacttattaccactacttctctaagatgaaggccttagctgttgaaggaaaacgaattggaaaggtgcttgacaatgctattgaaacagaaaaaatgattgaaaagtatgaatcacttgcctctgaccttctggaatggattgaacaaaccatcatcattctgaacaatcgcaaatttgccaattcactggtcggggttcaacagcagcttcaggcattcaacacttaccgcactgtggagaaaccacccaaatttactgagaaggggaacttggaagtgctgctcttcaccattcagagcaagatgagggccaacaaccagaaggtctacatgccccgggaggggaagctcatctctgacatcaacaaggcctgggaaagactggaaaaagcggaacacgaaagagaactggctttgcggaatgagctcataagacaggagaaactggaacagctcgcccgcagatttgatcgcaaggcagctatgagggagacttggctgagcgaaaaccagcgtctggtgtctcaggacaactttgggtttgaccttcctgcagttgaggccgccacaaaaaagcacgaggccattgagacagacattgccgcatacgaggagcgtgtgcaggctgtggtagccgtggccagggagctcgaggccgagaattaccacgacatcaagcgcatcacagcgaggaaggacaatgtcatccggctctgggaatacctactggaactgctcagggcccggagacagcggctcgagatgaacctggggctgcagaagatattccaggaaatgctctacattatggactggatggatgaaatgaaggtgctagtattgtctcaagactatggcaaacacttacttggtgtggaagacctgttacagaagcacaccctggttgaagcagacattggcatccaggcagagcgggtgagaggtgtcaatgcctccgcccagaagttcgcaacagacggggaaggttacaagccctgtgacccccaggtgatccgagaccgcgtggcccacatggagttctgttatcaagagctttgccagctggcggctgagcgcagggcccgtctggaagagtcccgccgcctctggaagttcttctgggagatggcagaagaggaaggctggatacgggagaaggagaagatcctgtcctcggacgattacgggaaagacctgaccagcgtcatgcgcctgctcagcaagcaccgggcgttcgaggacgagatgagcggccgcagtggccactttgagcaggccatcaaggaaggcgaagacatgatcgcggaggagcacttcgggtcggagaagatccgtgagaggatcatttacatccgggagcagtgggccaacctagagcagctctcggccattcggaagaagcgcctggaggaggcctccctgctgcaccagttccaggcagatgctgatgacattgatgcctggatgctggacatcctcaagattgtctccagcagcgacgtgggccacgatgagtattccacacagtctctggtcaagaaacacaaggacgtggcggaagagatcgccaattacaggcccacccttgacacgctgcacgaacaagccagcgccctcccccaggagcatgccgagtctccagacgtgaggggcaggctgtcgggcatcgaggagcggtataaggaggtggcagagctgacgcggctgcggaagcaggcactccaggacactctggccctgtacaagatgttcagcgaggctgatgcctgtgagctctggatcgacgagaaggagcagtggctcaacaacatgcagatcccagagaagctggaggatctggaggtcatccagcacagatttgagagcctagaaccagaaatgaacaaccaggcttcccgggttgcagtggtgaaccagattgcacgccagctgatgcacagcggccacccaagtgagaaggaaatcaaagcccagcaggacaaactcaacacaaggtggagccagttcagagaactggttgacaggaagaaggatgccctcctgtctgccctgagcatccagaactaccacctcgagtgcaatgaaaccaaatcctggattcgggaaaagaccaaggtcatcgagtccacccaggacctgggcaatgacctggctggcgtcatggccctgcagcgcaagctgaccggcatggagcgggacttggtggccattgaggcaaagctgagtgacctgcagaaggaggcggagaagctggagtccgagcaccccgaccaggcccaggccatcctgtctcggctggccgagatcagcgacgtgtgggaggagatgaagaccaccctgaaaaaccgagaggcctccctgggagaggccagcaagctgcagcagttcctacgggacttggacgacttccagtcctggctctctaggacccagacagcgatcgcctcggaggacatgccaaacaccctgaccgaggctgagaagctgctcacgcagcacgagaacatcaagaacgagatcgacaactacgaggaggactaccagaagatgagggacatgggcgagatggtcacccaggggcagaccgatgcccagtacatgtttctgcggcagcggctgcaggccctggacactggatggaacgagctccacaagatgtgggagaacagacaaaatctcctatcccagtcacatgcctaccagcagttcctcagagacacgaagcaagccgaagcctttcttaacaaccaggagtatgttctggctcacactgaaatgcctaccaccttggaaggagctgaagcagcaattaaaaagcaagaggacttcatgaccaccatggacgccaatgaggagaagatcaatgctgtggtggagactggccggaggctggtgagcgatgggaacatcaactcagatcgcatccaggagaaggtggactctattgatgacagacataggaagaatcgtgagacagccagtgaacttttgatgaggttgaaggacaacagggatctacagaaattcctgcaagattgtcaagagctgtctctctggatcaatgagaagatgctcacagcccaggacatgtcttacgatgaagccagaaatctgcacagtaaatggttgaagcatcaagcatttatggcagaacttgcatccaacaaagaatggcttgacaaaatcgagaaggaaggaatgcagctcatttcagaaaagcctgagacggaagctgtggtgaaggagaaactcactggtttacataaaatgtgggaagtccttgaatccactacccagacaaaggcccagcggctctttgatgcaaacaaggccgaacttttcacccagagctgtgcagatctagacaaatggctgcacggcctggagagtcagattcagtctgatgactatggcaaagacctgaccagtgtcaatatcctgctgaaaaagcaacagatgctggagaatcagatggaagtgcggaagaaggagatcgaagagctccaaagccaagcccaggccctgagtcaggaagggaagagcaccgacgaggtagacagcaagcgcctcaccgtgcagaccaagttcatggagttgctggagcccttgaacgagaggaagcataacctgctggcctccaaagagatccatcagttcaacagggatgtggaggacgagatcttgtgggttggagagaggatgcctttggcaacttccacggatcatggccacaacctccagactgtgcagctgttaataaagaaaaatcagaccctccagaaagaaatccaggggcaccagcctcgcattgacgacatctttgagaggagccaaaacatcgtcactgacagcagcagcctcagcgctgaggccatcagacagaggcttgccgacctgaagcagctgtggggtctcctcattgaggagacagagaaacgccacaggcggctggaggaggcgcacagggcccagcagtactactttgacgctgctgaggccgaagcctggatgagcgagcaggagctgtacatgatgtcagaggagaaggccaaggatgagcagagtgctgtctccatgttgaagaagcaccagatcttagaacaagctgtggaggactatgcagagaccgtgcatcagctctccaagaccagccgggccctggtggccgacagccatcctgaaagtgagcgcattagcatgcggcagtccaaagtggataaactgtacgctggtctgaaagaccttgctgaagagagaagaggcaagctggatgagagacacaggttattccagctcaaccgggaggtggacgacctggagcagtggatcgctgagagggaggtggtcgcagggtcccatgaactgggacaggactatgagcatgtcacgatgttacaagaacgattccgggagtttgcccgagacaccgggaacattgggcaggagcgcgtggacacggtcaatcacctggcagatgagctcatcaactctggacattcagatgccgccaccatcgctgaatggaaggatggcctcaatgaagcctgggccgacctcctggagctcattgacacaagaacacagattcttgccgcttcctatgaactgcacaagttttaccacgatgccaaggagatctttgggcgtatacaggacaaacacaagaaactccctgaggagcttgggagagatcagaacacagtggagaccttacagagaatgcacactacatttgagcatgacatccaggctctgggcacacaggtgaggcagctgcaggaggatgcagcccgcctccaggcggcctatgcgggtgacaaggccgacgatatccagaagcgcgagaacgaggtcctggaagcctggaagtccctcctggacgcctgtgagagccgcagggtgcggctggtggacacaggggacaagttccgcttcttcagcatggtgcgcgacctcatgctctggatggaggatgtcatccggcagatcgaggcccaggagaagccaagggatgtatcatctgttgaactcttaatgaataatcatcaaggcatcaaagctgaaattgatgcacgtaatgacagtttcacaacctgcattgaacttgggaaatccctgttggcgagaaaacactatgcatctgaggagatcaaggaaaaattactgcagttgacggaaaagaggaaagaaatgatcgacaagtgggaagaccgatgggaatggttaagactgattctggaggtccatcagttctcaagagacgccagtgtggccgaggcctggctgcttggacaggagccgtacctatccagccgagagataggccagagcgtggacgaggtggagaagctcatcaagcgccacgaggcatttgaaaagtctgcagcaacctgggatgagaggttctctgccctggaaaggctgactacattggagttactggaagtgcgcagacagcaagaggaagaggagaggaagaggcggccgccttctcccgagccgagcacgaaggtttcagaggaagccgagtcccagcagcagtgggatacttcaaaaggagaacaagtttcccaaaacggtttgccagctgaacagggatctccacggatggcagaaacggtggacacaagcgaaatggtcaacggcgctacagaacaaaggacgagctctaaagagtccagccccatcccctccccgacctctgatcgtaaagccaagactgccctcccagcccagagtgccgccaccttaccagccagaacccaggagacaccttcggcccagatggaaggcttcctcaatcggaaacacgagtgggaggcccacaataagaaagcctcaagcaggtcctggcacaatgtttattgtgtcataaataaccaagaaatgggtttctacaaagatgcaaagactgctgcttctggaattccctaccacagcgaggtccctgtgagtttgaaagaagctgtctgcgaagtggcccttgattacaaaaagaagaaacacgtattcaagctaagactaaatgatggcaatgagtacctcttccaagccaaagacgatgaggaaatgaacacatggatccaggctatctcttccgccatctcctctgataaacacgaggtgtctgccagcacccagagcacgccagcatccagccgcgcgcagaccctccccaccagcgtcgtcaccatcaccagcgagtccagtcccggcaagcgggaaaaggacaaagagaaagacaaagagaagcggttcagcctttttggcaaaaagaaatgaactcctttccttcacctcctgcccttctcttaccttttcagtgaaattccagcatgcaagctcagaaccaacacattactctctgtgcctaatgttcctcaatgtggttgatttttttttttttttaatttatagagcatttcggggggggtgggggaaacacacctaaacactttatctccaagttacaaaagtttgaggtgcagagggaaggccagattttttttttaatgaaattatatagattagatctcagtatttaaactgttcctcaattttgtgaggctgtgttggaaataacccgcctctagtgctgttggtatgcaaggcagcggtgcttaatcaatatttcctgtgctcaccagaggcaaaatgtaccaatatcctgacaccattctctctccatttacttctggtggttaccctgactcttgactcttagaagtgcccgagatggggctaacctttattaaacagatcgcatattatgatcttgctgcagccacagtgcagctccacattaactctacagaccaaaccatttgtatctggcatcacttactaacacacgacatgcggcttttctgcatcaactgctatgacggttaagaatgtcagtatacaagaaggaatagaaaactgatactgttttaaataatctgtaatttcaattttttttttttgctgaaatacattatattgtacgtttgagataattctagtacaaagtataataaaactagatgtataataaaccctttaaatcattggtaagtgtacaagtggtggaactgaagcatttactggacaaagtaatgttactctaatggttacttgctcgtgcgttgccacactgtgttataatttgcttcatttccttgctatttgatacatagtgtgcatttctctgtcactgtaactattgtaatgacaaattttcatcttactgcacaatcaaaatgacattgataggaatgaactccagaggctgggcctgaacagggaggtggtcgctcaggcctggtgctcagtcgtacgacctgtacctctcaacttttgccctatctgttaaatatatgctatgtcattaaatgcttttaaatcta

SEQ ID NO: 185367 - DNA, 2164 bp, Homo sapiens
  Payload ID: 16501
  Gene Symbol: SPTBN1
  Gene Name: spectrin, beta, non-erythrocytic 1
  ENST ID: ENST00000389980
  CDS Start-End: 95-2164
cttcaacaggtttgtctcagcgcagggaccctccgggcctgctttggaactctaagaaggagctgatgtggaggagcagctgagacagttcaagatgacgaccacagtagccacagactatgacaacattgagatccagcagcagtacagtgatgtcaacaaccgctgggatgtcgacgactgggacaatgagaacagctctgcgcggctttttgagcggtcccgcatcaaggctctggcagatgagcgtgaagccgtgcagaagaagaccttcaccaagtgggtcaattcccaccttgcccgtgtgtcctgccggatcacagacctgtacactgaccttcgagatggacggatgctcatcaagctgctggaggtcctctctggagagaggctgcctaaacccaccaagggacgaatgcgcatccactgcttagagaatgtggacaaggcccttcagttcctgaaggagcagagagtccatcttgagaacatggggtcccatgacatcgtggatggaaaccaccggctgacccttggcctcatctggaccatcatcctgcgcttccagatccaggatatcagtgtggaaactgaagacaacaaagagaagaaatctgccaaggatgcattgctgttgtggtgccagatgaagacagctgggtaccccaatgtcaacattcacaatttcaccactagctggagggacggcatggccttcaatgcactgatacacaaacaccggcctgacctgatagattttgacaaactaaagaaatctaacgcacactacaacctgcagaatgcatttaatctggcagaacagcacctcggcctcactaaactgttggaccccgaagacatcagcgtggaccatcctgatgagaagtccataatcacttatgtggtgacttattaccactacttctctaagatgaaggccttagctgttgaaggaaaacgaattggaaaggtgcttgacaatgctattgaaacagaaaaaatgattgaaaagtatgaatcacttgcctctgaccttctggaatggattgaacaaaccatcatcattctgaacaatcgcaaatttgccaattcactggtcggggttcaacagcagcttcaggcattcaacacttaccgcactgtggagaaaccacccaaatttactgagaaggggaacttggaagtgctgctcttcaccattcagagcaagatgagggccaacaaccagaaggtctacatgccccgggaggggaagctcatctctgacatcaacaaggcctgggaaagactggaaaaagcggaacacgaaagagaactggctttgcggaatgagctcataagacaggagaaactggaacagctcgcccgcagatttgatcgcaaggcagctatgagggagacttggctgagcgaaaaccagcgtctggtgtctcaggacaactttgggtttgaccttcctgcagttgaggccgccacaaaaaagcacgaggccattgagacagacattgccgcatacgaggagcgtgtgcaggctgtggtagccgtggccagggagctcgaggccgagaattaccacgacatcaagcgcatcacagcgaggaaggacaatgtcatccggctctgggaatacctactggaactgctcagggcccggagacagcggctcgagatgaacctggggctgcagaagatattccaggaaatgctctacattatggactggatggatgaaatgaaggtgctagtattgtctcaagactatggcaaacacttacttggtgtggaagacctgttacagaagcacaccctggttgaagcagacattggcatccaggcagagcgggtgagaggtgtcaatgcctccgcccagaagttcgcaacagacggggaaggttacaagccctgtgacccccaggtgatccgagaccgcgtggcccacatggagttctgttatcaagagctttgccagctggcggctgagcgcagggcccgtctggaagagtcccgccgcctctggaagttcttctgggagatggcagaagaggaaggctggatacgggagaaggagaagatcctgtcctcggacgattacgggaaagacctgaccagcgtcatgcgcctgctcagcaagcaccgggcgttcgaggacgagatgagcggccgc

SEQ ID NO: 185368 - DNA, 10226 bp, Homo sapiens
  Payload ID: 16501
  Gene Symbol: SPTBN1
  Gene Name: spectrin, beta, non-erythrocytic 1
  ENST ID: ENST00000615901
  CDS Start-End: 250-7350
ggattcctccagtccctccctcggccgcctctcctcccggagcgagcgcgcagccctgcgcagcagcgcccactggtcccgtcctgtgagccccggccccagccgcggacagacccgcggagtcgcctcccggcccacccgcccggccgccgaggagcgggaggaggacgggaccccggcgcccccaccccatccccgggagaactctaagaaggagctgatgtggaggagcagctgagacagttcaagatgacgaccacagtagccacagactatgacaacattgagatccagcagcagtacagtgatgtcaacaaccgctgggatgtcgacgactgggacaatgagaacagctctgcgcggctttttgagcggtcccgcatcaaggctctggcagatgagcgtgaagccgtgcagaagaagaccttcaccaagtgggtcaattcccaccttgcccgtgtgtcctgccggatcacagacctgtacactgaccttcgagatggacggatgctcatcaagctgctggaggtcctctctggagagaggctgcctaaacccaccaagggacgaatgcgcatccactgcttagagaatgtggacaaggcccttcagttcctgaaggagcagagagtccatcttgagaacatggggtcccatgacatcgtggatggaaaccaccggctgacccttggcctcatctggaccatcatcctgcgcttccagatccaggatatcagtgtggaaactgaagacaacaaagagaagaaatctgccaaggatgcattgctgttgtggtgccagatgaagacagctgggtaccccaatgtcaacattcacaatttcaccactagctggagggacggcatggccttcaatgcactgatacacaaacaccggcctgacctgatagattttgacaaactaaagaaatctaacgcacactacaacctgcagaatgcatttaatctggcagaacagcacctcggcctcactaaactgttggaccccgaagacatcagcgtggaccatcctgatgagaagtccataatcacttatgtggtgacttattaccactacttctctaagatgaaggccttagctgttgaaggaaaacgaattggaaaggtgcttgacaatgctattgaaacagaaaaaatgattgaaaagtatgaatcacttgcctctgaccttctggaatggattgaacaaaccatcatcattctgaacaatcgcaaatttgccaattcactggtcggggttcaacagcagcttcaggcattcaacacttaccgcactgtggagaaaccacccaaatttactgagaaggggaacttggaagtgctgctcttcaccattcagagcaagatgagggccaacaaccagaaggtctacatgccccgggaggggaagctcatctctgacatcaacaaggcctgggaaagactggaaaaagcggaacacgaaagagaactggctttgcggaatgagctcataagacaggagaaactggaacagctcgcccgcagatttgatcgcaaggcagctatgagggagacttggctgagcgaaaaccagcgtctggtgtctcaggacaactttgggtttgaccttcctgcagttgaggccgccacaaaaaagcacgaggccattgagacagacattgccgcatacgaggagcgtgtgcaggctgtggtagccgtggccagggagctcgaggccgagaattaccacgacatcaagcgcatcacagcgaggaaggacaatgtcatccggctctgggaatacctactggaactgctcagggcccggagacagcggctcgagatgaacctggggctgcagaagatattccaggaaatgctctacattatggactggatggatgaaatgaaggtgctagtattgtctcaagactatggcaaacacttacttggtgtggaagacctgttacagaagcacaccctggttgaagcagacattggcatccaggcagagcgggtgagaggtgtcaatgcctccgcccagaagttcgcaacagacggggaaggttacaagccctgtgacccccaggtgatccgagaccgcgtggcccacatggagttctgttatcaagagctttgccagctggcggctgagcgcagggcccgtctggaagagtcccgccgcctctggaagttcttctgggagatggcagaagaggaaggctggatacgggagaaggagaagatcctgtcctcggacgattacgggaaagacctgaccagcgtcatgcgcctgctcagcaagcaccgggcgttcgaggacgagatgagcggccgcagtggccactttgagcaggccatcaaggaaggcgaagacatgatcgcggaggagcacttcgggtcggagaagatccgtgagaggatcatttacatccgggagcagtgggccaacctagagcagctctcggccattcggaagaagcgcctggaggaggcctccctgctgcaccagttccaggcagatgctgatgacattgatgcctggatgctggacatcctcaagattgtctccagcagcgacgtgggccacgatgagtattccacacagtctctggtcaagaaacacaaggacgtggcggaagagatcgccaattacaggcccacccttgacacgctgcacgaacaagccagcgccctcccccaggagcatgccgagtctccagacgtgaggggcaggctgtcgggcatcgaggagcggtataaggaggtggcagagctgacgcggctgcggaagcaggcactccaggacactctggccctgtacaagatgttcagcgaggctgatgcctgtgagctctggatcgacgagaaggagcagtggctcaacaacatgcagatcccagagaagctggaggatctggaggtcatccagcacagatttgagagcctagaaccagaaatgaacaaccaggcttcccgggttgcagtggtgaaccagattgcacgccagctgatgcacagcggccacccaagtgagaaggaaatcaaagcccagcaggacaaactcaacacaaggtggagccagttcagagaactggttgacaggaagaaggatgccctcctgtctgccctgagcatccagaactaccacctcgagtgcaatgaaaccaaatcctggattcgggaaaagaccaaggtcatcgagtccacccaggacctgggcaatgacctggctggcgtcatggccctgcagcgcaagctgaccggcatggagcgggacttggtggccattgaggcaaagctgagtgacctgcagaaggaggcggagaagctggagtccgagcaccccgaccaggcccaggccatcctgtctcggctggccgagatcagcgacgtgtgggaggagatgaagaccaccctgaaaaaccgagaggcctccctgggagaggccagcaagctgcagcagttcctacgggacttggacgacttccagtcctggctctctaggacccagacagcgatcgcctcggaggacatgccaaacaccctgaccgaggctgagaagctgctcacgcagcacgagaacatcaagaacgagatcgacaactacgaggaggactaccagaagatgagggacatgggcgagatggtcacccaggggcagaccgatgcccagtacatgtttctgcggcagcggctgcaggccctggacactggatggaacgagctccacaagatgtgggagaacagacaaaatctcctatcccagtcacatgcctaccagcagttcctcagagacacgaagcaagccgaagcctttcttaacaaccaggagtatgttctggctcacactgaaatgcctaccaccttggaaggagctgaagcagcaattaaaaagcaagaggacttcatgaccaccatggacgccaatgaggagaagatcaatgctgtggtggagactggccggaggctggtgagcgatgggaacatcaactcagatcgcatccaggagaaggtggactctattgatgacagacataggaagaatcgtgagacagccagtgaacttttgatgaggttgaaggacaacagggatctacagaaattcctgcaagattgtcaagagctgtctctctggatcaatgagaagatgctcacagcccaggacatgtcttacgatgaagccagaaatctgcacagtaaatggttgaagcatcaagcatttatggcagaacttgcatccaacaaagaatggcttgacaaaatcgagaaggaaggaatgcagctcatttcagaaaagcctgagacggaagctgtggtgaaggagaaactcactggtttacataaaatgtgggaagtccttgaatccactacccagacaaaggcccagcggctctttgatgcaaacaaggccgaacttttcacccagagctgtgcagatctagacaaatggctgcacggcctggagagtcagattcagtctgatgactatggcaaagacctgaccagtgtcaatatcctgctgaaaaagcaacaggcaacaatgctggagaatcagatggaagtgcggaagaaggagatcgaagagctccaaagccaagcccaggccctgagtcaggaagggaagagcaccgacgaggtagacagcaagcgcctcaccgtgcagaccaagttcatggagttgctggagcccttgaacgagaggaagcataacctgctggcctccaaagagatccatcagttcaacagggatgtggaggacgagatcttgtgggttggagagaggatgcctttggcaacttccacggatcatggccacaacctccagactgtgcagctgttaataaagaaaaatcagaccctccagaaagaaatccaggggcaccagcctcgcattgacgacatctttgagaggagccaaaacatcgtcactgacagcagcagcctcagcgctgaggccatcagacagaggcttgccgacctgaagcagctgtggggtctcctcattgaggagacagagaaacgccacaggcggctggaggaggcgcacagggcccagcagtactactttgacgctgctgaggccgaagcctggatgagcgagcaggagctgtacatgatgtcagaggagaaggccaaggatgagcagagtgctgtctccatgttgaagaagcaccagatcttagaacaagctgtggaggactatgcagagaccgtgcatcagctctccaagaccagccgggccctggtggccgacagccatcctgaaagtgagcgcattagcatgcggcagtccaaagtggataaactgtacgctggtctgaaagaccttgctgaagagagaagaggcaagctggatgagagacacaggttattccagctcaaccgggaggtggacgacctggagcagtggatcgctgagagggaggtggtcgcagggtcccatgaactgggacaggactatgagcatttcacaatgttacaagaacgattccgggagtttgcccgagacaccgggaacattgggcaggagcgcgtggacacggtcaatcacctggcagatgagctcatcaactctggacattcagatgccgccaccatcgctgaatggaaggatggcctcaatgaagcctgggccgacctcctggagctcattgacacaagaacacagattcttgccgcttcctatgaactgcacaagttttaccacgatgccaaggagatctttgggcgtatacaggacaaacacaagaaactccctgaggagcttgggagagatcagaacacagtggagaccttacagagaatgcacactacatttgagcatgacatccaggctctgggcacacaggtgaggcagctgcaggaggatgcagcccgcctccaggcggcctatgcgggtgacaaggccgacgatatccagaagcgcgagaacgaggtcctggaagcctggaagtccctcctggacgcctgtgagagccgcagggtgcggctggtggacacaggggacaagttccgcttcttcagcatggtgcgcgacctcatgctctggatggaggatgtcatccggcagatcgaggcccaggagaagccaagggatgtatcatctgttgaactcttaatgaataatcatcaaggcatcaaagctgaaattgatgcacgtaatgacagtttcacaacctgcattgaacttgggaaatccctgttggcgagaaaacactatgcatctgaggagatcaaggaaaaattactgcagttgacggaaaagaggaaagaaatgatcgacaagtgggaagaccgatgggaatggttaagactgattctggaggtccatcagttctcaagagacgccagtgtggccgaggcctggctgcttggacaggagccgtacctatccagccgagagataggccagagcgtggacgaggtggagaagctcatcaagcgccacgaggcatttgaaaagtctgcagcaacctgggatgagaggttctctgccctggaaaggctgactacattggagttactggaagtgcgcagacagcaagaggaagaggagaggaagaggcggccgccttctcccgagccgagcacgaaggtttcagaggaagccgagtcccagcagcagtgggatacttcaaaaggagaacaagtttcccaaaacggtttgccagctgaacagggatctccacggatggcagaaacggtggacacaagcgaaatggtcaacggcgctacagaacaaaggacgagctctaaagagtccagccccatcccctccccgacctctgatcgtaaagccaagactgccctcccagcccagagtgccgccaccttaccagccagaacccaggagacaccttcggcccagatggaaggcttcctcaatcggaaacacgagtgggaggcccacaataagaaagcctcaagcaggtcctggcacaatgtttattgtgtcataaataaccaagaaatgggtttctacaaagatgcaaagactgctgcttctggaattccctaccacagcgaggtccctgtgagtttgaaagaagctgtctgcgaagtggcccttgattacaaaaagaagaaacacgtattcaagctaagactaaatgatggcaatgagtacctcttccaagccaaagacgatgaggaaatgaacacatggatccaggctatctcttccgccatctcctctgataaacacgaggtgtctgccagcacccagagcacgccagcatccagccgcgcgcagaccctccccaccagcgtcgtcaccatcaccagcgagtccagtcccggcaagcgggaaaaggacaaagagaaagacaaagagaagcggttcagcctttttggcaaaaagaaatgaactcctttccttcacctcctgcccttctcttaccttttcagtgaaattccagcatgcaagctcagaaccaacacattactctctgtgcctaatgttcctcaatgtggttgatttttttttttttttaatttatagagcatttcggggggggtgggggaaacacacctaaacactttatctccaagttacaaaagtttgaggtgcagagggaaggccagattttttttttaatgaaattatatagattagatctcagtatttaaactgttcctcaattttgtgaggctgtgttggaaataacccgcctctagtgctgttggtatgcaaggcagcggtgcttaatcaatatttcctgtgctcaccagaggcaaaatgtaccaatatcctgacaccattctctctccatttacttctggtggttaccctgactcttgactcttagaagtgcccgagatggggctaacctttattaaacagatcgcatattatgatcttgctgcagccacagtgcagctccacattaactctacagaccaaaccatttgtatctggcatcacttactaacacacgacatgcggcttttctgcatcaactgctatgacggttaagaatgtcagtatacaagaaggaatagaaaactgatactgttttaaataatctgtaatttcaattttttttttttgctgaaatacattatattgtacgtttgagataattctagtacaaagtataataaaactagatgtataataaaccctttaaatcattggtaagtgtacaagtggtggaactgaagcatttactggacaaagtaatgttactctaatggttacttgctcgtgcgttgccacactgtgttataatttgcttcatttccttgctatttgatacatagtgtgcatttctctgtcactgtaactattgtaatgacaaattttcatcttactgcacaatcaaaatgacattgataggaatgaactccagaggctgggcctgaacagggaggtggtcgctcaggcctggtgctcagtcgtacgacctgtacctctcaacttttgccctatctgttaaatatatgctatgtcattaaatgcttttaaatctagcacggtgactagttgttgttcttcctctgctgcgtgtgcatgcccagtagggaaactgcaaagggagaaatgacaaacaagaaacattttacaaccagtctgggctcacttttgcattttttatgcatgtctggtgcacaagctttgaaaactacagcaaacagtaataaatgtgactgttttgtagttatacattcaggctttatcttttatttatgaaaaagttaccagagcacttgtgaaacctgaactctgagataggggttggcaaatttgttctgtaaagggacagagatagtaaatattttaggctttgtaggccgtaactgtctctgttgctcaattctgctgttgcgtaatacaaaggcagccattgacggtatgtgaatgcctgggcatggctgtgttccagtaaaactatttaaggacataaatttgaatttcatataactttgacatgccatacaatattttgattttcttaatgatttcaaaatgtaaagtctattttatacagatcagaccaaaaagaagaaaaaaaaaaaacaggcaagaggttaggtttggcccatgggccatagtttgctgacttcagcatagagtcgtgggttatttacaagtgacatacttttcctgggttatctgggtatgttgactccatgccacttgcataaagcagcaatggatattagtattatggatgtccagtaagttattccacaaagaccatgcctaaggtggcatcagccctgggctccacagctgcgtggcatcaaagctttctcttaactctcttacctctaggcaaactgagacctcaccatcctctcccctgcttcccacgacagtcctttgcccttgccatgctcagggttggaatcaagttgttctattctcaacagaccaaaatgtttagttaaggcaaagtatcttggaaacaattgtgattaattacagtcttgtactcttgacaaagctgtgcagatggcaataagttcataccagcaatcctggagtcccataataaatacgtacatgtggaacatcgtgcacataatttcaacagttcgcagatctgtagttatgaagccagggtttggtggtatttgctctctcttggtgcatttgataaggatccactgaggcctgaatgtggaagatgatgggcagcgagaggagcgtcagaagaccccagtcaagacgtgttcgccatcagaggttacaggccgcacagcctgatgagcttcaagcctggcagggtaaatagtttttgggttttttgttttttttttattcttccactatcatgttttttgaggattttgcatatttcttgttgccataatgctgtgctattttaccctgattttcagtgatacaatatgggtgacaatactggcccctccataaatctgaagagtaagaagtagtgaaaataaggcttaggatatgaaatggcgttgtcacttgaatcaaggccactttttgtcctacttgagcatctcaagttgggatgcatcttctgatggcacttccggaactggctgtggtttttttgggtgtaccgagagtgccagtgactgtgcttcttacaattcctggcatcttgagtaggtgaaacactgtatcagactgggtgatgggcacattgtcatttcaccaagttcctggaactgttagaattgcttgtgtatggggatcctatgttagttcccctggatacattgttttatcagtcggaattcttaaataaagacatacttcccttc

SEQ ID NO: 185369 - DNA, 7866 bp, Homo sapiens
  Payload ID: 16502
  Gene Symbol: SPTBN2
  Gene Name: spectrin, beta, non-erythrocytic 2
  Uniprot ID: O15020
  ENST ID: ENST00000309996
  CDS Start-End: 73-7245
ccactgagcagccaaccgcagcctctggccacaaggagagcggagcacaggagcaggaagccgcctaccaccatgagcagcacgctgtcacccacagactttgacagcttggaaatccagggccagtacagtgacatcaacaaccgctgggaccttcctgactcggactgggacaatgacagcagctcggcccgcctctttgagaggtctcgcattaaggctctggcagatgaacgagaagctgtgcagaagaaaaccttcaccaagtgggtaaactcgcacctggcccgggtcacgtgccgggtgggggacctgtacagcgacctccgggacggacgcaacctgctgaggctcctcgaggtgctctcgggagagatactgccaaagcctacaaagggccgcatgcggatccactgcctggagaacgtggacaaggcactgcagttcctcaaggagcagaaagtgcacttggaaaacatgggctcccatgacattgtggacggaaaccaccgactgacccttgggctggtctggaccatcatccttcgattccagatccaagacatcagtgtggagacagaagacaacaaggagaagaagtcagccaaggatgccctgcttctgtggtgccagatgaagactgcaggttatcccaacgtcaatgtacacaacttcaccaccagctggagagatggactagctttcaacgccatcgtgcataaacaccggccagacctgctggattttgagtctctgaagaagtgtaatgcacactataatctgcagaatgcattcaatctggctgaaaaggaactgggacttaccaagctgctggatcccgaagacgtgaatgtggaccagccagatgagaagtcaatcattacctatgtggctacttactaccattacttctccaagatgaaggccctggccgtggaaggcaagagaattggcaaggtgctggaccatgccatggaggcagagcgcctggtggagaaatacgagtccctggcctcggagctgctgcagtggatcgagcaaacgatcgtgaccctcaatgaccggcagttggccaactcccttagcggggtccagaaccagctgcagtccttcaactcctaccgcaccgtggagaagccgcccaagtttaccgagaaagggaacttggaagtgctgctcttcaccatccagagcaagcttcgggccaacaaccagaaggtctacacgccccgcgagggccggctcatctcggacatcaacaaggcttgggagcggctggagaaggcggagcacgagcgtgagctggccctgcgcaccgagctcatccgccaggagaagctggagcagctggccgcccgcttcgaccgcaaggctgccatgcgggagacctggctcagcgagaaccagcgcctcgtgtcccaggacaactttgggctggagctggcagctgtcgaggcagcagtacggaagcacgaagccattgagacggacatcgtggcctacagcggccgggtgcaggcagtggacgccgtggctgcagagctggccgccgagcgctaccacgacatcaagcgcatcgccgctcggcagcacaacgtggcacggctctgggacttcttgcggcagatggtggccgcccggcgggagcggctcctcctcaacctggagctgcagaaggtgttccaggacctgctctacctcatggactggatggaagagatgaagggccggctgcagtctcaggacctgggcaggcacctagcaggagtggaggacctgctgcagctgcacgagctggtggaggcagacatcgccgtgcaggccgagagggtgcgggccgtcagcgcctctgccctgcgcttctgcaacccagggaaagagtatagaccttgcgacccgcagctggtgtcggagcgggtggccaagctagagcagagctatgaggcactgtgcgagttggcagcggcgcggcgggcccggctggaggaatcacggcggctctggcgtttcctctgggaggtgggtgaagctgaggcctgggtgcgggagcagcagcacctcctggcctcagccgacacgggccgagacctgaccggtgccctccgcctgctcaacaagcacacagccctgcggggcgagatgagcggccggctggggcccctgaagctcaccctggagcagggccagcagttggtggccgagggtcaccctggggcaagccaggcctctgcccgtgcagctgaactccaagcccagtgggagcggctagaggccctggccgaggagcgtgcccagcggctggcccaagccgccagcctctaccagttccaggccgatgcaaacgacatggaggcctggttggttgacgcactgcgcctggtgtccagccccgagctggggcacgacgagttctccacgcaggctctagccaggcagcatcgggccctggaggaggagattcgaagccaccggccaaccctggacgccttgagggaacaggcagcagccctgccccccacactgagccgcacgcccgaggtgcagagccgggtgcccaccctggagcggcactacgaggagctgcaggcccgggcaggcgagcgagcgcgggccttggaggcagccctggcgctctacaccatgctcagcgaggccggggcctgtggactctgggtggaggagaaggagcagtggctcaacgggctggccctgcctgaacgcctggaggacctggaggtcgtgcagcagaggttcgagaccctggagcctgaaatgaacacccttgcagcacaaatcaccgcggtgaatgacattgccgagcagttactgaaggccaaccccccaggcaaagaccgcattgtcaacacccaggagcagctcaaccacaggtggcagcagtttcggcgtctggcagacggcaagaaggcagctctcacctcagccctgagcatccagaactaccacttagagtgcacggagacccaggcctggatgagagagaagaccaaagtcatcgagtccacccagggcctaggcaacgatctggctggggtgctggccctgcagcgcaagctggccggcacggagcgggacctggaggccatcgccgcccgggtgggcgaactgactcgagaggcaaatgccctggctgccggccatcccgctcaggcagtggccatcaacgcccggctgagagaggtgcagaccggctgggaggacctcagggccaccatgcggcgtcgagaagagtcgctgggggaggcgcggcggctgcaggacttcttgcgcagcttggatgacttccaggcctggctaggccgcactcagactgctgtggcctctgaagaagggccggccaccctgcctgaggcagaggccctcctggcccaacatgcagccctgcggggagaggtggagcgggcccagagcgagtatagccggctgcgagccctgggcgaggaggtgacccgggaccaggctgacccccagtgcctcttcctacgacagcgactggaggccctgggaactggctgggaggagctgggccgaatgtgggagagccggcaaggtcgcctggcccaggcccacggcttccagggattcctgcgggatgctcgtcaggctgagggcgtgctcagcagccaggaatatgttctgtctcacacggagatgccagggacactccaggctgctgatgctgccattaaaaaactggaggacttcatgagcaccatggacgccaatggggaacggatccacgggctcctggaggctggccgccagctggtatctgaaggcaacatccacgccgacaagattcgggaaaaggcagactccattgagaggaggcacaagaagaatcaagacgcagcgcagcaatttctgggccgtcttcgggacaaccgggagcagcagcatttcctgcaagattgtcacgagctgaagctctggatcgacgagaagatgctgacagcccaggacgtgtcctatgacgaggcccgcaacctgcatactaagtggcagaagcaccaggcattcatggccgagctggctgccaacaaagactggctggacaaggtggacaaggaagggcgagagctcacccttgagaagccagagctgaaagccctggtgtcggagaagctgagagacctgcacaggcgctgggacgagctggagaccaccacccaagccaaggcccgcagcctctttgatgccaaccgagctgagctgtttgcccagagctgctgtgccctggagagctggctggagagcctgcaggcccagctgcactcggatgactacggcaaggacctcaccagcgtcaacatcctgctcaagaagcagcagatgctggaatgggagatggctgtgagagagaaggaggtggaggcaatccaggcccaggccaaagcactggcccaggaggaccagggtgcaggggaggtggagagaacctcgagggccgtggaggagaagttcagggccttgtgccagcccatgcgggaacgctgccggcgcctgcaggcttctcgcgagcagcaccagttccaccgcgatgtggaagatgagattttgtgggtgacagagcggctgcccatggccagctccatggagcatggcaaggacctgcccagcgtccagcttctcatgaagaaaaaccagaccctgcagaaagagattcagggccatgagccccggatcgcggacctgagggagcggcagcgtgctctaggtgcagcagcagcaggtccagagctggctgagctgcaggaaatgtggaaacgcctgggccacgagctggaacttcgagggaagcgactggaggatgccctgcgagcccagcagttctaccgcgatgccgccgaggcggaggcctggatgggcgagcaggaattacacatgatgggccaggagaaggccaaggatgagctgagtgcccaggcagaggtgaagaagcaccaggtgctggagcaagccctggccgactacgcgcagaccatccaccagctggcggccagcagccaggacatgattgaccacgagcacccagagagcactcggatatccatccgccaagcccaggtggacaagctgtatgccggcctgaaggagctggctggagagcggcgggagcgcctgcaggagcacctccggctgtgccagctccgccgcgagctggatgacctggaacagtggatccaggagcgcgaggtggtggcggcctcccacgagctgggccaggactacgagcatgtgactatgctccgagacaaattccgagagttctcccgggacacaagcaccatcggtcaggagcgcgtagatagcgccaatgcgctggccaatgggctcattgctgggggccatgctgcacgggccaccgtggccgagtggaaggacagtctcaacgaggcctgggctgacctgcttgagctgctggacacacggggtcaggtgctggccgcggcgtacgagctgcagcgcttcctgcacggggcacgccaagccctggcgcgggtgcagcacaagcagcagcagcttccggacgggactggccgcgacctcaacgctgccgaggccctgcagcgccgacactgtgcctacgagcatgacattcaggccctcagcccccaggtccagcaggtgcaggacgacggccaccggctccagaaggcctacgctggagacaaggctgaggagatcggccgccacatgcaggccgtggccgaggcctgggcccagcttcagggaagctctgccgcccgccggcagctgctgctggacaccacagacaagttccgcttcttcaaggctgtccgggaactgatgctctggatggatgaggtcaacctgcagatggatgcccaggagcgtccccgggatgtgtcctccgcggatctagtcatcaagaaccagcaaggcatcaaggcagagatagaggcccgggcagaccgcttctcctcctgcatcgacatggggaaggagctgctggccaggagccactatgcggccgaggagatctcagagaagctgtctcagctgcaggcacggcgccaggagacagctgagaagtggcaggagaagatggactggcttcagctggttttggaggtgcttgtgtttggaagagatgcagggatggcagaggcctggctctgcagccaggagccactggtgcgcagcgctgagctgggttgcacggtcgacgaagttgagagcctcatcaagcggcacgaggccttccagaagtcagcagtggcctgggaggagcgattctgtgcgctggagaagcttactgcgctagaggagcgggagaaggagcgaaagagaaagagggaggaggaggagcggcggaaacagccgcctgctcccgaacccacagccagtgtgcctccaggggacctggtgggcggccagacagcttctgacaccacctgggacggaacccagccacggccaccaccatccacacaagcacccagtgttaatggagtctgcacagatggagagccctcacagcccctgctgggacaacagagacttgagcacagcagcttccccgaagggccgggacctggctcaggggacgaagccaatgggccccggggagagaggcagacccggactcggggcccggccccatctgcaatgccccagagcaggtctaccgagtcagcccatgctgccaccctgccgcctcgaggcccagagccatctgcccaggagcagatggaggggatgctgtgccgcaagcaggagatggaggccttcgggaagaaggctgccaacaggtcctggcagaacgtgtactgtgtcctgcggcgtgggagcctcggcttttacaaggatgccaaggcagccagcgcgggagtgccataccacggagaagtgcctgtcagcctggccagggcccagggcagcgtcgcctttgattaccgaaagcgcaaacatgtcttcaagctgggcttacaggatggaaaagaatatttattccaggccaaggatgaggcagagatgagctcgtggctacgggtggtgaatgcagccattgccacagcgtcttctgcctctggagagcctgaagagccggtggtgcccagcaccacccggggcatgacccgggccatgaccatgcccccagtgtcacccgtcggggctgaggggcctgttgtgctccgcagcaaagacggcagagaacgagagcgagaaaaacgcttcagcttctttaagaagaacaagtagttgggggcaaggtcccaggccaactccctccctccgttcaggaaactgccagggacagtcgacagggaccgccctcttgtcaggacaactgcctgctgctagggtctgttgccaaggtcaacccatcaccaggaactgtcactggggacgagtccatgttcccaagggcagcccttctcttctgctgtttaattccagactggtggtgggacccaggtaaccccctctcccacccccgccgacttctcccctttccccagcctcgtgcctctgtccctcaccacggtgtggacagtgccgcaccctcaacataggccatgtggggagtggctgcccctgcctcagggtcattctcctgccatgcgagggcactcgccttctgccttctggttcctcacccctcagaccagccaggaacctctcagagctgaagcaggccctgggggcagaagtgccagatgacagtcagaggcgcaggagccctccctccccacccccaccctgtaactccagctgccactccatctccagctgctctcaatggcttccaggtgtgttgttcggggacagccaccgccttgagtctggccaaggaggtgattaaacagctcagcttctctc

SEQ ID NO: 185370 - DNA, 8128 bp, Homo sapiens
  Payload ID: 16502
  Gene Symbol: SPTBN2
  Gene Name: spectrin, beta, non-erythrocytic 2
  Uniprot ID: O15020
  ENST ID: ENST00000533211
  CDS Start-End: 333-7505
gatgttctgggagggagagccggcccagctgcctgaaggaggacgcgagagcgaggggacgggtgagaggaatgcttagcggagacggactggaggtgcccggagaggaaaggggaacggaggctggatctcgggaaacctcgtcggcagtgtcattagaggaaggatcgcgtgtctcggggatacggattttggaggaaaagcagaatagggacaaaggcttcccaggtggcttcccctcttcccctgggggctgatttccactgagcagccaaccgcagcctctggccacaaggagagcggagcacaggagcaggaagccgcctaccaccatgagcagcacgctgtcacccacagactttgacagcttggaaatccagggccagtacagtgacatcaacaaccgctgggaccttcctgactcggactgggacaatgacagcagctcggcccgcctctttgagaggtctcgcattaaggctctggcagatgaacgagaagctgtgcagaagaaaaccttcaccaagtgggtaaactcgcacctggcccgggtcacgtgccgggtgggggacctgtacagcgacctccgggacggacgcaacctgctgaggctcctcgaggtgctctcgggagagatactgccaaagcctacaaagggccgcatgcggatccactgcctggagaacgtggacaaggcactgcagttcctcaaggagcagaaagtgcacttggaaaacatgggctcccatgacattgtggacggaaaccaccgactgacccttgggctggtctggaccatcatccttcgattccagatccaagacatcagtgtggagacagaagacaacaaggagaagaagtcagccaaggatgccctgcttctgtggtgccagatgaagactgcaggttatcccaacgtcaatgtacacaacttcaccaccagctggagagatggactagctttcaacgccatcgtgcataaacaccggccagacctgctggattttgagtctctgaagaagtgtaatgcacactataatctgcagaatgcattcaatctggctgaaaaggaactgggacttaccaagctgctggatcccgaagacgtgaatgtggaccagccagatgagaagtcaatcattacctatgtggctacttactaccattacttctccaagatgaaggccctggccgtggaaggcaagagaattggcaaggtgctggaccatgccatggaggcagagcgcctggtggagaaatacgagtccctggcctcggagctgctgcagtggatcgagcaaacgatcgtgaccctcaatgaccggcagttggccaactcccttagcggggtccagaaccagctgcagtccttcaactcctaccgcaccgtggagaagccgcccaagtttaccgagaaagggaacttggaagtgctgctcttcaccatccagagcaagcttcgggccaacaaccagaaggtctacacgccccgcgagggccggctcatctcggacatcaacaaggcttgggagcggctggagaaggcggagcacgagcgtgagctggccctgcgcaccgagctcatccgccaggagaagctggagcagctggccgcccgcttcgaccgcaaggctgccatgcgggagacctggctcagcgagaaccagcgcctcgtgtcccaggacaactttgggctggagctggcagctgtcgaggcagcagtacggaagcacgaagccattgagacggacatcgtggcctacagcggccgggtgcaggcagtggacgccgtggctgcagagctggccgccgagcgctaccacgacatcaagcgcatcgccgctcggcagcacaacgtggcacggctctgggacttcttgcggcagatggtggccgcccggcgggagcggctcctcctcaacctggagctgcagaaggtgttccaggacctgctctacctcatggactggatggaagagatgaagggccggctgcagtctcaggacctgggcaggcacctagcaggagtggaggacctgctgcagctgcacgagctggtggaggcagacatcgccgtgcaggccgagagggtgcgggccgtcagcgcctctgccctgcgcttctgcaacccagggaaagagtatagaccttgcgacccgcagctggtgtcggagcgggtggccaagctagagcagagctatgaggcactgtgcgagttggcagcggcgcggcgggcccggctggaggaatcacggcggctctggcgtttcctctgggaggtgggtgaagctgaggcctgggtgcgggagcagcagcacctcctggcctcagccgacacgggccgagacctgaccggtgccctccgcctgctcaacaagcacacagccctgcggggcgagatgagcggccggctggggcccctgaagctcaccctggagcagggccagcagttggtggccgagggtcaccctggggcaagccaggcctctgcccgtgcagctgaactccaagcccagtgggagcggctagaggccctggccgaggagcgtgcccagcggctggcccaagccgccagcctctaccagttccaggccgatgcaaacgacatggaggcctggttggttgacgcactgcgcctggtgtccagccccgagctggggcacgacgagttctccacgcaggctctagccaggcagcatcgggccctggaggaggagattcgaagccaccggccaaccctggacgccttgagggaacaggcagcagccctgccccccacactgagccgcacgcccgaggtgcagagccgggtgcccaccctggagcggcactacgaggagctgcaggcccgggcaggcgagcgagcgcgggccttggaggcagccctggcgctctacaccatgctcagcgaggccggggcctgtggactctgggtggaggagaaggagcagtggctcaacgggctggccctgcctgaacgcctggaggacctggaggtcgtgcagcagaggttcgagaccctggagcctgaaatgaacacccttgcagcacaaatcaccgcggtgaatgacattgccgagcagttactgaaggccaaccccccaggcaaagaccgcattgtcaacacccaggagcagctcaaccacaggtggcagcagtttcggcgtctggcagacggcaagaaggcagctctcacctcagccctgagcatccagaactaccacttagagtgcacggagacccaggcctggatgagagagaagaccaaagtcatcgagtccacccagggcctaggcaacgatctggctggggtgctggccctgcagcgcaagctggccggcacggagcgggacctggaggccatcgccgcccgggtgggcgaactgactcgagaggcaaatgccctggctgccggccatcccgctcaggcagtggccatcaacgcccggctgagagaggtgcagaccggctgggaggacctcagggccaccatgcggcgtcgagaagagtcgctgggggaggcgcggcggctgcaggacttcttgcgcagcttggatgacttccaggcctggctaggccgcactcagactgctgtggcctctgaagaagggccggccaccctgcctgaggcagaggccctcctggcccaacatgcagccctgcggggagaggtggagcgggcccagagcgagtatagccggctgcgagccctgggcgaggaggtgacccgggaccaggctgacccccagtgcctcttcctacgacagcgactggaggccctgggaactggctgggaggagctgggccgaatgtgggagagccggcaaggtcgcctggcccaggcccacggcttccagggattcctgcgggatgctcgtcaggctgagggcgtgctcagcagccaggaatatgttctgtctcacacggagatgccagggacactccaggctgctgatgctgccattaaaaaactggaggacttcatgagcaccatggacgccaatggggaacggatccacgggctcctggaggctggccgccagctggtatctgaaggcaacatccacgccgacaagattcgggaaaaggcagactccattgagaggaggcacaagaagaatcaagacgcagcgcagcaatttctgggccgtcttcgggacaaccgggagcagcagcatttcctgcaagattgtcacgagctgaagctctggatcgacgagaagatgctgacagcccaggacgtgtcctatgacgaggcccgcaacctgcatactaagtggcagaagcaccaggcattcatggccgagctggctgccaacaaagactggctggacaaggtggacaaggaagggcgagagctcacccttgagaagccagagctgaaagccctggtgtcggagaagctgagagacctgcacaggcgctgggacgagctggagaccaccacccaagccaaggcccgcagcctctttgatgccaaccgagctgagctgtttgcccagagctgctgtgccctggagagctggctggagagcctgcaggcccagctgcactcggatgactacggcaaggacctcaccagcgtcaacatcctgctcaagaagcagcagatgctggaatgggagatggctgtgagagagaaggaggtggaggcaatccaggcccaggccaaagcactggcccaggaggaccagggtgcaggggaggtggagagaacctcgagggccgtggaggagaagttcagggccttgtgccagcccatgcgggaacgctgccggcgcctgcaggcttctcgcgagcagcaccagttccaccgcgatgtggaagatgagattttgtgggtgacagagcggctgcccatggccagctccatggagcatggcaaggacctgcccagcgtccagcttctcatgaagaaaaaccagaccctgcagaaagagattcagggccatgagccccggatcgcggacctgagggagcggcagcgtgctctaggtgcagcagcagcaggtccagagctggctgagctgcaggaaatgtggaaacgcctgggccacgagctggaacttcgagggaagcgactggaggatgccctgcgagcccagcagttctaccgcgatgccgccgaggcggaggcctggatgggcgagcaggaattacacatgatgggccaggagaaggccaaggatgagctgagtgcccaggcagaggtgaagaagcaccaggtgctggagcaagccctggccgactacgcgcagaccatccaccagctggcggccagcagccaggacatgattgaccacgagcacccagagagcactcggatatccatccgccaagcccaggtggacaagctgtatgccggcctgaaggagctggctggagagcggcgggagcgcctgcaggagcacctccggctgtgccagctccgccgcgagctggatgacctggaacagtggatccaggagcgcgaggtggtggcggcctcccacgagctgggccaggactacgagcatgtgactatgctccgagacaaattccgagagttctcccgggacacaagcaccatcggtcaggagcgcgtagatagcgccaatgcgctggccaatgggctcattgctgggggccatgctgcacgggccaccgtggccgagtggaaggacagtctcaacgaggcctgggctgacctgcttgagctgctggacacacggggtcaggtgctggccgcggcgtacgagctgcagcgcttcctgcacggggcacgccaagccctggcgcgggtgcagcacaagcagcagcagcttccggacgggactggccgcgacctcaacgctgccgaggccctgcagcgccgacactgtgcctacgagcatgacattcaggccctcagcccccaggtccagcaggtgcaggacgacggccaccggctccagaaggcctacgctggagacaaggctgaggagatcggccgccacatgcaggccgtggccgaggcctgggcccagcttcagggaagctctgccgcccgccggcagctgctgctggacaccacagacaagttccgcttcttcaaggctgtccgggaactgatgctctggatggatgaggtcaacctgcagatggatgcccaggagcgtccccgggatgtgtcctccgcggatctagtcatcaagaaccagcaaggcatcaaggcagagatagaggcccgggcagaccgcttctcctcctgcatcgacatggggaaggagctgctggccaggagccactatgcggccgaggagatctcagagaagctgtctcagctgcaggcacggcgccaggagacagctgagaagtggcaggagaagatggactggcttcagctggttttggaggtgcttgtgtttggaagagatgcagggatggcagaggcctggctctgcagccaggagccactggtgcgcagcgctgagctgggttgcacggtcgacgaagttgagagcctcatcaagcggcacgaggccttccagaagtcagcagtggcctgggaggagcgattctgtgcgctggagaagcttactgcgctagaggagcgggagaaggagcgaaagagaaagagggaggaggaggagcggcggaaacagccgcctgctcccgaacccacagccagtgtgcctccaggggacctggtgggcggccagacagcttctgacaccacctgggacggaacccagccacggccaccaccatccacacaagcacccagtgttaatggagtctgcacagatggagagccctcacagcccctgctgggacaacagagacttgagcacagcagcttccccgaagggccgggacctggctcaggggacgaagccaatgggccccggggagagaggcagacccggactcggggcccggccccatctgcaatgccccagagcaggtctaccgagtcagcccatgctgccaccctgccgcctcgaggcccagagccatctgcccaggagcagatggaggggatgctgtgccgcaagcaggagatggaggccttcgggaagaaggctgccaacaggtcctggcagaacgtgtactgtgtcctgcggcgtgggagcctcggcttttacaaggatgccaaggcagccagcgcgggagtgccataccacggagaagtgcctgtcagcctggccagggcccagggcagcgtcgcctttgattaccgaaagcgcaaacatgtcttcaagctgggcttacaggatggaaaagaatatttattccaggccaaggatgaggcagagatgagctcgtggctacgggtggtgaatgcagccattgccacagcgtcttctgcctctggagagcctgaagagccggtggtgcccagcaccacccggggcatgacccgggccatgaccatgcccccagtgtcacccgtcggggctgaggggcctgttgtgctccgcagcaaagacggcagagaacgagagcgagaaaaacgcttcagcttctttaagaagaacaagtagttgggggcaaggtcccaggccaactccctccctccgttcaggaaactgccagggacagtcgacagggaccgccctcttgtcaggacaactgcctgctgctagggtctgttgccaaggtcaacccatcaccaggaactgtcactggggacgagtccatgttcccaagggcagcccttctcttctgctgtttaattccagactggtggtgggacccaggtaaccccctctcccacccccgccgacttctcccctttccccagcctcgtgcctctgtccctcaccacggtgtggacagtgccgcaccctcaacataggccatgtggggagtggctgcccctgcctcagggtcattctcctgccatgcgagggcactcgccttctgccttctggttcctcacccctcagaccagccaggaacctctcagagctgaagcaggccctgggggcagaagtgccagatgacagtcagaggcgcaggagccctccctccccacccccaccctgtaactccagctgccactccatctccagctgctctcaatggcttccaggtgtgttgttcggggacagccaccgccttgagtctggccaaggaggtgattaaacagctcagcttctctcac

SEQ ID NO: 185371 - DNA, 8085 bp, Homo sapiens
  Payload ID: 16502
  Gene Symbol: SPTBN2
  Gene Name: spectrin, beta, non-erythrocytic 2
  Uniprot ID: O15020
  ENST ID: ENST00000529997
  CDS Start-End: 1-7098
atgagcagcacgctgtcacccacagactttgacagcttggaaatccagggccagtacagtgacatcaacaaccgctgggaccttcctgactcggactgggacaatgacagcagctcggcccgcctctttgagaggtctcgcattaaggctctggcagatgaacgagaagctgtgcagaagaaaaccttcaccaagtgggtaaactcgcacctggcccgggtcacgtgccgggtgggggacctgtacagcgacctccgggacggacgcaacctgctgaggctcctcgaggtgctctcgggagagatactgccaaagcctacaaagggccgcatgcggatccactgcctggagaacgtggacaaggcactgcagttcctcaaggagcagaaagtgcacttggaaaacatgggctcccatgacattgtggacggaaaccaccgactgacccttgggctggtctggaccatcatccttcgattccagatccaagacatcagtgtggagacagaagacaacaaggagaagaagtcagccaaggatgccctgcttctgtggtgccagatgaagactgcaggttatcccaacgtcaatgtacacaacttcaccaccagctggagagatggactagctttcaacgccatcgtgcataaacaccggccagacctgctggattttgagtctctgaagaagtgtaatgcacactataatctgcagaatgcattcaatctggctgaaaaggaactgggacttaccaagctgctggatcccgaagacgtgaatgtggaccagccagatgagaagtcaatcattacctatgtggctacttactaccattacttctccaagatgaaggccctggccgtggaaggcaagagaattggcaaggtgctggaccatgccatggaggcagagcgcctggtggagaaatacgagtccctggcctcggagctgctgcagtggatcgagcaaacgatcgtgaccctcaatgaccggcagttggccaactcccttagcggggtccagaaccagctgcagtccttcaactcctaccgcaccgtggagaagccgcccaagtttaccgagaaagggaacttggaagtgctgctcttcaccatccagagcaagcttcgggccaacaaccagaaggtctacacgccccgcgagggccggctcatctcggacatcaacaaggcttgggagcggctggagaaggcggagcacgagcgtgagctggccctgcgcaccgagctcatccgccaggagaagctggagcagctggccgcccgcttcgaccgcaaggctgccatgcgggagacctggctcagcgagaaccagcgcctcgtgtcccaggacaactttgggctggagctggcagctgtcgaggcagcagtacggaagcacgaagccattgagacggacatcgtggcctacagcggccgggtgcaggcagtggacgccgtggctgcagagctggccgccgagcgctaccacgacatcaagcgcatcgccgctcggcagcacaacgtggcacggctctgggacttcttgcggcagatggtggccgcccggcgggagcggctcctcctcaacctggagctgcagaaggtgttccaggacctgctctacctcatggactggatggaagagatgaagggccggctgcagtctcaggacctgggcaggcacctagcaggagtggaggacctgctgcagctgcacgagctggtggaggcagacatcgccgtgcaggccgagagggtgcgggccgtcagcgcctctgccctgcgcttctgcaacccagggaaagagtatagaccttgcgacccgcagctggtgtcggagcgggtggccaagctagagcagagctatgaggcactgtgcgagttggcagcggcgcggcgggcccggctggaggaatcacggcggctctggcgtttcctctgggaggtgggtgaagctgaggcctgggtgcgggagcagcagcacctcctggcctcagccgacacgggccgagacctgaccggtgccctccgcctgctcaacaagcacacagccctgcggggcgagatgagcggccggctggggcccctgaagctcaccctggagcagggccagcagttggtggccgagggtcaccctggggcaagccaggcctctgcccgtgcagctgaactccaagcccagtgggagcggctagaggccctggccgaggagcgtgcccagcggctggcccaagccgccagcctctaccagttccaggccgatgcaaacgacatggaggcctggttggttgacgcactgcgcctggtgtccagccccgagctggggcacgacgagttctccacgcaggctctagccaggcagcatcgggccctggaggaggagattcgaagccaccggccaaccctggacgccttgagggaacaggcagcagccctgccccccacactgagccgcacgcccgaggtgcagagccgggtgcccaccctggagcggcactacgaggagctgcaggcccgggcaggcgagcgagcgcgggccttggaggcagccctggcgctctacaccatgctcagcgaggccggggcctgtggactctgggtggaggagaaggagcagtggctcaacgggctggccctgcctgaacgcctggaggacctggaggtcgtgcagcagaggttcgagaccctggagcctgaaatgaacacccttgcagcacaaatcaccgcggtgaatgacattgccgagcagttactgaaggccaaccccccaggcaaagaccgcattgtcaacacccaggagcagctcaaccacaggtggcagcagtttcggcgtctggcagacggcaagaaggcagctctcacctcagccctgagcatccagaactaccacttagagtgcacggagacccaggcctggatgagagagaagaccaaagtcatcgagtccacccagggcctaggcaacgatctggctggggtgctggccctgcagcgcaagctggccggcacggagcgggacctggaggccatcgccgcccgggtgggcgaactgactcgagaggcaaatgccctggctgccggccatcccgctcaggcagtggccatcaacgcccggctgagagaggtgcagaccggctgggaggacctcagggccaccatgcggcgtcgagaagagtcgctgggggaggcgcggcggctgcaggacttcttgcgcagcttggatgacttccaggcctggctaggccgcactcagactgctgtggcctctgaagaagggccggccaccctgcctgaggcagaggccctcctggcccaacatgcagccctgcggggagaggtggagcgggcccagagcgagtatagccggctgcgagccctgggcgaggaggtgacccgggaccaggctgacccccagtgcctcttcctacgacagcgactggaggccctgggaactggctgggaggagctgggccgaatgtgggagagccggcaaggtcgcctggcccaggcccacggcttccagggattcctgcgggatgctcgtcaggctgagggcgtgctcagcagccaggaatatgttctgtctcacacggagatgccagggacactccaggctgctgatgctgccattaaaaaactggaggacttcatgagcaccatggacgccaatggggaacggatccacgggctcctggaggctggccgccagctggtatctgaaggcaacatccacgccgacaagattcgggaaaaggcagactccattgagaggaggcacaagaagaatcaagacgcagcgcagcaatttctgggccgtcttcgggacaaccgggagcagcagcatttcctgcaagattgtcacgagctgaagctctggatcgacgagaagatgctgacagcccaggacgtgtcctatgacgaggcccgcaacctgcatactaagtggcagaagcaccaggcattcatggccgagctggctgccaacaaagactggctggacaaggtggacaaggaagggcgagagctcacccttgagaagccagagctgaaagccctggtgtcggagaagctgagagacctgcacaggcgctgggacgagctggagaccaccacccaagccaaggcccgcagcctctttgatgccaaccgagctgagctgtttgcccagagctgctgtgccctggagagctggctggagagcctgcaggcccagctgcactcggatgactacggcaaggacctcaccagcgtcaacatcctgctcaagaagcagcagatgctggaatgggagatggctgtgagagagaaggaggtggaggcaatccaggcccaggccaaagcactggcccaggaggaccagggtgcaggggaggtggagagaacctcgagggccgtggaggagaagttcagggccttgtgccagcccatgcgggaacgctgccggcgcctgcaggcttctcgcgagcagcaccagttccaccgcgatgtggaagatgagattttgtgggtgacagagcggctgcccatggccagctccatggagcatggcaaggacctgcccagcgtccagcttctcatgaagaaaaaccagaccctgcagaaagagattcagggccatgagccccggatcgcggacctgagggagcggcagcgtgctctaggtgcagcagcagcaggtccagagctggctgagctgcaggaaatgtggaaacgcctgggccacgagctggaacttcgagggaagcgactggaggatgccctgcgagcccagcagttctaccgcgatgccgccgaggcggaggcctggatgggcgagcaggaattacacatgatgggccaggagaaggccaaggatgagctgagtgcccaggcagaggtgaagaagcaccaggtgctggagcaagccctggccgactacgcgcagaccatccaccagctggcggccagcagccaggacatgattgaccacgagcacccagagagcactcggatatccatccgccaagcccaggtggacaagctgtatgccggcctgaaggagctggctggagagcggcgggagcgcctgcaggagcacctccggctgtgccagctccgccgcgagctggatgacctggaacagtggatccaggagcgcgaggtggtggcggcctcccacgagctgggccaggactacgagcatgtgactatgctccgagacaaattccgagagttctcccgggacacaagcaccatcggtcaggagcgcgtagatagcgccaatgcgctggccaatgggctcattgctgggggccatgctgcacgggccaccgtggccgagtggaaggacagtctcaacgaggcctgggctgacctgcttgagctgctggacacacggggtcaggtgctggccgcggcgtacgagctgcagcgcttcctgcacggggcacgccaagccctggcgcgggtgcagcacaagcagcagcagcttccggacgggactggccgcgacctcaacgctgccgaggccctgcagcgccgacactgtgcctacgagcatgacattcaggccctcagcccccaggtccagcaggtgcaggacgacggccaccggctccagaaggcctacgctggagacaaggctgaggagatcggccgccacatgcaggccgtggccgaggcctgggcccagcttcagggaagctctgccgcccgccggcagctgctgctggacaccacagacaagttccgcttcttcaaggctgtccgggaactgatgctctggatggatgaggtcaacctgcagatggatgcccaggagcgtccccgggatgtgtcctccgcggatctagtcatcaagaaccagcaaggcatcaaggcagagatagaggcccgggcagaccgcttctcctcctgcatcgacatggggaaggagctgctggccaggagccactatgcggccgaggagatctcagagaagctgtctcagctgcaggcacggcgccaggagacagctgagaagtggcaggagaagatggactggcttcagctggttttggaggtgcttgtgtttggaagagatgcagggatggcagaggcctggctctgcagccaggagccactggtgcgcagcgctgagctgggttgcacggtcgacgaagttgagagcctcatcaagcggcacgaggccttccagaagtcagcagtggcctgggaggagcgattctgtgcgctggagaagcttactgcgctagaggagcgggagaaggagcgaaagagaaagagggaggaggaggagcggcggaaacagccgcctgctcccgaacccacagccagtgtgcctccaggggacctggtgggcggccagacagcttctgacaccacctgggacggaacccagccacggccaccaccatccacacaagcacccagtgttaatggagtctgcacagatggagagccctcacagcccctgctgggacaacagagacttgagcacagcagcttccccgaagggccgggacctggctcaggggacgaagccaatgggccccggggagagaggcagacccggactcggggcccggccccatctgcaatgccccagagcaggtctaccgagtcagcccatgctgccaccctgccgcctcgaggcccagagccatctgcccaggagcagatggaggggatgctgtgccgcaagcaggagatggaggccttcgggaagaaggctgccaacaggtcctggcagaacgtgtactgtgtcctgcggcgtgggagcctcggcttttacaaggatgccaaggcagccagcgcgggagtgccataccacggagaagtgcctgtcagcctggccagggcccagggcagcgtcgcctttgattaccgaaagcgcaaacatgtcttcaagctgggcttacaggatggaaaagaatatttattccaggccaaggatgaggtgagctgtccttcgtgttcctctctgtccgtgccattccagaagcttccagctgcagactccccttctttccctgtcctccctctttttcctggtcttgtcctttgtggtaagactggatgtgtgcgacggccgcaccaggccgcactccctgtctaagccggccacattctcctaatagcatgaaacagtcagctcactttctgcctcctcctcttacacttccctgctgtccactgcggccaactcagcacagtgtccttgaagctgattgagggtctttccatccacaggcagagatgagctcgtggctacgggtggtgaatgcagccattgccacagcgtcttctgcctctggagagcctgaagagccggtggtgcccagcaccacccggggcatgacccgggccatgaccatgcccccagtgtcacccgtcggggctgaggggcctgttgtgctccgcagcaaagacggcagagaacgagagcgagaaaaacgcttcagcttctttaagaagaacaagtagttgggggcaaggtcccaggccaactccctccctccgttcaggaaactgccagggacagtcgacagggaccgccctcttgtcaggacaactgcctgctgctagggtctgttgccaaggtcaacccatcaccaggaactgtcactggggacgagtccatgttcccaagggcagcccttctcttctgctgtttaattccagactggtggtgggacccaggtaaccccctctcccacccccgccgacttctcccctttccccagcctcgtgcctctgtccctcaccacggtgtggacagtgccgcaccctcaacataggccatgtggggagtggctgcccctgcctcagggtcattctcctgccatgcgagggcactcgccttctgccttctggttcctcacccctcagaccagccaggaacctctcagagctgaagcaggccctgggggcagaagtgccagatgacagtcagaggcgcaggagccctccctccccacccccaccctgtaactccagctgccactccatctccagctgctctcaatggcttccaggtgtgttgttcggggacagccaccgccttgagtctggccaaggaggtgattaaacagctcagcttctc

SEQ ID NO: 185372 - DNA, 859 bp, Homo sapiens
  Payload ID: 16502
  Gene Symbol: SPTBN2
  Gene Name: spectrin, beta, non-erythrocytic 2
  ENST ID: ENST00000527010
  CDS Start-End: 509-859
tgatttgggcataattccttcctctcctaagcaggcagcagttcaccttggttaaggaccttggaccttagaccactcagacgctaacaaaccaaggagaaacccagccgtgtcaggcctagaaatgtctgcccccacccccacccccctcaagacggtgactaggccggaattctcctggttgataaatgagaggagctgagaagcgctgagatgcctgtttggagcatctgatctgtagaagacgaatcttcactgtgccatggagatgttctgggagggagagccggcccagctgcctgaaggaggacgcgagagcgaggggacgggtgagaggaatgcttagcggagacggactggaggtgcccggagaggaaaggggaacggaggctggatctcgggaaacctcgtcggcagtgtcattagaggaaggatcgcgtgtctcggggatacggattttggaggaaaagcagaatagggacaaaggagcaggaagccgcctaccaccatgagcagcacgctgtcacccacagactttgacagcttggaaatccagggccagtacagtgacatcaacaaccgctgggaccttcctgactcggactgggacaatgacagcagctcggcccgcctctttgagaggtctcgcattaaggctctggcagatgaacgagaagctgtgcagaagaaaaccttcaccaagtgggtaaactcgcacctggcccgggtcacgtgccgggtgggggacctgtacagcgacctccgggacggacgcaacctgctgaggctcctcgaggtgctctcgggagagatactgccaaagcctacaaagggccgcatgcggatccactgcctggag

SEQ ID NO: 185373 - DNA, 2890 bp, Homo sapiens
  Payload ID: 16502
  Gene Symbol: SPTBN2
  Gene Name: spectrin, beta, non-erythrocytic 2
  ENST ID: ENST00000611817
  CDS Start-End: 44-2848
cacaaggagagcggagcacaggagcaggaagccgcctaccaccatgagcagcacgctgtcacccacagactttgacagcttggaaatccagggccagtacagtgacatcaacaaccgctgggaccttcctgactcggactgggacaatgacagcagctcggcccgcctctttgagaggtctcgcattaaggctctggcagatgaacgagaagctgtgcagaagaaaaccttcaccaagtgggtaaactcgcacctggcccgggtcacgtgccgggtgggggacctgtacagcgacctccgggacggacgcaacctgctgaggctcctcgaggtgctctcgggagagatactgccaaagcctacaaagggccgcatgcggatccactgcctggagaacgtggacaaggcactgcagttcctcaaggagcagaaagtgcacttggaaaacatgggctcccatgacattgtggacggaaaccaccgactgacccttgggctggtctggaccatcatccttcgattccagatccaagacatcagtgtggagacagaagacaacaaggagaagaagtcagccaaggatgccctgcttctgtggtgccagatgaagactgcaggttatcccaacgtcaatgtacacaacttcaccaccagctggagagatggactagctttcaacgccatcgtgcataaacaccggccagacctgctggattttgagtctctgaagaagtgtaatgcacactataatctgcagaatgcattcaatctggctgaaaaggaactgggacttaccaagctgctggatcccgaagacgtgaatgtggaccagccagatgagaagtcaatcattacctatgtggctacttactaccattacttctccaagatgaaggccctggccgtggaaggcaagagaattggcaaggtgctggaccatgccatggaggcagagcgcctggtggagaaatacgagtccctggcctcggagctgctgcagtggatcgagcaaacgatcgtgaccctcaatgaccggcagttggccaactcccttagcggggtccagaaccagctgcagtccttcaactcctaccgcaccgtggagaagccgcccaagtttaccgagaaagggaacttggaagtgctgctcttcaccatccagagcaagcttcgggccaacaaccagaaggtctacacgccccgcgagggccggctcatctcggacatcaacaaggcttgggagcggctggagaaggcggagcacgagcgtgagctggccctgcgcaccgagctcatccgccaggagaagctggagcagctggccgcccgcttcgaccgcaaggctgccatgcgggagacctggctcagcgagaaccagcgcctcgtgtcccaggacaactttgggctggagctggcagctgtcgaggcagcagtacggaagcacgaagccattgagacggacatcgtggcctacagcggccgggtgcaggcagtggacgccgtggctgcagagctggccgccgagcgctaccacgacatcaagcgcatcgccgctcggcagcacaacgtggcacggctctgggacttcttgcggcagatggtggccgcccggcgggagcggctcctcctcaacctggagctgcagaaggtgttccaggacctgctctacctcatggactggatggaagagatgaagggccggctgcagtctcaggacctgggcaggcacctagcaggagtggaggacctgctgcagctgcacgagctggtggaggcagacatcgccgtgcaggccgagagggtgcgggccgtcagcgcctctgccctgcgcttctgcaacccagggaaagagtatagaccttgcgacccgcagctggtgtcggagcgggtggccaagcttactgcgctagaggagcgggagaaggagcgaaagagaaagagggaggaggaggagcggcggaaacagccgcctgctcccgaacccacagccagtgtgcctccaggggacctggtgggcggccagacagcttctgacaccacctgggacggaacccagccacggccaccaccatccacacaagcacccagtgttaatggagtctgcacagatggagagccctcacagcccctgctgggacaacagagacttgagcacagcagcttccccgaagggccgggacctggctcaggggacgaagccaatgggccccggggagagaggcagacccggactcggggcccggccccatctgcaatgccccagagcaggtctaccgagtcagcccatgctgccaccctgccgcctcgaggcccagagccatctgcccaggagcagatggaggggatgctgtgccgcaagcaggagatggaggccttcgggaagaaggctgccaacaggtcctggcagaacgtgtactgtgtcctgcggcgtgggagcctcggcttttacaaggatgccaaggcagccagcgcgggagtgccataccacggagaagtgcctgtcagcctggccagggcccagggcagcgtcgcctttgattaccgaaagcgcaaacatgtcttcaagctgggcttacaggatggaaaagaatatttattccaggccaaggatgaggcagagatgagctcgtggctacgggtggtgaatgcagccattgccacagcgtcttctgcctctggagagcctgaagagccggtggtgcccagcaccacccggggcatgacccgggccatgaccatgcccccagtgtcacccgtcggggctgaggggcctgttgtgctccgcagcaaagacggcagagaacgagagcgagaaaaacgcttcagcttctttaagaagaacaagtagttgggggcaaggtcccaggccaactccctccctccgttcagg

SEQ ID NO: 185374 - DNA, 3498 bp, Homo sapiens
  Payload ID: 16502
  Gene Symbol: SPTBN2
  Gene Name: spectrin, beta, non-erythrocytic 2
  ENST ID: ENST00000617502
  CDS Start-End: 73-2877
ccactgagcagccaaccgcagcctctggccacaaggagagcggagcacaggagcaggaagccgcctaccaccatgagcagcacgctgtcacccacagactttgacagcttggaaatccagggccagtacagtgacatcaacaaccgctgggaccttcctgactcggactgggacaatgacagcagctcggcccgcctctttgagaggtctcgcattaaggctctggcagatgaacgagaagctgtgcagaagaaaaccttcaccaagtgggtaaactcgcacctggcccgggtcacgtgccgggtgggggacctgtacagcgacctccgggacggacgcaacctgctgaggctcctcgaggtgctctcgggagagatactgccaaagcctacaaagggccgcatgcggatccactgcctggagaacgtggacaaggcactgcagttcctcaaggagcagaaagtgcacttggaaaacatgggctcccatgacattgtggacggaaaccaccgactgacccttgggctggtctggaccatcatccttcgattccagatccaagacatcagtgtggagacagaagacaacaaggagaagaagtcagccaaggatgccctgcttctgtggtgccagatgaagactgcaggttatcccaacgtcaatgtacacaacttcaccaccagctggagagatggactagctttcaacgccatcgtgcataaacaccggccagacctgctggattttgagtctctgaagaagtgtaatgcacactataatctgcagaatgcattcaatctggctgaaaaggaactgggacttaccaagctgctggatcccgaagacgtgaatgtggaccagccagatgagaagtcaatcattacctatgtggctacttactaccattacttctccaagatgaaggccctggccgtggaaggcaagagaattggcaaggtgctggaccatgccatggaggcagagcgcctggtggagaaatacgagtccctggcctcggagctgctgcagtggatcgagcaaacgatcgtgaccctcaatgaccggcagttggccaactcccttagcggggtccagaaccagctgcagtccttcaactcctaccgcaccgtggagaagccgcccaagtttaccgagaaagggaacttggaagtgctgctcttcaccatccagagcaagcttcgggccaacaaccagaaggtctacacgccccgcgagggccggctcatctcggacatcaacaaggcttgggagcggctggagaaggcggagcacgagcgtgagctggccctgcgcaccgagctcatccgccaggagaagctggagcagctggccgcccgcttcgaccgcaaggctgccatgcgggagacctggctcagcgagaaccagcgcctcgtgtcccaggacaactttgggctggagctggcagctgtcgaggcagcagtacggaagcacgaagccattgagacggacatcgtggcctacagcggccgggtgcaggcagtggacgccgtggctgcagagctggccgccgagcgctaccacgacatcaagcgcatcgccgctcggcagcacaacgtggcacggctctgggacttcttgcggcagatggtggccgcccggcgggagcggctcctcctcaacctggagctgcagaaggtgttccaggacctgctctacctcatggactggatggaagagatgaagggccggctgcagtctcaggacctgggcaggcacctagcaggagtggaggacctgctgcagctgcacgagctggtggaggcagacatcgccgtgcaggccgagagggtgcgggccgtcagcgcctctgccctgcgcttctgcaacccagggaaagagtatagaccttgcgacccgcagctggtgtcggagcgggttgcaaagcttactgcgctagaggagcgggagaaggagcgaaagagaaagagggaggaggaggagcggcggaaacagccgcctgctcccgaacccacagccagtgtgcctccaggggacctggtgggcggccagacagcttctgacaccacctgggacggaacccagccacggccaccaccatccacacaagcacccagtgttaatggagtctgcacagatggagagccctcacagcccctgctgggacaacagagacttgagcacagcagcttccccgaagggccgggacctggctcaggggacgaagccaatgggccccggggagagaggcagacccggactcggggcccggccccatctgcaatgccccagagcaggtctaccgagtcagcccatgctgccaccctgccgcctcgaggcccagagccatctgcccaggagcagatggaggggatgctgtgccgcaagcaggagatggaggccttcgggaagaaggctgccaacaggtcctggcagaacgtgtactgtgtcctgcggcgtgggagcctcggcttttacaaggatgccaaggcagccagcgcgggagtgccataccacggagaagtgcctgtcagcctggccagggcccagggcagcgtcgcctttgattaccgaaagcgcaaacatgtcttcaagctgggcttacaggatggaaaagaatatttattccaggccaaggatgaggcagagatgagctcgtggctacgggtggtgaatgcagccattgccacagcgtcttctgcctctggagagcctgaagagccggtggtgcccagcaccacccggggcatgacccgggccatgaccatgcccccagtgtcacccgtcggggctgaggggcctgttgtgctccgcagcaaagacggcagagaacgagagcgagaaaaacgcttcagcttctttaagaagaacaagtagttgggggcaaggtcccaggccaactccctccctccgttcaggaaactgccagggacagtcgacagggaccgccctcttgtcaggacaactgcctgctgctagggtctgttgccaaggtcaacccatcaccaggaactgtcactggggacgagtccatgttcccaagggcagcccttctcttctgctgtttaattccagactggtggtgggacccaggtaaccccctctcccacccccgccgacttctcccctttccccagcctcgtgcctctgtccctcaccacggtgtggacagtgccgcaccctcaacataggccatgtggggagtggctgcccctgcctcagggtcattctcctgccatgcgagggcactcgccttctgccttctggttcctcacccctcagaccagccaggaacctctcagagctgaagcaggccctgggggcagaagtgccagatgacagtcagaggcgcaggagccctccctccccacccccaccctgtaactccagctgccactccatctccagctgctctcaatggcttccaggtgtgttgttcggggacagccaccgccttgagtctggccaaggaggtgattaaacagctcagcttctctc

SEQ ID NO: 185375 - DNA, 8676 bp, Homo sapiens
  Payload ID: 16503
  Gene Symbol: SPTBN4
  Gene Name: spectrin, beta, non-erythrocytic 4
  Uniprot ID: Q9H254
  ENST ID: ENST00000352632
  CDS Start-End: 87-7781
tatgaccctgtgtgactcagtgacccggagggcaagcaggactgtgggtgacaccttgtgtcatcctctgagcctcaccttccccgatggcgcaggtaccaggggaagtggacaacatggagggcctgcctgctcctaacaacaaccctgctgcccgctgggagagtccggatcggggctgggagcgggagcagccggctgcgtccaccgcagcggcctcgctctttgagtgctcccggatcaaggccttggcagatgagcgggaagccgtgcagaagaaaaccttcaccaagtgggtgaactcgcacctcgcccgcgtgggctgccacatcggggacctctatgtggacctccgggacggcttcgtgctcacgcggctcctggaagtgctgtctggggagcagctgcccaggcccacgcgcggccgcatgcggatccactcactggagaacgtggacaaggcgctgcagtttctgaaggagcagcgcgtgcacctggagaacgtgggttcgcatgacatcgtggatgggaatcaccggctgacgctggggctggtctggaccatcatcctgcgcttccagattcaagtcatcaaaattgagactgaggacaacagagagacacgctcagccaaggatgctctgctcttgtggtgtcagatgaagacagctggttaccctgaggtaaacatccagaatttcaccaccagctggcgggatggcttggccttcaatgccctcattcaccggcacaggcctgatctcgtggacttcagcaaactcaccaagtccaatgccaactacaacctgcagagagccttccgcacagctgagcagcacctggggctggcgcggctgctggatcctgaagatgtgaacatggaggctccagatgagaagtccatcatcacctacgtggtctctttctaccactatttctccaagatgaaggctctggctgtggaggggaagcgtatcgggaaggtcttggaccaggtattggaggtggggaagatcatagaacgctacgaggagctggcggctgagctgctggcctggatccaccgcaccgtgggcctcatcagcaatcagaaatttgccaactccttaagtggggtgcagcagcaactccaggctttcacggcctattgcacgctggagaagcctgtcaagttccaggagaaggggaacctagaggtgctgctcttcagcatccagagcaaactgcgtgcctgcaaccgtcgcctctttgtgcctcgggagggctgtggcatctgggatattgacaaggcatggggtgagctggagaaggctgagcatgagcgggaggctgccctacgggctgagctgattcggcaggagaagctggaactactggcacagaggtttgaccacaaggtggctatgagggagagctggctgaatgagaaccagcgtctggtctcccaggacaactttgggtatgagctgcccgcagtggaggcagccatgaagaaacacgaagcgatcgaggcagacattgcggcctacgaggagcgggtgcagggtgtggcggagctggcccaggcattggcagccgaaggctactacgatatccggcgggtggcagcccagcgtgacagcgtcctgcgccagtgggccctgctaactgggcttgtgggtgcccggcggacacgacttgagcagaaccttgccctgcagaaggtcttccaggagatggtgtacatggtggactggatggaggagatgcaggctcagctgctgtcccgggagtgtgggcagcacctggtggaggcagacgacctgttgcagaagcatggactgctggagggagacattgccgcccagagcgagcgggtggaggctctcaatgccgctgccctgcgcttctcccagctgcagggctaccagccctgcgacccgcaggtcatctgcaaccgcgtgaaccacgtgcacggctgcctggcggagctgcaggagcaggcagcgcggcgacgcgcggagctggaggcttcgcggagcctgtgggcgctgctgcaggagctggaggaggccgagagctgggcgcgcgacaaggagcgtctcctggaggctgcgggcggcggcggtgcggcgggcgcagcgggcgcagcgggaacagcgggcggcgcgcatgacctgtccagcacagcgcgcctcctggcccagcacaagatcctgcagggcgagctgggcgggcggcgagcgttgctgcagcaggccctgcggtgtggcgaggagctggttgcggccggcggtgccgtcggcccgggagcagacaccgtgcacctggtaggcctggcggagcgcgcggcgagcgcccggcgccgctggcagaggctggaagaggcggcggcgcggcgagagcggcggctgcaggaggcgcgggcgctgcaccagttcggcgctgacctcgacgggctgctggactggcttcgcgacgcttaccgcctggcagccgccggtgacttcggccacgacgaagcttccagccgccgcctggcgcgccagcaccgcgcgctcaccggggaggtggaggcacatcgcgggcccgtgagcggcctgcggcgccagctggcgacactcgggggtgccagtggcgcagggccactggtggtggcgctgcaggtgcgcgtggtggaagcagagcagttgttcgctgaggtgaccgaagtggcggcgctgaggcgccagtggctgcgggacgcgctcgctgtctaccgcatgtttggcgaggtgcacgcgtgtgagctgtggatcggcgagaaggagcaatggctgctctccatgcgtgtgccggattcactcgacgacgtcgaggtggtgcagcaccgattcgagagcctggaccaagagatgaacagcctgatgggccgcgttctggacgtgaaccacacagtccaggagctggtggaaggaggccaccccagttcagatgaggtgcgttcctgccaggaccacctcaacagcaggtggaaccgcatcgtggagctagtggaacagcgcaaagaggaaatgagcgcggtgctgctggtggagaaccacgtgctggaggtggccgaggtgcgcgcccaggtgcgtgagaagcggagagctgtggagagcgcgccccgggccggcggcgccctgcagtggcgtcttagcggcctagaggccgctctgcaggcgctggagccgcgccaggcggcccttctggaggaggcagccctgctggctgagcgcttcccggcgcaggcggcgcggctgcaccagggcgcggaggagctgggcgccgagtggggcgcgctagctagcgcggctcaggcctgcggcgaggcggtggcggcagcagggcgcctgcagcgcttcctacatgacctcgacgctttcctggactggctcgtgcgcgcccaggaggcggcgggcggcagcgaggggcccctgcccaacagcctagaagaggcggacgcgctgctggcgcgccacgctgcgctcaaggaggaggtggaccagcgcgaggaagactatgctcgcatcgtggcggccagcgaggcgctgctggccgccgacggcgcagagctgggcccgggcctggcactagacgagtggctgccacacctcgaacttggctggcataaactgctcggcttgtgggaggcgcgcagggaggcgctggtccaggcgcacatctaccagctcttcctgcgggatctacgccaggcgctcgtggtgctgcgtaaccaggagatggcgctgtctggtgcggagctcccgggcacagtggaatcggtggaggaggccttgaaacagcaccgtgactttctcaccaccatggagctgagccagcaaaagatgcaggtggccgtgcaggctgcagagggcctgctgaggcagggcaacatctacggggagcaggctcaggaggctgtgacccggctgctggagaagaaccaagaaaaccagttacgggcccagcaatggatgcaaaagctacatgaccaacttgagctgcagcacttcctccgagactgccacgagctggatggctggatccatgagaagatgctgatggcgcgggatggcacgcgggaggacaaccacaagctgcataagagatggctccggcaccaggcattcatggccgagctggctcagaataaggagtggctggagaagatcgagcgggagggccagcaactgatgcaggagaagcccgaactggcggcctccgtgcggaagaagctgggcgagatccgccagtgctgggcggagctggagagcaccacccaggccaaggcacggcagctctttgaggccagcaaagcagaccagctggtgcagagctttgctgagctggacaagaagctccttcacatggagagccagctgcaagacgtggaccctggaggagacctggccactgtcaacagtcagctcaagaagctgcagtccatggagtcgcaggtggaggagtggtaccgcgaggtgggagagctgcaggcgcagacggcggcgctgccgctggagccggcgagcaaggagctggtgggtgagcggcagaacgcggtgggcgagcgcctggtgcgcctgctcgagccgttgcaggagcgccgccgcttgctgctggcttccaaggagttgcaccaggtggcgcacgacctggacgacgagctggcatgggttcaggagcggctgccactggccatgcagacagagcgaggcaacggtttgcaggcggtccagcagcacatcaaaaagaaccagggcctgcggcgggagatccaggcgcatgggccgcgcctggaggaggtgctggagcgcgcgggcgcgctggcgtcgctgcgcagcccggaggcagaggcagtgcgccggggcctggagcagctgcagagcgcctgggccggactgcgggaggctgccgagcgacggcagcaggtgctggacgccgccttccaggtggagcagtactacttcgacgtggctgaggtggaggcgtggctgggcgagcaggagctgctcatgatgagtgaggacaagggcaaggacgaacagagcaccctgcagctgctcaagaaacacctgcagctggagcaaggcgtggagaactacgaggaaagcatcgcgcagctgtcgcgccagtgccgggcgctgctggagatggggcacccggacagcgagcagatcagccggcggcagtctcaggtggaccgcctgtacgtggcgctcaaggagctgggtgaggagcgccgggtggctctggaacagcagtactggctgtaccagctcagccgccaggtgagcgagcttgagcactggattgccgagaaggaggtggtggctggctcacccgagctcggccaggactttgagcatgtctcggtgctgcaggagaaattctcagagtttgccagcgagacaggtatggcagggcgggaacggctggcagctgtgaaccagatggtggatgagctgatcgagtgtggccatacagcagcggccaccatggccgagtggaaggacggactgaacgaggcctgggctgagctgctggagctcatgggcacacgggcccagctgctggccgcctctcgggagcttcataagttcttcagtgacgcccgagagcttcagggacagattgaggagaagcggaggcggctgccccgcctgaccaccccgcctgagccgagacccagtgccagttccatgcagcggaccctgagagcctttgagcatgacctgcagctcctcgtgtcccaggtacggcagctgcaggagggggcggcccagctgcggacggtgtatgcgggtgaacatgccgaggccatcgctagccgggagcaggaggtgctgcagggttggaaagagctgctgtcagcctgtgaggatgcccgcctgcatgtcagctccacagccgacgccctgcgcttccacagccaagtccgcgacctgctctcctggatggatggcatcgccagccagattggggcagccgacaagcccagggacgtgtcatcagtggaggtgctcatgaactaccaccagggcctgaagactgagctggaggcgcgggtgcctgagctgaccacctgccaggagctggggcgatctctgctgctcaacaaaagtgccatggctgatgagatccaggcacagctggacaagctgggaaccaggaaggaggaggtgtcggaaaagtgggaccgccattgggagtggctgcagcagatgctggaggtgcaccagtttgcccaggaggcggtggtggctgatgcctggctgacagcccaggagccgctcctgcagagccgggagctgggcagcagcgtggatgaggtggagcagcttatccggcgacatgaggccttccgcaaagcggctgcagcctgggaagagaggttcagctctctgcggcgcctgaccacgatcgagaaaatcaaagcggaacagagcaagcagccgcctaccccactgctggggcgcaagttctttggggaccccacggaactggcggccaaggcggcgcccctgctgcggccagggggctatgaaaggggcttggagcccctggcccgccgagcctcggacacgctctcggccgaggtgcggactcgggtggggtatgtgcgccaggagctcaagcccgagcgcctccagccgcgcattgaccggctgccggagatcccggggagggtggagcccgcggccctgccggccgcaccagaggacgcggcggagacccccgcgacccccgcggcggcggagcaggtgcggccacgaccggagcgccaggagtcagctgatcgcgcggaggagctgcccaggaggcggcggcctgagcggcaagagtcagtcgatcaatccgaggaggctgcgcggaggcggcggccggagcggcaggagtcagcggagcacgaggcggcacacagccttaccctgggccgctatgagcagatggagcggcggcgcgagcggcgtgagcggcgcttggagcggcaggagtccagcgaacaggagatgcccatcagaggagacctggtcaaggggaaggccaccctggctgacattgtggaacagctgcaggagaaagaggcaggcccagggctgcctgctgggccgtcgctgcctcagccacgcgagcttcccccaggtcgcctgcccaacgggcttgagctgcccgagcggacacctcggccggaccggccccgggcgcgggaccggcccaagccgcgacggcggccgcggcccagagagggtggtgagggcgggggaagccggcgctcgcgctccgccccggcccagggcggctccgcccccgcgcctccgccaccgcccactcacacagtgcagcacgagggcttcctactgcgcaagcgcgagctcgacgctaaccgcaagtcgtccaaccggtcgtgggtgagcctgtactgtgtgcttagtaagggggaactgggcttctacaaggactccaagggcccggcatccgggagcacacacggtggggaaccgctgctcagcctgcacaaggccaccagcgaggtggctagtgactacaagaaaaagaagcatgtcttcaagctccagacccaggatggcagtgagtttttgctccaggcaaaagatgaggaggagatgaacggctggctggaggctgtagcttcctcggtggcggaacacgcagagatcgcccgctggggccagacactacccactacttcatccacagatgagggcaaccctaagagggaaggcggagatcgcagggccagcgggcgcaggaagtgacttcccacccccaggacctgacacatctcgtctcccctcttttccgcactgtgggcacaaagacactttttcttccgcaggggcgggagcccctagttccaacactgaggacgcgtgacatggtgggcaccggaaaggaggggacttctcctgcaccccaagaagtggtggggagattgctgcccctatagccatatctcggccccttcccactcaccacccccaccccaggtgctgggggtcccttatttttatgcaataactgagcttgatgggggtgggcagggggccagttgagccaagcccccagccccgatctgcagatcctgccccaagaagctggggtggtgggggcagtaattcctgcccccctctctgccctagggatgggcacgggggcgctggtgaggtcccctggaccatccagggtgctagggggcagggaggggacaccccctccccgcctttacctcacttccaatgctgccttgatctctgtctgggaggggggagtgaaggggccctagccccctgcactccgccgcctcagagccatgcggttaattcctgacttagtttatttttgcaaaacgtcgatctcctcctcccccgccccgcatccgcgaaggcttttaatgggaggggcgtcaaagctcaaaactgttttcctctctcctcccccctccagttgtaaatgccacttcatgaggggaggggcgaggggaagcccacccctgcatgcttctggctggagcacctccctggggagtcgggggattgggttgtgggcagtccccatggccgcctggagaagccgctggggcccgggggtgtggggcggtgtggcgggcgcacactgtatgtacctataataaaccctttggctttgacggtc

SEQ ID NO: 185376 - DNA, 8686 bp, Homo sapiens
  Payload ID: 16503
  Gene Symbol: SPTBN4
  Gene Name: spectrin, beta, non-erythrocytic 4
  ENST ID: ENST00000338932
  CDS Start-End: 103-7797
ggccgggccgggcagcggacgccgacagggagggcggtcggtcgcggcgagcagcggagacagcgacgctggcggccgcgggcccaggcctcaccttccccgatggcgcaggtaccaggggaagtggacaacatggagggcctgcctgctcctaacaacaaccctgctgcccgctgggagagtccggatcggggctgggagcgggagcagccggctgcgtccaccgcagcggcctcgctctttgagtgctcccggatcaaggccttggcagatgagcgggaagccgtgcagaagaaaaccttcaccaagtgggtgaactcgcacctcgcccgcgtgggctgccacatcggggacctctatgtggacctccgggacggcttcgtgctcacgcggctcctggaagtgctgtctggggagcagctgcccaggcccacgcgcggccgcatgcggatccactcactggagaacgtggacaaggcgctgcagtttctgaaggagcagcgcgtgcacctggagaacgtgggttcgcatgacatcgtggatgggaatcaccggctgacgctggggctggtctggaccatcatcctgcgcttccagattcaagtcatcaaaattgagactgaggacaacagagagacacgctcagccaaggatgctctgctcttgtggtgtcagatgaagacagctggttaccctgaggtaaacatccagaatttcaccaccagctggcgggatggcttggccttcaatgccctcattcaccggcacaggcctgatctcgtggacttcagcaaactcaccaagtccaatgccaactacaacctgcagagagccttccgcacagctgagcagcacctggggctggcgcggctgctggatcctgaagatgtgaacatggaggctccagatgagaagtccatcatcacctacgtggtctctttctaccactatttctccaagatgaaggctctggctgtggaggggaagcgtatcgggaaggtcttggaccaggtattggaggtggggaagatcatagaacgctacgaggagctggcggctgagctgctggcctggatccaccgcaccgtgggcctcatcagcaatcagaaatttgccaactccttaagtggggtgcagcagcaactccaggctttcacggcctattgcacgctggagaagcctgtcaagttccaggagaaggggaacctagaggtgctgctcttcagcatccagagcaaactgcgtgcctgcaaccgtcgcctctttgtgcctcgggagggctgtggcatctgggatattgacaaggcatggggtgagctggagaaggctgagcatgagcgggaggctgccctacgggctgagctgattcggcaggagaagctggaactactggcacagaggtttgaccacaaggtggctatgagggagagctggctgaatgagaaccagcgtctggtctcccaggacaactttgggtatgagctgcccgcagtggaggcagccatgaagaaacacgaagcgatcgaggcagacattgcggcctacgaggagcgggtgcagggtgtggcggagctggcccaggcattggcagccgaaggctactacgatatccggcgggtggcagcccagcgtgacagcgtcctgcgccagtgggccctgctaactgggcttgtgggtgcccggcggacacgacttgagcagaaccttgccctgcagaaggtcttccaggagatggtgtacatggtggactggatggaggagatgcaggctcagctgctgtcccgggagtgtgggcagcacctggtggaggcagacgacctgttgcagaagcatggactgctggagggagacattgccgcccagagcgagcgggtggaggctctcaatgccgctgccctgcgcttctcccagctgcagggctaccagccctgcgacccgcaggtcatctgcaaccgcgtgaaccacgtgcacggctgcctggcggagctgcaggagcaggcagcgcggcgacgcgcggagctggaggcttcgcggagcctgtgggcgctgctgcaggagctggaggaggccgagagctgggcgcgcgacaaggagcgtctcctggaggctgcgggcggcggcggtgcggcgggcgcagcgggcgcagcgggaacagcgggcggcgcgcatgacctgtccagcacagcgcgcctcctggcccagcacaagatcctgcagggcgagctgggcgggcggcgagcgttgctgcagcaggccctgcggtgtggcgaggagctggttgcggccggcggtgccgtcggcccgggagcagacaccgtgcacctggtaggcctggcggagcgcgcggcgagcgcccggcgccgctggcagaggctggaagaggcggcggcgcggcgagagcggcggctgcaggaggcgcgggcgctgcaccagttcggcgctgacctcgacgggctgctggactggcttcgcgacgcttaccgcctggcagccgccggtgacttcggccacgacgaagcttccagccgccgcctggcgcgccagcaccgcgcgctcaccggggaggtggaggcacatcgcgggcccgtgagcggcctgcggcgccagctggcgacactcgggggtgccagtggcgcagggccactggtggtggcgctgcaggtgcgcgtggtggaagcagagcagttgttcgctgaggtgaccgaagtggcggcgctgaggcgccagtggctgcgggacgcgctcgctgtctaccgcatgtttggcgaggtgcacgcgtgtgagctgtggatcggcgagaaggagcaatggctgctctccatgcgtgtgccggattcactcgacgacgtcgaggtggtgcagcaccgattcgagagcctggaccaagagatgaacagcctgatgggccgcgttctggacgtgaaccacacagtccaggagctggtggaaggaggccaccccagttcagatgaggtgcgttcctgccaggaccacctcaacagcaggtggaaccgcatcgtggagctagtggaacagcgcaaagaggaaatgagcgcggtgctgctggtggagaaccacgtgctggaggtggccgaggtgcgcgcccaggtgcgtgagaagcggagagctgtggagagcgcgccccgggccggcggcgccctgcagtggcgtcttagcggcctagaggccgctctgcaggcgctggagccgcgccaggcggcccttctggaggaggcagccctgctggctgagcgcttcccggcgcaggcggcgcggctgcaccagggcgcggaggagctgggcgccgagtggggcgcgctagctagcgcggctcaggcctgcggcgaggcggtggcggcagcagggcgcctgcagcgcttcctacatgacctcgacgctttcctggactggctcgtgcgcgcccaggaggcggcgggcggcagcgaggggcccctgcccaacagcctagaagaggcggacgcgctgctggcgcgccacgctgcgctcaaggaggaggtggaccagcgcgaggaagactatgctcgcatcgtggcggccagcgaggcgctgctggccgccgacggcgcagagctgggcccgggcctggcactagacgagtggctgccacacctcgaacttggctggcataaactgctcggcttgtgggaggcgcgcagggaggcgctggtccaggcgcacatctaccagctcttcctgcgggatctacgccaggcgctcgtggtgctgcgtaaccaggagatggcgctgtctggtgcggagctcccgggcacagtggaatcggtggaggaggccttgaaacagcaccgtgactttctcaccaccatggagctgagccagcaaaagatgcaggtggccgtgcaggctgcagagggcctgctgaggcagggcaacatctacggggagcaggctcaggaggctgtgacccggctgctggagaagaaccaagaaaaccagttacgggcccagcaatggatgcaaaagctacatgaccaacttgagctgcagcacttcctccgagactgccacgagctggatggctggatccatgagaagatgctgatggcgcgggatggcacgcgggaggacaaccacaagctgcataagagatggctccggcaccaggcattcatggccgagctggctcagaataaggagtggctggagaagatcgagcgggagggccagcaactgatgcaggagaagcccgaactggcggcctccgtgcggaagaagctgggcgagatccgccagtgctgggcggagctggagagcaccacccaggccaaggcacggcagctctttgaggccagcaaagcagaccagctggtgcagagctttgctgagctggacaagaagctccttcacatggagagccagctgcaagacgtggaccctggaggagacctggccactgtcaacagtcagctcaagaagctgcagtccatggagtcgcaggtggaggagtggtaccgcgaggtgggagagctgcaggcgcagacggcggcgctgccgctggagccggcgagcaaggagctggtgggtgagcggcagaacgcggtgggcgagcgcctggtgcgcctgctcgagccgttgcaggagcgccgccgcttgctgctggcttccaaggagttgcaccaggtggcgcacgactggacgacgagctgggcatgggttcaggagcggctgccactggccatgcagacagagcgaggcaacggtttgcaggcggtccagcagcacatcaaaaagaaccagggcctgcggcgggagatccaggcgcatgggccgcgcctggaggaggtgctggagcgcgcgggcgcgctggcgtcgctgcgcagcccggaggcagaggcagtgcgccggggcctggagcagctgcagagcgcctgggccggactgcgggaggctgccgagcgacggcagcaggtgctggacgccgccttccaggtggagcagtactacttcgacgtggctgaggtggaggcgtggctgggcgagcaggagctgctcatgatgagtgaggacaagggcaaggacgaacagagcaccctgcagctgctcaagaaacacctgcagctggagcaaggcgtggagaactacgaggaaagcatcgcgcagctgtcgcgccagtgccgggcgctgctggagatggggcacccggacagcgagcagatcagccggcggcagtctcaggtggaccgcctgtacgtggcgctcaaggagctgggtgaggagcgccgggtggctctggaacagcagtactggctgtaccagctcagccgccaggtgagcgagcttgagcactggattgccgagaaggaggtggtggctggctcacccgagctcggccaggactttgagcatgtctcggtgctgcaggagaaattctcagagtttgccagcgagacaggtatggcagggcgggaacggctggcagctgtgaaccagatggtggatgagctgatcgagtgtggccatacagcagcggccaccatggccgagtggaaggacggactgaacgaggcctgggctgagctgctggagctcatgggcacacgggcccagctgctggccgcctctcgggagcttcataagttcttcagtgacgcccgagagcttcagggacagattgaggagaagcggaggcggctgccccgcctgaccaccccgcctgagccgagacccagtgccagttccatgcagcggaccctgagagcctttgagcatgacctgcagctcctcgtgtcccaggtacggcagctgcaggagggggcggcccagctgcggacggtgtatgcgggtgaacatgccgaggccatcgctagccgggagcaggaggtgctgcagggttggaaagagctgctgtcagcctgtgaggatgcccgcctgcatgtcagctccacagccgacgccctgcgcttccacagccaagtccgcgacctgctctcctggatggatggcatcgccagccagattggggcagccgacaagcccagggacgtgtcatcagtggaggtgctcatgaactaccaccagggcctgaagactgagctggaggcgcgggtgcctgagctgaccacctgccaggagctggggcgatctctgctgctcaacaaaagtgccatggctgatgagatccaggcacagctggacaagctgggaaccaggaaggaggaggtgtcggaaaagtgggaccgccattgggagtggctgcagcagatgctggaggtgcaccagtttgcccaggaggcggtggtggctgatgcctggctgacagcccaggagccgctcctgcagagccgggagctgggcagcagcgtggatgaggtggagcagcttatccggcgacatgaggccttccgcaaagcggctgcagcctgggaagagaggttcagctctctgcggcgcctgaccacgatcgagaaaatcaaagcggaacagagcaagcagccgcctaccccactgctggggcgcaagttctttggggaccccacggaactggcggccaaggcggcgcccctgctgcggccagggggctatgaaaggggcttggagcccctggcccgccgagcctcggacacgctctcggccgaggtgcggactcgggtggggtatgtgcgccaggagctcaagcccgagcgcctccagccgcgcattgaccggctgccggagatcccggggagggtggagcccgcggccctgccggccgcaccagaggacgcggcggagacccccgcgacccccgcggcggcggagcaggtgcggccacgaccggagcgccaggagtcagctgatcgcgcggaggagctgcccaggaggcggcggcctgagcggcaagagtcagtcgatcaatccgaggaggctgcgcggaggcggcggccggagcggcaggagtcagcggagcacgaggcggcacacagccttaccctgggccgctatgagcagatggagcggcggcgcgagcggcgtgagcggcgcttggagcggcaggagtccagcgaacaggagatgcccatcagaggagacctggtcaaggggaaggccaccctggctgacattgtggaacagctgcaggagaaagaggcaggcccagggctgcctgctgggccgtcgctgcctcagccacgcgagcttcccccaggtcgcctgcccaacgggcttgagctgcccgagcggacacctcggccggaccggccccgggcgcgggaccggcccaagccgcgacggcggccgcggcccagagagggtggtgagggcgggggaagccggcgctcgcgctccgccccggcccagggcggctccgcccccgcgcctccgccaccgcccactcacacagtgcagcacgagggcttcctactgcgcaagcgcgagctcgacgctaaccgcaagtcgtccaaccggtcgtgggtgagcctgtactgtgtgcttagtaagggggaactgggcttctacaaggactccaagggcccggcatccgggagcacacacggtggggaaccgctgctcagcctgcacaaggccaccagcgaggtggctagtgactacaagaaaaagaagcatgtcttcaagctccagacccaggatggcagtgagtttttgctccaggcaaaagatgaggaggagatgaacggctggctggaggctgtagcttcctcggtggcggaacacgcagagatcgcccgctggggccagacactacccactacttcatccacagatgagggcaaccctaagagggaaggcggagatcgcagggccagcgggcgcaggaagtgacttcccacccccaggacctgacacatctcgtctcccctcttttccgcactgtgggcacaaagacactttttcttccgcaggggcgggagcccctagttccaacactgaggacgcgtgacatggtgggcaccggaaaggaggggacttctcctgcaccccaagaagtggtggggagattgctgcccctatagccatatctcggccccttcccactcaccacccccaccccaggtgctgggggtcccttatttttatgcaataactgagcttgatgggggtgggcagggggccagttgagccaagcccccagccccgatctgcagatcctgccccaagaagctggggtggtgggggcagtaattcctgcccccctctctgccctagggatgggcacgggggcgctggtgaggtcccctggaccatccagggtgctagggggcagggaggggacaccccctccccgcctttacctcacttccaatgctgccttgatctctgtctgggaggggggagtgaaggggccctagccccctgcactccgccgcctcagagccatgcggttaattcctgacttagtttatttttgcaaaacgtcgatctcctcctcccccgccccgcatccgcgaaggcttttaatgggaggggcgtcaaagctcaaaactgttttcctctctcctcccccctccagttgtaaatgccacttcatgaggggaggggcgaggggaagcccacccctgcatgcttctggctggagcacctccctggggagtcgggggattgggttgtgggcagtccccatggccgcctggagaagccgctggggcccgggggtgtggggcggtgtggcgggcgcacactgtatgtacctataataaaccctttggctttg

SEQ ID NO: 185377 - DNA, 2419 bp, Homo sapiens
  Payload ID: 16503
  Gene Symbol: SPTBN4
  Gene Name: spectrin, beta, non-erythrocytic 4
  Uniprot ID: Q9H254
  ENST ID: ENST00000392023
  CDS Start-End: 128-2164
ggagcctcagccttcgccgccgctgccgctgccgtcgcagttgaggggcgagcacccgcccgcccgctgcagggacgccccgccaacgccactgccgcttcagctggatggctggatccatgagaagatgctgatggcgcgggatggcacgcgggaggacaaccacaagctgcataagagatggctccggcaccaggcattcatggccgagctggctcagaataaggagtggctggagaagatcgagcgggagggccagcaactgatgcaggagaagcccgaactggcggcctccgtgcggaagaagctgggcgagatccgccagtgctgggcggagctggagagcaccacccaggccaaggcacggcagctctttgaggccagcaaagcagaccagctggtgcagagctttgctgagctggacaagaagctccttcacatggagagccagctgcaagacgtggaccctggaggagacctggccactgtcaacagtcagctcaagaagctgcagtccatggagtcgcaggtggaggagtggtaccgcgaggtgggagagctgcaggcgcagacggcggcgctgccgctggagccggcgagcaaggagctggtgggtgagcggcagaacgcggtgggcgagcgcctggtgcgcctgctcgagccgttgcaggagcgccgccgcttgctgctggcttccaaggagttgcaccaggtggcgcacgacctggacgacgagctggcatgggttcaggagcggctgccactggccatgcagacagagcgaggcaacggtttgcaggcggtccagcagcacatcaaaaagaaccagggcctgcggcgggagatccaggcgcatgggccgcgcctggaggaggtgctggagcgcgcgggcgcgctggcgtcgctgcgcagcccggaggcagaggcagtgcgccggggcctggagcagctgcagagcgcctgggccggactgcgggaggctgccgagcgacggcagcaggtgctggacgccgccttccaggtggagcagtactacttcgacgtggctgaggtggaggcgtggctgggcgagcaggagctgctcatgatgagtgaggacaagggcaaggacgaacagagcaccctgcagctgctcaagaaacacctgcagctggagcaaggcgtggagaactacgaggaaagcatcgcgcagctgtcgcgccagtgccgggcgctgctggagatggggcacccggacagcgagcagatcagccggcggcagtctcaggtggaccgcctgtacgtggcgctcaaggagctgggtgaggagcgccgggtggctctggaacagcagtactggctgtaccagctcagccgccaggtgagcgagcttgagcactggattgccgagaaggaggtggtggctggctcacccgagctcggccaggactttgagcatgtctcggtgctgcaggagaaattctcagagtttgccagcgagacaggtatggcagggcgggaacggctggcagctgtgaaccagatggtggatgagctgatcgagtgtggccatacagcagcggccaccatggccgagtggaaggacggactgaacgaggcctgggctgagctgctggagctcatgggcacacgggcccagctgctggccgcctctcgggagcttcataagttcttcagtgacgcccgagagcttcagggacagattgaggagaagcggaggcggctgccccgcctgaccaccccgcctgagccgagacccagtgccagttccatgcagcggaccctgagagcctttgagcatgacctgcagctcctcgtgtcccaggtacggcagctgcaggagggggcggcccagctgcggacggtgtatgcgggtgaacatgccgaggccatcgctagccgggagcaggaggtgctgcagggttggaaagagctgctgtcagcctgtgaggatgcccgcctgcatgtcagctccacagccgacgccctgcgcttccacagccaagtccgcgacctgctctcctggatggatggcatcgccagccagattggggcagccgacaagcccaggtgcccctcatccctcctcgggcttcctgcctccccctggtggcctaccccagccacccccagcccattgacagcccccttctcaatggaatgacaacagccaatatctgtgtggcgcctctgtgtgctaggcactgttctaggtgcttcgtgtgtattcagaccccttttttaggcctgtcattggggacttcggtcatggggcatccttctgtccgctgtccttcccagttgcctattattaccctctccatgggatgtcacagcatgaaacaggctaaagacaggatgggcaagggaggtgtgggactgtatttgtgagggtgggtgaagaattctaacaattcca

SEQ ID NO: 185378 - DNA, 8671 bp, Homo sapiens
  Payload ID: 16503
  Gene Symbol: SPTBN4
  Gene Name: spectrin, beta, non-erythrocytic 4
  ENST ID: ENST00000392025
  CDS Start-End: 87-7781
tatgaccctgtgtgactcagtgacccggagggcaagcaggactgtgggtgacaccttgtgtcatcctctgagcctcaccttccccgatggcgcaggtaccaggggaagtggacaacatggagggcctgcctgctcctaacaacaaccctgctgcccgctgggagagtccggatcggggctgggagcgggagcagccggctgcgtccaccgcagcggcctcgctctttgagtgctcccggatcaaggccttggcagatgagcgggaagccgtgcagaagaaaaccttcaccaagtgggtgaactcgcacctcgcccgcgtgggctgccacatcggggacctctatgtggacctccgggacggcttcgtgctcacgcggctcctggaagtgctgtctggggagcagctgcccaggcccacgcgcggccgcatgcggatccactcactggagaacgtggacaaggcgctgcagtttctgaaggagcagcgcgtgcacctggagaacgtgggttcgcatgacatcgtggatgggaatcaccggctgacgctggggctggtctggaccatcatcctgcgcttccagattcaagtcatcaaaattgagactgaggacaacagagagacacgctcagccaaggatgctctgctcttgtggtgtcagatgaagacagctggttaccctgaggtaaacatccagaatttcaccaccagctggcgggatggcttggccttcaatgccctcattcaccggcacaggcctgatctcgtggacttcagcaaactcaccaagtccaatgccaactacaacctgcagagagccttccgcacagctgagcagcacctggggctggcgcggctgctggatcctgaagatgtgaacatggaggctccagatgagaagtccatcatcacctacgtggtctctttctaccactatttctccaagatgaaggctctggctgtggaggggaagcgtatcgggaaggtcttggaccaggtattggaggtggggaagatcatagaacgctacgaggagctggcggctgagctgctggcctggatccaccgcaccgtgggcctcatcagcaatcagaaatttgccaactccttaagtggggtgcagcagcaactccaggctttcacggcctattgcacgctggagaagcctgtcaagttccaggagaaggggaacctagaggtgctgctcttcagcatccagagcaaactgcgtgcctgcaaccgtcgcctctttgtgcctcgggagggctgtggcatctgggatattgacaaggcatggggtgagctggagaaggctgagcatgagcgggaggctgccctacgggctgagctgattcggcaggagaagctggaactactggcacagaggtttgaccacaaggtggctatgagggagagctggctgaatgagaaccagcgtctggtctcccaggacaactttgggtatgagctgcccgcagtggaggcagccatgaagaaacacgaagcgatcgaggcagacattgcggcctacgaggagcgggtgcagggtgtggcggagctggcccaggcattggcagccgaaggctactacgatatccggcgggtggcagcccagcgtgacagcgtcctgcgccagtgggccctgctaactgggcttgtgggtgcccggcggacacgacttgagcagaaccttgccctgcagaaggtcttccaggagatggtgtacatggtggactggatggaggagatgcaggctcagctgctgtcccgggagtgtgggcagcacctggtggaggcagacgacctgttgcagaagcatggactgctggagggagacattgccgcccagagcgagcgggtggaggctctcaatgccgctgccctgcgcttctcccagctgcagggctaccagccctgcgacccgcaggtcatctgcaaccgcgtgaaccacgtgcacggctgcctggcggagctgcaggagcaggcagcgcggcgacgcgcggagctggaggcttcgcggagcctgtgggcgctgctgcaggagctggaggaggccgagagctgggcgcgcgacaaggagcgtctcctggaggctgcgggcggcggcggtgcggcgggcgcagcgggcgcagcgggaacagcgggcggcgcgcatgacctgtccagcacagcgcgcctcctggcccagcacaagatcctgcagggcgagctgggcgggcggcgagcgttgctgcagcaggccctgcggtgtggcgaggagctggttgcggccggcggtgccgtcggcccgggagcagacaccgtgcacctggtaggcctggcggagcgcgcggcgagcgcccggcgccgctggcagaggctggaagaggcggcggcgcggcgagagcggcggctgcaggaggcgcgggcgctgcaccagttcggcgctgacctcgacgggctgctggactggcttcgcgacgcttaccgcctggcagccgccggtgacttcggccacgacgaagcttccagccgccgcctggcgcgccagcaccgcgcgctcaccggggaggtggaggcacatcgcgggcccgtgagcggcctgcggcgccagctggcgacactcgggggtgccagtggcgcagggccactggtggtggcgctgcaggtgcgcgtggtggaagcagagcagttgttcgctgaggtgaccgaagtggcggcgctgaggcgccagtggctgcgggacgcgctcgctgtctaccgcatgtttggcgaggtgcacgcgtgtgagctgtggatcggcgagaaggagcaatggctgctctccatgcgtgtgccggattcactcgacgacgtcgaggtggtgcagcaccgattcgagagcctggaccaagagatgaacagcctgatgggccgcgttctggacgtgaaccacacagtccaggagctggtggaaggaggccaccccagttcagatgaggtgcgttcctgccaggaccacctcaacagcaggtggaaccgcatcgtggagctagtggaacagcgcaaagaggaaatgagcgcggtgctgctggtggagaaccacgtgctggaggtggccgaggtgcgcgcccaggtgcgtgagaagcggagagctgtggagagcgcgccccgggccggcggcgccctgcagtggcgtcttagcggcctagaggccgctctgcaggcgctggagccgcgccaggcggcccttctggaggaggcagccctgctggctgagcgcttcccggcgcaggcggcgcggctgcaccagggcgcggaggagctgggcgccgagtggggcgcgctagctagcgcggctcaggcctgcggcgaggcggtggcggcagcagggcgcctgcagcgcttcctacatgacctcgacgctttcctggactggctcgtgcgcgcccaggaggcggcgggcggcagcgaggggcccctgcccaacagcctagaagaggcggacgcgctgctggcgcgccacgctgcgctcaaggaggaggtggaccagcgcgaggaagactatgctcgcatcgtggcggccagcgaggcgctgctggccgccgacggcgcagagctgggcccgggcctggcactagacgagtggctgccacacctcgaacttggctggcataaactgctcggcttgtgggaggcgcgcagggaggcgctggtccaggcgcacatctaccagctcttcctgcgggatctacgccaggcgctcgtggtgctgcgtaaccaggagatggcgctgtctggtgcggagctcccgggcacagtggaatcggtggaggaggccttgaaacagcaccgtgactttctcaccaccatggagctgagccagcaaaagatgcaggtggccgtgcaggctgcagagggcctgctgaggcagggcaacatctacggggagcaggctcaggaggctgtgacccggctgctggagaagaaccaagaaaaccagttacgggcccagcaatggatgcaaaagctacatgaccaacttgagctgcagcacttcctccgagactgccacgagctggatggctggatccatgagaagatgctgatggcgcgggatggcacgcgggaggacaaccacaagctgcataagagatggctccggcaccaggcattcatggccgagctggctcagaataaggagtggctggagaagatcgagcgggagggccagcaactgatgcaggagaagcccgaactggcggcctccgtgcggaagaagctgggcgagatccgccagtgctgggcggagctggagagcaccacccaggccaaggcacggcagctctttgaggccagcaaagcagaccagctggtgcagagctttgctgagctggacaagaagctccttcacatggagagccagctgcaagacgtggaccctggaggagacctggccactgtcaacagtcagctcaagaagctgcagtccatggagtcgcaggtggaggagtggtaccgcgaggtgggagagctgcaggcgcagacggcggcgctgccgctggagccggcgagcaaggagctggtgggtgagcggcagaacgcggtgggcgagcgcctggtgcgcctgctcgagccgttgcaggagcgccgccgcttgctgctggcttccaaggagttgcaccaggtggcgcacgactggacgacgagctgggcatgggttcaggagcggctgccactggccatgcagacagagcgaggcaacggtttgcaggcggtccagcagcacatcaaaaagaaccagggcctgcggcgggagatccaggcgcatgggccgcgcctggaggaggtgctggagcgcgcgggcgcgctggcgtcgctgcgcagcccggaggcagaggcagtgcgccggggcctggagcagctgcagagcgcctgggccggactgcgggaggctgccgagcgacggcagcaggtgctggacgccgccttccaggtggagcagtactacttcgacgtggctgaggtggaggcgtggctgggcgagcaggagctgctcatgatgagtgaggacaagggcaaggacgaacagagcaccctgcagctgctcaagaaacacctgcagctggagcaaggcgtggagaactacgaggaaagcatcgcgcagctgtcgcgccagtgccgggcgctgctggagatggggcacccggacagcgagcagatcagccggcggcagtctcaggtggaccgcctgtacgtggcgctcaaggagctgggtgaggagcgccgggtggctctggaacagcagtactggctgtaccagctcagccgccaggtgagcgagcttgagcactggattgccgagaaggaggtggtggctggctcacccgagctcggccaggactttgagcatgtctcggtgctgcaggagaaattctcagagtttgccagcgagacaggtatggcagggcgggaacggctggcagctgtgaaccagatggtggatgagctgatcgagtgtggccatacagcagcggccaccatggccgagtggaaggacggactgaacgaggcctgggctgagctgctggagctcatgggcacacgggcccagctgctggccgcctctcgggagcttcataagttcttcagtgacgcccgagagcttcagggacagattgaggagaagcggaggcggctgccccgcctgaccaccccgcctgagccgagacccagtgccagttccatgcagcggaccctgagagcctttgagcatgacctgcagctcctcgtgtcccaggtacggcagctgcaggagggggcggcccagctgcggacggtgtatgcgggtgaacatgccgaggccatcgctagccgggagcaggaggtgctgcagggttggaaagagctgctgtcagcctgtgaggatgcccgcctgcatgtcagctccacagccgacgccctgcgcttccacagccaagtccgcgacctgctctcctggatggatggcatcgccagccagattggggcagccgacaagcccagggacgtgtcatcagtggaggtgctcatgaactaccaccagggcctgaagactgagctggaggcgcgggtgcctgagctgaccacctgccaggagctggggcgatctctgctgctcaacaaaagtgccatggctgatgagatccaggcacagctggacaagctgggaaccaggaaggaggaggtgtcggaaaagtgggaccgccattgggagtggctgcagcagatgctggaggtgcaccagtttgcccaggaggcggtggtggctgatgcctggctgacagcccaggagccgctcctgcagagccgggagctgggcagcagcgtggatgaggtggagcagcttatccggcgacatgaggccttccgcaaagcggctgcagcctgggaagagaggttcagctctctgcggcgcctgaccacgatcgagaaaatcaaagcggaacagagcaagcagccgcctaccccactgctggggcgcaagttctttggggaccccacggaactggcggccaaggcggcgcccctgctgcggccagggggctatgaaaggggcttggagcccctggcccgccgagcctcggacacgctctcggccgaggtgcggactcgggtggggtatgtgcgccaggagctcaagcccgagcgcctccagccgcgcattgaccggctgccggagatcccggggagggtggagcccgcggccctgccggccgcaccagaggacgcggcggagacccccgcgacccccgcggcggcggagcaggtgcggccacgaccggagcgccaggagtcagctgatcgcgcggaggagctgcccaggaggcggcggcctgagcggcaagagtcagtcgatcaatccgaggaggctgcgcggaggcggcggccggagcggcaggagtcagcggagcacgaggcggcacacagccttaccctgggccgctatgagcagatggagcggcggcgcgagcggcgtgagcggcgcttggagcggcaggagtccagcgaacaggagatgcccatcagaggagacctggtcaaggggaaggccaccctggctgacattgtggaacagctgcaggagaaagaggcaggcccagggctgcctgctgggccgtcgctgcctcagccacgcgagcttcccccaggtcgcctgcccaacgggcttgagctgcccgagcggacacctcggccggaccggccccgggcgcgggaccggcccaagccgcgacggcggccgcggcccagagagggtggtgagggcgggggaagccggcgctcgcgctccgccccggcccagggcggctccgcccccgcgcctccgccaccgcccactcacacagtgcagcacgagggcttcctactgcgcaagcgcgagctcgacgctaaccgcaagtcgtccaaccggtcgtgggtgagcctgtactgtgtgcttagtaagggggaactgggcttctacaaggactccaagggcccggcatccgggagcacacacggtggggaaccgctgctcagcctgcacaaggccaccagcgaggtggctagtgactacaagaaaaagaagcatgtcttcaagctccagacccaggatggcagtgagtttttgctccaggcaaaagatgaggaggagatgaacggctggctggaggctgtagcttcctcggtggcggaacacgcagagatcgcccgctggggccagacactacccactacttcatccacagatgagggcaaccctaagagggaaggcggagatcgcagggccagcgggcgcaggaagtgacttcccacccccaggacctgacacatctcgtctcccctcttttccgcactgtgggcacaaagacactttttcttccgcaggggcgggagcccctagttccaacactgaggacgcgtgacatggtgggcaccggaaaggaggggacttctcctgcaccccaagaagtggtggggagattgctgcccctatagccatatctcggccccttcccactcaccacccccaccccaggtgctgggggtcccttatttttatgcaataactgagcttgatgggggtgggcagggggccagttgagccaagcccccagccccgatctgcagatcctgccccaagaagctggggtggtgggggcagtaattcctgcccccctctctgccctagggatgggcacgggggcgctggtgaggtcccctggaccatccagggtgctagggggcagggaggggacaccccctccccgcctttacctcacttccaatgctgccttgatctctgtctgggaggggggagtgaaggggccctagccccctgcactccgccgcctcagagccatgcggttaattcctgacttagtttatttttgcaaaacgtcgatctcctcctcccccgccccgcatccgcgaaggcttttaatgggaggggcgtcaaagctcaaaactgttttcctctctcctcccccctccagttgtaaatgccacttcatgaggggaggggcgaggggaagcccacccctgcatgcttctggctggagcacctccctggggagtcgggggattgggttgtgggcagtccccatggccgcctggagaagccgctggggcccgggggtgtggggcggtgtggcgggcgcacactgtatgtacctataataaaccctttggctttga

SEQ ID NO: 185379 - DNA, 8070 bp, Homo sapiens
  Payload ID: 16503
  Gene Symbol: SPTBN4
  Gene Name: spectrin, beta, non-erythrocytic 4
  Uniprot ID: Q9H254
  ENST ID: ENST00000598249
  CDS Start-End: 103-7797
ggccgggccgggcagcggacgccgacagggagggcggtcggtcgcggcgagcagcggagacagcgacgctggcggccgcgggcccaggcctcaccttccccgatggcgcaggtaccaggggaagtggacaacatggagggcctgcctgctcctaacaacaaccctgctgcccgctgggagagtccggatcggggctgggagcgggagcagccggctgcgtccaccgcagcggcctcgctctttgagtgctcccggatcaaggccttggcagatgagcgggaagccgtgcagaagaaaaccttcaccaagtgggtgaactcgcacctcgcccgcgtgggctgccacatcggggacctctatgtggacctccgggacggcttcgtgctcacgcggctcctggaagtgctgtctggggagcagctgcccaggcccacgcgcggccgcatgcggatccactcactggagaacgtggacaaggcgctgcagtttctgaaggagcagcgcgtgcacctggagaacgtgggttcgcatgacatcgtggatgggaatcaccggctgacgctggggctggtctggaccatcatcctgcgcttccagattcaagtcatcaaaattgagactgaggacaacagagagacacgctcagccaaggatgctctgctcttgtggtgtcagatgaagacagctggttaccctgaggtaaacatccagaatttcaccaccagctggcgggatggcttggccttcaatgccctcattcaccggcacaggcctgatctcgtggacttcagcaaactcaccaagtccaatgccaactacaacctgcagagagccttccgcacagctgagcagcacctggggctggcgcggctgctggatcctgaagatgtgaacatggaggctccagatgagaagtccatcatcacctacgtggtctctttctaccactatttctccaagatgaaggctctggctgtggaggggaagcgtatcgggaaggtcttggaccaggtattggaggtggggaagatcatagaacgctacgaggagctggcggctgagctgctggcctggatccaccgcaccgtgggcctcatcagcaatcagaaatttgccaactccttaagtggggtgcagcagcaactccaggctttcacggcctattgcacgctggagaagcctgtcaagttccaggagaaggggaacctagaggtgctgctcttcagcatccagagcaaactgcgtgcctgcaaccgtcgcctctttgtgcctcgggagggctgtggcatctgggatattgacaaggcatggggtgagctggagaaggctgagcatgagcgggaggctgccctacgggctgagctgattcggcaggagaagctggaactactggcacagaggtttgaccacaaggtggctatgagggagagctggctgaatgagaaccagcgtctggtctcccaggacaactttgggtatgagctgcccgcagtggaggcagccatgaagaaacacgaagcgatcgaggcagacattgcggcctacgaggagcgggtgcagggtgtggcggagctggcccaggcattggcagccgaaggctactacgatatccggcgggtggcagcccagcgtgacagcgtcctgcgccagtgggccctgctaactgggcttgtgggtgcccggcggacacgacttgagcagaaccttgccctgcagaaggtcttccaggagatggtgtacatggtggactggatggaggagatgcaggctcagctgctgtcccgggagtgtgggcagcacctggtggaggcagacgacctgttgcagaagcatggactgctggagggagacattgccgcccagagcgagcgggtggaggctctcaatgccgctgccctgcgcttctcccagctgcagggctaccagccctgcgacccgcaggtcatctgcaaccgcgtgaaccacgtgcacggctgcctggcggagctgcaggagcaggcagcgcggcgacgcgcggagctggaggcttcgcggagcctgtgggcgctgctgcaggagctggaggaggccgagagctgggcgcgcgacaaggagcgtctcctggaggctgcgggcggcggcggtgcggcgggcgcagcgggcgcagcgggaacagcgggcggcgcgcatgacctgtccagcacagcgcgcctcctggcccagcacaagatcctgcagggcgagctgggcgggcggcgagcgttgctgcagcaggccctgcggtgtggcgaggagctggttgcggccggcggtgccgtcggcccgggagcagacaccgtgcacctggtaggcctggcggagcgcgcggcgagcgcccggcgccgctggcagaggctggaagaggcggcggcgcggcgagagcggcggctgcaggaggcgcgggcgctgcaccagttcggcgctgacctcgacgggctgctggactggcttcgcgacgcttaccgcctggcagccgccggtgacttcggccacgacgaagcttccagccgccgcctggcgcgccagcaccgcgcgctcaccggggaggtggaggcacatcgcgggcccgtgagcggcctgcggcgccagctggcgacactcgggggtgccagtggcgcagggccactggtggtggcgctgcaggtgcgcgtggtggaagcagagcagttgttcgctgaggtgaccgaagtggcggcgctgaggcgccagtggctgcgggacgcgctcgctgtctaccgcatgtttggcgaggtgcacgcgtgtgagctgtggatcggcgagaaggagcaatggctgctctccatgcgtgtgccggattcactcgacgacgtcgaggtggtgcagcaccgattcgagagcctggaccaagagatgaacagcctgatgggccgcgttctggacgtgaaccacacagtccaggagctggtggaaggaggccaccccagttcagatgaggtgcgttcctgccaggaccacctcaacagcaggtggaaccgcatcgtggagctagtggaacagcgcaaagaggaaatgagcgcggtgctgctggtggagaaccacgtgctggaggtggccgaggtgcgcgcccaggtgcgtgagaagcggagagctgtggagagcgcgccccgggccggcggcgccctgcagtggcgtcttagcggcctagaggccgctctgcaggcgctggagccgcgccaggcggcccttctggaggaggcagccctgctggctgagcgcttcccggcgcaggcggcgcggctgcaccagggcgcggaggagctgggcgccgagtggggcgcgctagctagcgcggctcaggcctgcggcgaggcggtggcggcagcagggcgcctgcagcgcttcctacatgacctcgacgctttcctggactggctcgtgcgcgcccaggaggcggcgggcggcagcgaggggcccctgcccaacagcctagaagaggcggacgcgctgctggcgcgccacgctgcgctcaaggaggaggtggaccagcgcgaggaagactatgctcgcatcgtggcggccagcgaggcgctgctggccgccgacggcgcagagctgggcccgggcctggcactagacgagtggctgccacacctcgaacttggctggcataaactgctcggcttgtgggaggcgcgcagggaggcgctggtccaggcgcacatctaccagctcttcctgcgggatctacgccaggcgctcgtggtgctgcgtaaccaggagatggcgctgtctggtgcggagctcccgggcacagtggaatcggtggaggaggccttgaaacagcaccgtgactttctcaccaccatggagctgagccagcaaaagatgcaggtggccgtgcaggctgcagagggcctgctgaggcagggcaacatctacggggagcaggctcaggaggctgtgacccggctgctggagaagaaccaagaaaaccagttacgggcccagcaatggatgcaaaagctacatgaccaacttgagctgcagcacttcctccgagactgccacgagctggatggctggatccatgagaagatgctgatggcgcgggatggcacgcgggaggacaaccacaagctgcataagagatggctccggcaccaggcattcatggccgagctggctcagaataaggagtggctggagaagatcgagcgggagggccagcaactgatgcaggagaagcccgaactggcggcctccgtgcggaagaagctgggcgagatccgccagtgctgggcggagctggagagcaccacccaggccaaggcacggcagctctttgaggccagcaaagcagaccagctggtgcagagctttgctgagctggacaagaagctccttcacatggagagccagctgcaagacgtggaccctggaggagacctggccactgtcaacagtcagctcaagaagctgcagtccatggagtcgcaggtggaggagtggtaccgcgaggtgggagagctgcaggcgcagacggcggcgctgccgctggagccggcgagcaaggagctggtgggtgagcggcagaacgcggtgggcgagcgcctggtgcgcctgctcgagccgttgcaggagcgccgccgcttgctgctggcttccaaggagttgcaccaggtggcgcacgacctggacgacgagctggcatgggttcaggagcggctgccactggccatgcagacagagcgaggcaacggtttgcaggcggtccagcagcacatcaaaaagaaccagggcctgcggcgggagatccaggcgcatgggccgcgcctggaggaggtgctggagcgcgcgggcgcgctggcgtcgctgcgcagcccggaggcagaggcagtgcgccggggcctggagcagctgcagagcgcctgggccggactgcgggaggctgccgagcgacggcagcaggtgctggacgccgccttccaggtggagcagtactacttcgacgtggctgaggtggaggcgtggctgggcgagcaggagctgctcatgatgagtgaggacaagggcaaggacgaacagagcaccctgcagctgctcaagaaacacctgcagctggagcaaggcgtggagaactacgaggaaagcatcgcgcagctgtcgcgccagtgccgggcgctgctggagatggggcacccggacagcgagcagatcagccggcggcagtctcaggtggaccgcctgtacgtggcgctcaaggagctgggtgaggagcgccgggtggctctggaacagcagtactggctgtaccagctcagccgccaggtgagcgagcttgagcactggattgccgagaaggaggtggtggctggctcacccgagctcggccaggactttgagcatgtctcggtgctgcaggagaaattctcagagtttgccagcgagacaggtatggcagggcgggaacggctggcagctgtgaaccagatggtggatgagctgatcgagtgtggccatacagcagcggccaccatggccgagtggaaggacggactgaacgaggcctgggctgagctgctggagctcatgggcacacgggcccagctgctggccgcctctcgggagcttcataagttcttcagtgacgcccgagagcttcagggacagattgaggagaagcggaggcggctgccccgcctgaccaccccgcctgagccgagacccagtgccagttccatgcagcggaccctgagagcctttgagcatgacctgcagctcctcgtgtcccaggtacggcagctgcaggagggggcggcccagctgcggacggtgtatgcgggtgaacatgccgaggccatcgctagccgggagcaggaggtgctgcagggttggaaagagctgctgtcagcctgtgaggatgcccgcctgcatgtcagctccacagccgacgccctgcgcttccacagccaagtccgcgacctgctctcctggatggatggcatcgccagccagattggggcagccgacaagcccagggacgtgtcatcagtggaggtgctcatgaactaccaccagggcctgaagactgagctggaggcgcgggtgcctgagctgaccacctgccaggagctggggcgatctctgctgctcaacaaaagtgccatggctgatgagatccaggcacagctggacaagctgggaaccaggaaggaggaggtgtcggaaaagtgggaccgccattgggagtggctgcagcagatgctggaggtgcaccagtttgcccaggaggcggtggtggctgatgcctggctgacagcccaggagccgctcctgcagagccgggagctgggcagcagcgtggatgaggtggagcagcttatccggcgacatgaggccttccgcaaagcggctgcagcctgggaagagaggttcagctctctgcggcgcctgaccacgatcgagaaaatcaaagcggaacagagcaagcagccgcctaccccactgctggggcgcaagttctttggggaccccacggaactggcggccaaggcggcgcccctgctgcggccagggggctatgaaaggggcttggagcccctggcccgccgagcctcggacacgctctcggccgaggtgcggactcgggtggggtatgtgcgccaggagctcaagcccgagcgcctccagccgcgcattgaccggctgccggagatcccggggagggtggagcccgcggccctgccggccgcaccagaggacgcggcggagacccccgcgacccccgcggcggcggagcaggtgcggccacgaccggagcgccaggagtcagctgatcgcgcggaggagctgcccaggaggcggcggcctgagcggcaagagtcagtcgatcaatccgaggaggctgcgcggaggcggcggccggagcggcaggagtcagcggagcacgaggcggcacacagccttaccctgggccgctatgagcagatggagcggcggcgcgagcggcgtgagcggcgcttggagcggcaggagtccagcgaacaggagatgcccatcagaggagacctggtcaaggggaaggccaccctggctgacattgtggaacagctgcaggagaaagaggcaggcccagggctgcctgctgggccgtcgctgcctcagccacgcgagcttcccccaggtcgcctgcccaacgggcttgagctgcccgagcggacacctcggccggaccggccccgggcgcgggaccggcccaagccgcgacggcggccgcggcccagagagggtggtgagggcgggggaagccggcgctcgcgctccgccccggcccagggcggctccgcccccgcgcctccgccaccgcccactcacacagtgcagcacgagggcttcctactgcgcaagcgcgagctcgacgctaaccgcaagtcgtccaaccggtcgtgggtgagcctgtactgtgtgcttagtaagggggaactgggcttctacaaggactccaagggcccggcatccgggagcacacacggtggggaaccgctgctcagcctgcacaaggccaccagcgaggtggctagtgactacaagaaaaagaagcatgtcttcaagctccagacccaggatggcagtgagtttttgctccaggcaaaagatgaggaggagatgaacggctggctggaggctgtagcttcctcggtggcggaacacgcagagatcgcccgctggggccagacactacccactacttcatccacagatgagggcaaccctaagagggaaggcggagatcgcagggccagcgggcgcaggaagtgacttcccacccccaggacctgacacatctcgtctcccctcttttccgcactgtgggcacaaagacactttttcttccgcaggggcgggagcccctagttccaacactgaggacgcgtgacatggtgggcaccggaaaggaggggacttctcctgcaccccaagaagtggtggggagattgctgcccctatagccatatctcggccccttcccactcaccacccccaccccaggtgctgggggtcccttatttttatgcaataactgagcttgat

SEQ ID NO: 185380 - DNA, 6105 bp, Homo sapiens
  Payload ID: 16503
  Gene Symbol: SPTBN4
  Gene Name: spectrin, beta, non-erythrocytic 4
  ENST ID: ENST00000595535
  CDS Start-End: 87-6095
tatgaccctgtgtgactcagtgacccggagggcaagcaggactgtgggtgacaccttgtgtcatcctctgagcctcaccttccccgatggcgcaggtaccaggggaagtggacaacatggagggcctgcctgctcctaacaacaaccctgctgcccgctgggagagtccggatcggggctgggagcgggagcagccggctgcgtccaccgcagcggcctcgctctttgagtgctcccggatcaaggccttggcagatgagcgggaagccgtgcagaagaaaaccttcaccaagtgggtgaactcgcacctcgcccgcgtgggctgccacatcggggacctctatgtggacctccgggacggcttcgtgctcacgcggctcctggaagtgctgtctggggagcagctgcccaggcccacgcgcggccgcatgcggatccactcactggagaacgtggacaaggcgctgcagtttctgaaggagcagcgcgtgcacctggagaacgtgggttcgcatgacatcgtggatgggaatcaccggctgacgctggggctggtctggaccatcatcctgcgcttccagattcaagtcatcaaaattgagactgaggacaacagagagacacgctcagccaaggatgctctgctcttgtggtgtcagatgaagacagctggttaccctgaggtaaacatccagaatttcaccaccagctggcgggatggcttggccttcaatgccctcattcaccggcacaggcctgatctcgtggacttcagcaaactcaccaagtccaatgccaactacaacctgcagagagccttccgcacagctgagcagcacctggggctggcgcggctgctggatcctgaagatgtgaacatggaggctccagatgagaagtccatcatcacctacgtggtctctttctaccactatttctccaagatgaaggctctggctgtggaggggaagcgtatcgggaaggtcttggaccaggtattggaggtggggaagatcatagaacgctacgaggagctggcggctgagctgctggcctggatccaccgcaccgtgggcctcatcagcaatcagaaatttgccaactccttaagtggggtgcagcagcaactccaggctttcacggcctattgcacgctggagaagcctgtcaagttccaggagaaggggaacctagaggtgctgctcttcagcatccagagcaaactgcgtgcctgcaaccgtcgcctctttgtgcctcgggagggctgtggcatctgggatattgacaaggcatggggtgagctggagaaggctgagcatgagcgggaggctgccctacgggctgagctgattcggcaggagaagctggaactactggcacagaggtttgaccacaaggtggctatgagggagagctggctgaatgagaaccagcgtctggtctcccaggacaactttgggtatgagctgcccgcagtggaggcagccatgaagaaacacgaagcgatcgaggcagacattgcggcctacgaggagcgggtgcagggtgtggcggagctggcccaggcattggcagccgaaggctactacgatatccggcgggtggcagcccagcgtgacagcgtcctgcgccagtgggccctgctaactgggcttgtgggtgcccggcggacacgacttgagcagaaccttgccctgcagaaggtcttccaggagatggtgtacatggtggactggatggaggagatgcaggctcagctgctgtcccgggagtgtgggcagcacctggtggaggcagacgacctgttgcagaagcatggactgctggagggagacattgccgcccagagcgagcgggtggaggctctcaatgccgctgccctgcgcttctcccagctgcagggctaccagccctgcgacccgcaggtcatctgcaaccgcgtgaaccacgtgcacggctgcctggcggagctgcaggagcaggcagcgcggcgacgcgcggagctggaggcttcgcggagcctgtgggcgctgctgcaggagctggaggaggccgagagctgggcgcgcgacaaggagcgtctcctggaggctgcgggcggcggcggtgcggcgggcgcagcgggcgcagcgggaacagcgggcggcgcgcatgacctgtccagcacagcgcgcctcctggcccagcacaagatcctgcagggcgagctgggcgggcggcgagcgttgctgcagcaggccctgcggtgtggcgaggagctggttgcggccggcggtgccgtcggcccgggagcagacaccgtgcacctggtaggcctggcggagcgcgcggcgagcgcccggcgccgctggcagaggctggaagaggcggcggcgcggcgagagcggcggctgcaggaggcgcgggcgctgcaccagttcggcgctgacctcgacgggctgctggactggcttcgcgacgcttaccgcctggcagccgccggtgacttcggccacgacgaagcttccagccgccgcctggcgcgccagcaccgcgcgctcaccggggaggtggaggcacatcgcgggcccgtgagcggcctgcggcgccagctggcgacactcgggggtgccagtggcgcagggccactggtggtggcgctgcaggtgcgcgtggtggaagcagagcagttgttcgctgaggtgaccgaagtggcggcgctgaggcgccagtggctgcgggacgcgctcgctgtctaccgcatgtttggcgaggtgcacgcgtgtgagctgtggatcggcgagaaggagcaatggctgctctccatgcgtgtgccggattcactcgacgacgtcgaggtggtgcagcaccgattcgagagcctggaccaagagatgaacagcctgatgggccgcgttctggacgtgaaccacacagtccaggagctggtggaaggaggccaccccagttcagatgaggtgcgttcctgccaggaccacctcaacagcaggtggaaccgcatcgtggagctagtggaacagcgcaaagaggaaatgagcgcggtgctgctggtggagaaccacgtgctggaggtggccgaggtgcgcgcccaggtgcgtgagaagcggagagctgtggagagcgcgccccgggccggcggcgccctgcagtggcgtcttagcggcctagaggccgctctgcaggcgctggagccgcgccaggcggcccttctggaggaggcagccctgctggctgagcgcttcccggcgcaggcggcgcggctgcaccagggcgcggaggagctgggcgccgagtggggcgcgctagctagcgcggctcaggcctgcggcgaggcggtggcggcagcagggcgcctgcagcgcttcctacatgacctcgacgctttcctggactggctcgtgcgcgcccaggaggcggcgggcggcagcgaggggcccctgcccaacagcctagaagaggcggacgcgctgctggcgcgccacgctgcgctcaaggaggaggtggaccagcgcgaggaagactatgctcgcatcgtggcggccagcgaggcgctgctggccgccgacggcgcagagctgggcccgggcctggcactagacgagtggctgccacacctcgaacttggctggcataaactgctcggcttgtgggaggcgcgcagggaggcgctggtccaggcgcacatctaccagctcttcctgcgggatctacgccaggcgctcgtggtgctgcgtaaccaggagatggcgctgtctggtgcggagctcccgggcacagtggaatcggtggaggaggccttgaaacagcaccgtgactttctcaccaccatggagctgagccagcaaaagatgcaggtggccgtgcaggctgcagagggcctgctgaggcagggcaacatctacggggagcaggctcaggaggctgtgacccggctgctggagaagaaccaagaaaaccagttacgggcccagcaatggatgcaaaagctacatgaccaacttgagctgcagcacttcctccgagactgccacgagctggatggctggatccatgagaagatgctgatggcgcgggatggcacgcgggaggacaaccacaagctgcataagagatggctccggcaccaggcattcatggccgagctggctcagaataaggagtggctggagaagatcgagcgggagggccagcaactgatgcaggagaagcccgaactggcggcctccgtgcggaagaagctgggcgagatccgccagtgctgggcggagctggagagcaccacccaggccaaggcacggcagctctttgaggccagcaaagcagaccagctggtgcagagctttgctgagctggacaagaagctccttcacatggagagccagctgcaagacgtggaccctggaggagacctggccactgtcaacagtcagctcaagaagctgcagtccatggagtcgcaggtggaggagtggtaccgcgaggtgggagagctgcaggcgcagacggcggcgctgccgctggagccggcgagcaaggagctggtgggtgagcggcagaacgcggtgggcgagcgcctggtgcgcctgctcgagccgttgcaggagcgccgccgcttgctgctggcttccaaggagttgcaccaggtggcgcacgacctggacgacgagctggcatgggttcaggagcggctgccactggccatgcagacagagcgaggcaacggtttgcaggcggtccagcagcacatcaaaaagaaccagggcctgcggcgggagatccaggcgcatgggccgcgcctggaggaggtgctggagcgcgcgggcgcgctggcgtcgctgcgcagcccggaggcagaggcagtgcgccggggcctggagcagctgcagagcgcctgggccggactgcgggaggctgccgagcgacggcagcaggtgctggacgccgccttccaggtggagcagtactacttcgacgtggctgaggtggaggcgtggctgggcgagcaggagctgctcatgatgagtgaggacaagggcaaggacgaacagagcaccctgcagctgctcaagaaacacctgcagctggagcaaggcgtggagaactacgaggaaagcatcgcgcagctgtcgcgccagtgccgggcgctgctggagatggggcacccggacagcgagcagatcagccggcggcagtctcaggtggaccgcctgtacgtggcgctcaaggagctgggtgaggagcgccgggtggctctggaacagcagtactggctgtaccagctcagccgccaggtgagcgagcttgagcactggattgccgagaaggaggtggtggctggctcacccgagctcggccaggactttgagcatgtctcggtgctgcaggagaaattctcagagtttgccagcgagacaggtatggcagggcgggaacggctggcagctgtgaaccagatggtggatgagctgatcgagtgtggccatacagcagcggccaccatggccgagtggaaggacggactgaacgaggcctgggctgagctgctggagctcatgggcacacgggcccagctgctggccgcctctcgggagcttcataagttcttcagtgacgcccgagagcttcagggacagattgaggagaagcggaggcggctgccccgcctgaccaccccgcctgagccgagacccagtgccagttccatgcagcggaccctgagagcctttgagcatgacctgcagctcctcgtgtcccaggtacggcagctgcaggagggggcggcccagctgcggacggtgtatgcgggtgaacatgccgaggccatcgctagccgggagcaggaggtgctgcagggttggaaagagctgctgtcagcctgtgaggatgcccgcctgcatgtcagctccacagccgacgccctgcgcttccacagccaagtccgcgacctgctctcctggatggatggcatcgccagccagattggggcagccgacaagcccaggtgcccctcatccctcctcgggcttcctgcctccccctggtggcctaccccagccacccccagcccattgacagcccccttctcaatggaatgacaacagccaa

SEQ ID NO: 185381 - DNA, 5957 bp, Homo sapiens
  Payload ID: 16503
  Gene Symbol: SPTBN4
  Gene Name: spectrin, beta, non-erythrocytic 4
  ENST ID: ENST00000597389
  CDS Start-End: 1-2106
ccctgcgacccgcaggtcatctgcaaccgcgtgaaccacgtgcacggctgcctggcggagctgcaggagcaggcagcgcggcgacgcgcggagctggaggcttcgcggagcctgtgggcgctgctgcaggagctggaggaggccgagagctgggcgcgcgacaaggagcgtctcctggaggctgcgggcggcggcggtgcggcgggcgcagcgggcgcagcgggaacagcgggcggcgcgcatgacctgtccagcacagcgcgcctcctggcccagcacaagatcctgcagggcgagctgggcgggcggcgagcgttgctgcagcaggccctgcggtgtggcgaggagctggttgcggccggcggtgccgtcggcccgggagcagacaccgtgcacctggtaggcctggcggagcgcgcggcgagcgcccggcgccgctggcagaggctggaagaggcggcggcgcggcgagagcggcggctgcaggaggcgcgggcgctgcaccagttcggcgctgacctcgacgggctgctggactggcttcgcgacgcttaccgcctggcagccgccggtgacttcggccacgacgaagcttccagccgccgcctggcgcgccagcaccgcgcgctcaccggggaggtggaggcacatcgcgggcccgtgagcggcctgcggcgccagctggcgacactcgggggtgccagtggcgcagggccactggtggtggcgctgcaggtgcgcgtggtggaagcagagcagttgttcgctgaggtgaccgaagtggcggcgctgaggcgccagtggctgcgggacgcgctcgctgtctaccgcatgtttggcgaggtgcacgcgtgtgagctgtggatcggcgagaaggagcaatggctgctctccatgcgtgtgccggattcactcgacgacgtcgaggtggtgcagcaccgattcgagagcctggaccaagagatgaacagcctgatgggccgcgttctggacgtgaaccacacagtccaggagctggtggaaggaggccaccccagttcagatgaggtgcgttcctgccaggaccacctcaacagcaggtggaaccgcatcgtggagctagtggaacagcgcaaagaggaaatgagcgcggtgctgctggtggagaaccacgtgctggaggtggccgaggtgcgcgcccaggtgcgtgagaagcggagagctgtggagagcgcgccccgggccggcggcgccctgcagtggcgtcttagcggcctagaggccgctctgcaggcgctggagccgcgccaggcggcccttctggaggaggcagccctgctggctgagcgcttcccggcgcaggcggcgcggctgcaccagggcgcggaggagctgggcgccgagtggggcgcgctagctagcgcggctcaggcctgcggcgaggcggtggcggcagcagggcgcctgcagcgcttcctacatgacctcgacgctttcctggactggctcgtgcgcgcccaggaggcggcgggcggcagcgaggggcccctgcccaacagcctagaagaggcggacgcgctgctggcgcgccacgctgcgctcaaggaggaggtggaccagcgcgaggaagactatgctcgcatcgtggcggccagcgaggcgctgctggccgccgacggcgcagagctgggcccgggcctggcactagacgagtggctgccacacctcgaacttggctggcataaactgctcggcttgtgggaggcgcgcagggaggcgctggtccaggcgcacatctaccagctcttcctgcgggatctacgccaggcgctcgtggtgctgcgtaaccaggagatggcgctgtctggtgcggagctcccgggcacagtggaatcggtggaggaggccttgaaacagcaccgtgactttctcaccaccatggagctgagccagcaaaagatgcaggtggccgtgcaggctgcagagggcctgctgaggcagggcaacatctacggggagcaggctcaggaggctgtgacccggctgctggagaaatgcctcattatccatcctgctcttctgcaccctccttgggaacccccagacctccccagatccagcagctagaggccaggcacaggaaccaagaaaaccagttacgggcccagcaatggatgcaaaagctacatgaccaacttgagctgcagcacttcctccgagactgccacgagctggatggctggatccatgagaagatgctgatggcgcgggatggcacgcgggaggacaaccacaagctgcataagagatggctccggcaccaggcattcatggccgagctggctcagaataaggagtggctggagaagatcgagcgggagggccagcaactgatgcaggagaagcccgaactggcggcctccgtgcggaagaagctgggcgagatccgccagtgctgggcggagctggagagcaccacccaggccaaggcacggcagctctttgaggccagcaaagcagaccagctggtgcagagctttgctgagctggacaagaagctccttcacatggagagccagctgcaagacgtggaccctggaggagacctggccactgtcaacagtcagctcaagaagctgcagtccatggagtcgcaggtggaggagtggtaccgcgaggtgggagagctgcaggcgcagacggcggcgctgccgctggagccggcgagcaaggagctggtgggtgagcggcagaacgcggtgggcgagcgcctggtgcgcctgctcgagccgttgcaggagcgccgccgcttgctgctggcttccaaggagttgcaccaggtggcgcacgacctggacgacgagctggcatgggttcaggagcggctgccactggccatgcagacagagcgaggcaacggtttgcaggcggtccagcagcacatcaaaaagaaccagggcctgcggcgggagatccaggcgcatgggccgcgcctggaggaggtgctggagcgcgcgggcgcgctggcgtcgctgcgcagcccggaggcagaggcagtgcgccggggcctggagcagctgcagagcgcctgggccggactgcgggaggctgccgagcgacggcagcaggtgctggacgccgccttccaggtggagcagtactacttcgacgtggctgaggtggaggcgtggctgggcgagcaggagctgctcatgatgagtgaggacaagggcaaggacgaacagagcaccctgcagctgctcaagaaacacctgcagctggagcaaggcgtggagaactacgaggaaagcatcgcgcagctgtcgcgccagtgccgggcgctgctggagatggggcacccggacagcgagcagatcagccggcggcagtctcaggtggaccgcctgtacgtggcgctcaaggagctgggtgaggagcgccgggtggctctggaacagcagtactggctgtaccagctcagccgccaggtgagcgagcttgagcactggattgccgagaaggaggtggtggctggctcacccgagctcggccaggactttgagcatgtctcggtgctgcaggagaaattctcagagtttgccagcgagacaggtatggcagggcgggaacggctggcagctgtgaaccagatggtggatgagctgatcgagtgtggccatacagcagcggccaccatggccgagtggaaggacggactgaacgaggcctgggctgagctgctggagctcatgggcacacgggcccagctgctggccgcctctcgggagcttcataagttcttcagtgacgcccgagagcttcagggacagattgaggagaagcggaggcggctgccccgcctgaccaccccgcctgagccgagacccagtgccagttccatgcagcggaccctgagagcctttgagcatgacctgcagctcctcgtgtcccaggtacggcagctgcaggagggggcggcccagctgcggacggtgtatgcgggtgaacatgccgaggccatcgctagccgggagcaggaggtgctgcagggttggaaagagctgctgtcagcctgtgaggatgcccgcctgcatgtcagctccacagccgacgccctgcgcttccacagccaagtccgcgacctgctctcctggatggatggcatcgccagccagattggggcagccgacaagcccagggacgtgtcatcagtggaggtgctcatgaactaccaccagggcctgaagactgagctggaggcgcgggtgcctgagctgaccacctgccaggagctggggcgatctctgctgctcaacaaaagtgccatggctgatgagatccaggcacagctggacaagctgggaaccaggaaggaggaggtgtcggaaaagtgggaccgccattgggagtggctgcagcagatgctggaggtgcaccagtttgcccaggaggcggtggtggctgatgcctggctgacagcccaggagccgctcctgcagagccgggagctgggcagcagcgtggatgaggtggagcagcttatccggcgacatgaggccttccgcaaagcggctgcagcctgggaagagaggttcagctctctgcggcgcctgaccacgatcgagaaaatcaaagcggaacagagcaagcagccgcctaccccactgctggggcgcaagttctttggggaccccacggaactggcggccaaggcggcgcccctgctgcggccagggggctatgaaaggggcttggagcccctggcccgccgagcctcggacacgctctcggccgaggtgcggactcgggtggggtatgtgcgccaggagctcaagcccgagcgcctccagccgcgcattgaccggctgccggagatcccggggagggtggagcccgcggccctgccggccgcaccagaggacgcggcggagacccccgcgacccccgcggcggcggagcaggtgcggccacgaccggagcgccaggagtcagctgatcgcgcggaggagctgcccaggaggcggcggcctgagcggcaagagtcagtcgatcaatccgaggaggctgcgcggaggcggcggccggagcggcaggagtcagcggagcacgaggcggcacacagccttaccctgggccgctatgagcagatggagcggcggcgcgagcggcgtgagcggcgcttggagcggcaggagtccagcgaacaggagatgcccatcagaggagacctggtcaaggggaaggccaccctggctgacattgtggaacagctgcaggagaaagaggcaggcccagggctgcctgctgggccgtcgctgcctcagccacgcgagcttcccccaggtcgcctgcccaacgggcttgagctgcccgagcggacacctcggccggaccggccccgggcgcgggaccggcccaagccgcgacggcggccgcggcccagagagggtggtgagggcgggggaagccggcgctcgcgctccgccccggcccagggcggctccgcccccgcgcctccgccaccgcccactcacacagtgcagcacgagggcttcctactgcgcaagcgcgagctcgacgctaaccgcaagtcgtccaaccggtcgtgggtgagcctgtactgtgtgcttagtaagggggaactgggcttctacaaggactccaagggcccggcatccgggagcacacacggtggggaaccgctgctcagcctgcacaaggccaccagcgaggtggctagtgactacaagaaaaagaagcatgtcttcaagctccagacccaggatggcagtgagtttttgctccaggcaaaagatgaggaggagatgaacggctggctggaggctgtagcttcctcggtggcggaacacgcagagatcgcccgctggggccagacactacccactacttcatccacagatgagggcaaccctaagagggaaggcggagatcgcagggccagcgggcgcaggaagtga

SEQ ID NO: 185382 - DNA, 11725 bp, Homo sapiens
  Payload ID: 16504
  Gene Symbol: SPTBN5
  Gene Name: spectrin, beta, non-erythrocytic 5
  Uniprot ID: Q9NRC6
  ENST ID: ENST00000320955
  CDS Start-End: 229-11253
ggacaatgccgcctgtgtgccgtcaccccagcacgctggctcaaggggagggctgtggtgcagccctgctccagccttggcctctcctgatgtccctctccctccctccacagcccctgctatctgccatctccatccgtccagctgggccgcctctgtggaacccaggcatcaccaaggtttagggagccatccagcagctcctcatccccaaagtctgcagggctgatggctggtcagccccacagtccccgggagctcctcggggctgcagggcaccgcagcaggaggcccagcacagaactccgggtcccgcccagtccaagtctcaccatggactctcagtacgagacgggccacattcgcaagctacaggcccggcacatgcagatgcaggagaagactttcaccaagtggatcaataacgtcttccagtgcggccaggcgggcatcaagatccggaacctgtacacagagctggctgacggcatccacctcctgcggctgctggagctcatctcaggggaggccctgccacccccgagccggggccgcctgcgtgtgcacttcctggagaacagcagccgagctctggccttcctcagggccaaggtgccagtaccactcatcgggccagagaacatcgtggacggagaccagacactcatcctgggactcatctgggtcatcattctgcgtttccagatctcccacatctccttggacaaggaggagtttggggccagcgcagccctgctgtccaccaaggaagccctgctggtctggtgccagcggaagacagccagctacaccaacgtgaacattacagatttctcccgaagctggagcgatgggctgggcttcaatgccctcatccatgcccacaggccagacctgttggactacggctccctgcgtccagaccgcccactgcacaaccttgcttttgctttcctggtggctgagcaggagctgggcattgctcagctgctggaccccgaggacgtggcagccgcacagccagatgagcgctctatcatgacctacgtctccctctactaccactactgctcccgcctgcatcaggggcagactgtccagaggagactcactaagatcctgcttcagctccaggagacagagctgctgcagacccagtacgagcagctggtggctgaccttctacgctggattgcagagaagcagatgcagctggaggcgcgggattttccagactcgctgcccgccatgcggcagctactggcagcattcaccatcttccgcacccaggagaagccaccccggctacagcagcgaggggccgcagaggccctgctcttccggctacagacagcactccaagcccagaaccgcaggcccttcctgcctcatgagggcctgggccttgcagagctgtcccagtgctgggcagggctggagtgggcagaggctgcaaggagccaggccctgcagcagaggctactgcagctgcagcggctagaaaccctggcccggcgcttccagcacaaggcagccctccgggagagtttccttaaggatgcagagcaggtgctagaccaggccagagccccgccagccagcctggccacagtggaggcagccgtccagaggctgggcatgctggaggctggcatcctgccccaggaggggcgcttccaggccctggctgagatcgcagacatcctccggcaggagcagtaccacagctgggcagatgtggcccgcaggcaggaggaagttaccgtgcgctggcagaggctccttcagcatctacagggacagaggaagcaggtggcagacatgcaggctgtgctgagcctgctgcaggaggtggaggctgcctcccaccagctggaggagctgcaggagccggccaggtccaccgcctgtgggcagcagctggcagaagtggtggagctgctgcagaggcatgacctgctggaggctcaagtctcggcccacggagcccatgtgagccatcttgctcagcagacagcagagctggactcctccctgggcaccagtgtggaggtgctgcaggccaaggccaggacactggcccagctccaacagagcctggtggctcttgtcagggcccggcgggccctgctggagcagaccctgcagcgggcagagttcctgcgcaactgtgaggaggaggaagcctggctgaaggagtgcggacagcgggtggggaatgcggccctgggccgggatctcagccagatcgcaggcgccctgcagaaacacaaggccctggaagctgaggtccaccgccaccaggccgtgtgcgtagatctcgtgcggaggggacgcgacctcagcgcccgcaggcccccaacgcagccggatcccggggaacgggcagaggccgttcagggagggtggcagctgctccagacccgggtggtggggcggggcgcacggctgcagacagccctgctggtcctgcagtacttcgcggacgcggcggaggcggcttcgtggctgcgcgagcggcgatcctcgctggagagagcgtcctgcggtcaggaccaggcggccgccgagaccctgctgaggcgccacgtgcggctggagcgcgtcctgcgcgccttcgcggccgagctgcggcggctggaggagcaggggcgggcggcctcggcccgggcgtcgttattcacggtgaactctgccctgagccctccaggagaaagcctgaggaacccagggccctggagtgaggcttcctgccaccctggccctggggatgcctggaagatggccctcccagctgagcctgaccctgactttgatcccaacactatactccagacacaggaccacttgagtcaggactatgagagtctgcgggccctggcacagctccgcagggcccggttggaggaggccatggccctgttcggtttctgcagttcctgtggggagctccagttgtggctggagaagcagacagtgctgctccaaagggtgcagccccaggctgacaccctggaggtcatgcagctcaaatatgagaacttcctcactgccctggctgtgggaaagggcctctgggctgaggtcagcagctctgctgagcaactgaggcagagatatcctgggaactccacacaaatccaacgacagcaggaggaactgagccagaggtgggggcagctggaggccctgaagagggagaaggccgtgcagctggcacacagtgtggaagtgtgcagttttctgcaggagtgtggacccacacaggtccagctgcgagacgtgctcctccagctggaggccctgcagccagggagctcagaggacacctgccacgccctgcagctggcccagaagaagaccctggtgctggagaggagggtccacttcctccaaagtgtggtcgtaaaggtcgaggagccaggctacgcagagagccagcctctgcaaggacaggtggagacactgcaggggctgctgaagcaagtacaggaacaagtggcccaacgggcccggcgccaggctgagactcaggcccggcagagcttcctgcaagagagccagcaactgctactgtgggcagagagtgtccaggctcagctgcgcagcaaggaggtgtcagtggatgtggcctcggctcagcggctgctgagggagcaccaagacctgctggaggagatccacctgtggcaggagaggctgcagcagctggacgctcagagccagcccatggcagccttggactgcccagactcccaagaggtgcccaacactctgagggtcctggggcagcagggccaggagctgaaggttttgtgggagcagaggcagcagtggctgcaagaggggctggagctgcagaagtttggccgagaagtggatggtttcactgccacctgtgccaaccaccaggcctggctgcacctggacaaccttggggaggacgtgagggaggccctgagcctgctgcagcagcaccgggagtttgggcggctcctgagcaccctggggcctcgggcagaggctctgcgggcacacggcgagaagctggttcagagccagcacccagctgcacacacggtcagagagcagctgcagagtatccaggcacagtggaccaggctccaggggaggagtgagcagaggaggaggcagttgctggcttccctccagctccaggagtggaagcaggatgtggcagagctgatgcagtggatggaagagaaggggctgatggctgcgcatgagccctccggagcgcgcagaaacatcctgcagacactcaagcggcacgaagcagctgagagcgagctactcgccacccgcagacacgtggaggccctgcagcaggttgggagagagctgttgagtaggaggccctgtggccaggaggacatacagaccaggcttcaaggcctgagaagcaagtgggaagctttgaaccgcaagatgactgagcgtggggacgagctccagcaggctggacagcaggagcaactcctgaggcagctgcaggatgcaaaggagcagctggagcagctcgaaggggccctacagagctcggaaacagggcaggacctgcgctccagccagaggctgcagaaacggcaccaacagctggagagtgagagccggaccctggctgccaagatggctgccctcgcctccatggcccatggcatggccgcctccccggccatcctggaagagacccagaagcacctccggaggctggagcttctgcaggggcatctggccatccggggcctgcagctgcaggcctcagtggagctgcaccagttctgccacctgagcaacatggagctctcttgggtagccgagcacatgccccatggcagccccaccagctataccgagtgcttgaatggtgcccagagccttcaccgcaagcacaaggagctccaggtggaggtaaaagctcaccaggggcaggtgcaacgggtgctgagttctgggcggagcctggcagcctcagggcacccccaagcccaacacatcgtggagcagtgccaggagctggaaggccactgggcagagctggagagggcatgtgaagcgcgggcccagtgtctgcagcaggctgtcactttccagcagtactttctggatgtgtcagagctggagggctgggtggaggagaagcggccgctggtgagcagtcgggactatggcagagacgaggcagccaccctcaggctcattaacaagcaccaggctctacaggaggaactagccatttactggagctccatggaggagcttgaccagacggcccaaaccctcactggccccgaagtccctgagcagcagcgtgtggtgcaggagaggctccgggagcagctgcgggcactgcaggagttggcggccacacgggaccgggaactggaggggaccctgaggctgcatgagttcctgagggaggctgaggacctgcagggctggctggcaagccagaagcaggcagccaaaggaggggagagcctgggagaggaccccgagcacgccctgcacctctgcaccaagtttgcaaagtttcagcaccaagtggagatgggcagccagcgggtggccgcctgccggctgctggcggagagcctgctagagcgtgggcacagtgctggccccatggtccgtcagaggcagcaggatctgcagaccgcctggtcggagctgtgggagctgacccaggcccgaggccacgcgctccgagacaccgagaccaccctcagagttcacagagatctcttggaagtcctcacccaggtccaggagaaagccacgagcctccccaacaatgtggcacgggacctgtgtgggctggaggcgcagctgagaagccaccaggggctggagcgagaactcgtgggcaccgagcggcagctgcaggaactgctggagactgcaggcagggtgcagaagctgtgtccggggcctcaggcccatgcggtgcagcagaggcagcaagctgtgacgcaggcgtgggcagtgctgcagcgacgcatggagcagcgcagggcccagctggagcgggcacgcctcctggcccgcttccgcacggcggtgcgtgactatgcctcctgggcagcccgcgtgcgccaggacctgcaggtggaggagagttcgcaagagcctagcagtggcccgctgaagctcagtgcccaccagtggctccgggcggagctggaggcccgggagaagctgtggcagcaggccacccagctggggcagcaggcacttcttgctgcagggacacccaccaaggaggtccaggaagagcttcgagccctgcaggaccagcgggaccaggtgtatcagacctgggcacggaagcaagagaggctgcaggccgagcagcaggagcagctcttcctcagagagtgcggccgcctggaggagatcctcgcggcccaggaggtctccctgaaaaccagtgccttggggagctcggtggaagaggtagagcagttgattcgcaagcacgaggtcttcctgaaggttctgactgcccaggacaagaaggaggcagccctgcgtgagcggctgaagacgctccggcgcccccgggtgcgggaccggcttcccatcctgctgcagcgccggatgagagtgaaggagctggcggagagccggggacacgccctgcatgcctccctgctgatggccagcttcacccaggccgcaacccaggctgaggactggatccaggcgtgggcccagcagctgaaggagccggtccctcctggggacctgagagataagctgaagcccctgctgaaacaccaggcctttgaggctgaagtccaggcccatgaggaggtcatgacctctgttgccaagaagggagaggctctcctggcacagagtcaccctcgagccggagaggtctcccagcggctgcagggcctgcggaagcactgggaggacctgaggcaggcaatggccctcaggggccaggagctggaggacaggcggaacttcctggagttcctgcagagagtggaccttgcagaggcctggatccaggagaaggaggtgaagatgaatgttggtgacctgggccaggacctggagcactgcctgcagctccgacggcggctccgcgagttccgaggaaactcggccggggacacagtgggtgatgcctgcatcaggagcatcagtgacttgtcactgcagctcaagaaccgggaccctgaggaagtcaagatcatctgccagcggcgaagccagctcaacaacaggtgggcgagtttccatggcaacttgctccggtaccagcagcagctcgaaggggccttggagatacacgtgttgtcccgagagctggacaatgtcaccaagaggattcaggagaaggaagccctgatccaggccctggactgtgggaaagatctggagagcgtgcagaggctgctgcggaaacacgaggagctggagcgggaagtgcaccccatccaggcccaggtggagtccctagagcgtgaagtgggccgcctctgccaaagaagccccgaggcagcccacggcctcaggcacaggcagcaggaggtggctgagagctggtggcagctccggagcagggcccagaagcggagggaggcgctggatgccttgcaccaagctcagaaactccaggcaatgctgcaggaattgctggtcagcgcccagaggctgcgggctcagatggacacgagccccgctcctcgcagccctgtggaagcccggcgtatgttagaagagcatcaggagtgcaaggccgagctggactcctggacagacagcatcagcctggcccgaagcactgggcagcaactgctcacagcggggcaccccttcagctccgacattcgccaggtgctggctggcttagaacaggagctgagcagcctggaaggggcctggcaggagcatcagctacagctgcagcaggccctggagctacagctgtttctgagctcagtggagaagatggaacgttggctttgcagcaaggaagactccctagccagtgagggtctatgggaccccttggcccccatggagccccttctgtggaagcacaagatgctggagtgggacctggaggtgcaggcgggaaagatcagtgctctggaggccacggcccgcggcctgcaccagggtgggcaccccgaggcccagagtgccctgggcaggtgccaggccatgcttctgaggaaggaggcgctcttcaggcaagccgggacccgccgccatcgcctggaggagctccggcagctgcaggccttcctgcaggactcccaggaggtggctgcgtggctgagggagaagaacctggtggccttggaggagggtttgctggacacagccatgctgccagcacagttacagaagcagcagaatttccaggcggagctggacgcgagcatgcaccaacagcaggagctgcagcgggagggacagaggctgctgcaggggggccacccagcctcggaggccatccaggagcgactggaggagctgggagcactctggggtgagctgcaagacaactcccagaagaaggtggccaagctccagaaggcctgtgaggccctgcgtctgcggcggagcatggaggaactggagaactggctggagcccatcgaggttgagctgagagcccccactgtgggccaggccctgcctggggtgggcgagctcctgggcacacagagggagctggaggcagcagtggacaagaaggccaggcaggctgaggcactgctgggccaggcccaggcctttgtgagggaaggccactgccttgcccaagatgtggaagagcaggcccggcggctgcttcagaggttcaagagcctgagggagcccctgcaggagcgcaggacggccctggaggcccggagcctcctcttgaagttcttcagggacgccgacgaggaaatggcctgggtgcaggagaagctgcctctggccgctgcccaggactatggccagagcctgagtgcggtgcggcacctgcaggagcagcaccagaacctggagagtgagatgagcagccacgaggctctgacccgggtggtgctgggcactgggtacaagctggtgcaggctgggcactttgccgcccacgaggtggccgcccgggtgcagcagctggagaaggccatggcccacctgcgggcagaggcggcgcggaggcggcttctgctgcagcaggctcaggaggcccagcagtttctgactgagctcctggaggcgggatcctggctggctgagcggggccatgtcctggacagcgaggacatgggccacagtgctgaagccacacaggcccttctgcggcggctggaggccaccaagagagacctggaagcgttcagcccacgcatcgagcggctgcagcagacagcagcactcctggagagcaggaagaacccagaaagccccaaggtgctagcccagctgcaggcagttcgggaggcccacgcagagctgctgcggagggcggaggccagggggcacggcctgcaggagcagctgcagctacaccagctggagcgagagaccctgctcctcgacgcctggctgaccaccaaggcggccaccgccgagtcccaggactacgggcaggacctggagggtgtcaaggtgctggaagagaagtttgatgctttcagaaaggaagtgcagagcctgggccaggccaaggtgtatgccctgaggaagttggcaggcaccctggagcggggtgcacccaggcgctatccccacatccaagcccagaggagccgcattgaggctgcttgggagaggttggaccaagcaataaaagcccgcacagagaacttggctgcagcccatgaggtccacagctttcagcaggcagcagctgagctccagggaaggatgcaggagaagacggccctgatgaagggggaggacggaggccacagcctgtcatctgtgcggaccctgcagcaacagcacaggcgcctggagagagagctggaagctatggagaaggaggtggcacggctacagacggaggcctgccgactgggccagctacatcctgcagctccggggggcctggccaaggtgcaggaggcctgggccaccctgcaggcgaaggcccaggagcgaggccagtggctggcgcaggctgcacagggccatgccttcctcgggcgctgccaggaactgctagcatgggcacaggagaggcaggagctggcgtcctccgaggagctggctgaggacgtggcgggggctgagcagctccttgggcagcatgaagagctggggcaagaaatcagggagtgccgccttcaagcccaggacctgcggcaggaaggacagcagctggtggacaacagccacttcatgtctgcggaggtgacagagtgcctgcaggagctggaagggcggctgcaggagctggaggaggcttgggccctgcgctggcaacgctgtgccgagagctggggcctgcagaagcttcggcagaggctggagcaggctgaggcctggctggcctgctgggagggactcctgctgaagcccgactatgggcactcagtgtcagatgtggagttgctgctgcacagacaccaggacttagaaaagctgctggcagcccaggaagagaagtttgcccaaatgcaaaagacagagatggaacaggagctcctgctgcagccacaggagctgaagcccgggagagctggcagctcgctgacatcctttcagtggaggccctctggacaccaggggctaggagcacagctggctgagacgagggacccccaggatgcaaagggtacccccaccatggaggggtctttggagttcaagcagcacctgctgcctggcgggaggcagcctagctcgagctcctgggacagctgccgcgggaacttgcagggcagctctctgagcctgttcctggatgagaggatggcagcggagaaagtagcttccatagccctccttgacctcacgggagcccggtgtgagaggctgcggggccgccacggcaggaaacacacattctccttaaggctgaccagtggggcagagatcctgtttgcagcaccgtccgaagagcaggctgagagctggtggcgagccctgggcagcactgcagcccagagtctgagcccaaaactcaaagccaaacctgtcagctctctgaatgagtgcacgaccaaggatgcccggcctggatgtctactcaggtctgatccctgaggtgaaccccagtgcaacaccaaacttcaggggcacaagcgaggacacatctaagggaccagaataagactcagctacaggcaaaagggctccttcccgtggctgcttcaacccagttccccaggcccagcttctggaatagacagttccttctggttagatgggtcctaccatgtggcaggaaacagccattgcctggcctccccctgcattcctgtctgggtgaagaggagacgtgttacggcagagcaggtgggcaaggccagggctaccccaggcccatgtggcctcctccttgcttggaaggggtgactctgagcacaggtagacgcagacgtgtgcagagaatgtgctcttcggaggaagaacactgatgagcgagctctgtaccagcccttgccatgtacagccaagagcctagaatgacatggcccttctcagcagtaataacagatggtctcagcgcctcaca

SEQ ID NO: 185383 - DNA, 1801 bp, Homo sapiens
  Payload ID: 16505
  Gene Symbol: SPDYA
  Gene Name: speedy/RINGO cell cycle regulator family member A
  Uniprot ID: Q5MJ70
  ENST ID: ENST00000334056
  CDS Start-End: 190-1131
agcgaccgacgagcaaccgtctgaggccaggagcgctgcgacggagccttgaccgccgttgcccggccctctcccgcgcagccccgggcttccgcagtccttccttcagaagggaaatttctgagggtcaggaaggggaatctgtacctcactccttgaacaccaaggaaggaatattgggaaaccaaaatgaggcacaatcagatgtgttgtgagacaccacctactgtcactgtttatgtaaaatcagggtcaaatagatcacatcagcctaaaaagcccattactctgaagcgtcctatttgtaaagataattggcaagcatttgaaaaaaatacacataataacaacaaatctaaacgccccaaaggaccttgtctggttatacagcgtcaggatatgactgctttctttaaattatttgatgacgatttaattcaagatttcttgtggatggactgctgctgtaaaattgcagacaagtatcttttggctatgacctttgtttatttcaagagggctaaatttactataagtgagcataccaggataaatttctttattgctctgtatctggctaatacagttgaagaagatgaagaagaaaccaagtacgaaatttttccatgggctttagggaaaaactggagaaaattgttccctaatttcttaaagttaagggaccagctctgggatagaattgactatagggctattgtaagcaggcgatgttgtgaggaggttatggccattgcaccaacccattatatctggcaaagagaacgttctgttcatcacagtggagctgtcagaaactacaacagagatgaagttcagctgccccggggacctagtgccacaccagtagattgttcactctgtggtaaaaaaagaagatatgttagactgggattgtcttcatcatcatctttatccagtcatacagcaggggtgacagaaaaacattctcaggactcatacaactcactgtcaatggacataataggtgatccttctcaagcttatactggttctgaagtagtcaatgaccatcaatcaaataaaggaaagaaaactaatttcttgaagaaagacaaatctatggagtggtttacaggaagtgaagaatgagatggcccaactaaaccaatttggaatcattaactacaaaatgtcaaactaactgcaagacaagtgtcaaaatgggatgtttaagcagttttgctatgttatacatcttttagttgttattttcaaaattatatgtataagttatataagtcatagtaatagctaaaaatgccaatctatggaagcagtgattttcaatataaagttctattttgatatttttccatcttcaagtcagttactgtcatctggagtactcagttaagttgtggtttgaccttcctcaacttgacaagaaaagctaatttaagagaagaaaaacataaagtcattatattaattaaaagaaaaaacaccatttaatatgttctgaaaacattactcacctgtatgaccaggttgccagtgtactggtctagcaacatagggaaatgatccatatggaaaatcagaatgcgattcttctgttgtaaaaaaatatatgtactataagctacataaaatattttctatttttttcacaaaactgttaaaatatgagttactctctttattgtaagttttttctttatttatttccttgcatatgttttagagctactctgccagttattatacagaaactatttgtcaatgattatgtaataaacatatgattttataaccaaat

SEQ ID NO: 185384 - DNA, 1759 bp, Homo sapiens
  Payload ID: 16505
  Gene Symbol: SPDYA
  Gene Name: speedy/RINGO cell cycle regulator family member A
  Uniprot ID: Q5MJ70
  ENST ID: ENST00000379579
  CDS Start-End: 148-1089
gggagaccttagagcgggtaccgctgctggctagcgaccgacgagcaaccgtctgaggccaggagcgctgcgacggagccttgaccgccgttgcccggccctctcccgcgcagccccgggcttccgcaggaatattgggaaaccaaaatgaggcacaatcagatgtgttgtgagacaccacctactgtcactgtttatgtaaaatcagggtcaaatagatcacatcagcctaaaaagcccattactctgaagcgtcctatttgtaaagataattggcaagcatttgaaaaaaatacacataataacaacaaatctaaacgccccaaaggaccttgtctggttatacagcgtcaggatatgactgctttctttaaattatttgatgacgatttaattcaagatttcttgtggatggactgctgctgtaaaattgcagacaagtatcttttggctatgacctttgtttatttcaagagggctaaatttactataagtgagcataccaggataaatttctttattgctctgtatctggctaatacagttgaagaagatgaagaagaaaccaagtacgaaatttttccatgggctttagggaaaaactggagaaaattgttccctaatttcttaaagttaagggaccagctctgggatagaattgactatagggctattgtaagcaggcgatgttgtgaggaggttatggccattgcaccaacccattatatctggcaaagagaacgttctgttcatcacagtggagctgtcagaaactacaacagagatgaagttcagctgccccggggacctagtgccacaccagtagattgttcactctgtggtaaaaaaagaagatatgttagactgggattgtcttcatcatcatctttatccagtcatacagcaggggtgacagaaaaacattctcaggactcatacaactcactgtcaatggacataataggtgatccttctcaagcttatactggttctgaagtagtcaatgaccatcaatcaaataaaggaaagaaaactaatttcttgaagaaagacaaatctatggagtggtttacaggaagtgaagaatgagatggcccaactaaaccaatttggaatcattaactacaaaatgtcaaactaactgcaagacaagtgtcaaaatgggatgtttaagcagttttgctatgttatacatcttttagttgttattttcaaaattatatgtataagttatataagtcatagtaatagctaaaaatgccaatctatggaagcagtgattttcaatataaagttctattttgatatttttccatcttcaagtcagttactgtcatctggagtactcagttaagttgtggtttgaccttcctcaacttgacaagaaaagctaatttaagagaagaaaaacataaagtcattatattaattaaaagaaaaaacaccatttaatatgttctgaaaacattactcacctgtatgaccaggttgccagtgtactggtctagcaacatagggaaatgatccatatggaaaatcagaatgcgattcttctgttgtaaaaaaatatatgtactataagctacataaaatattttctatttttttcacaaaactgttaaaatatgagttactctctttattgtaagttttttctttatttatttccttgcatatgttttagagctactctgccagttattatacagaaactatttgtcaatgattatgtaataaacatatgattttataaccaaat

SEQ ID NO: 185385 - DNA, 755 bp, Homo sapiens
  Payload ID: 16505
  Gene Symbol: SPDYA
  Gene Name: speedy/RINGO cell cycle regulator family member A
  ENST ID: ENST00000439646
  CDS Start-End: 1-173
atctggctaatacagttgaagaagatgaagaagaaaccaagtacgaaatttttccatgggctttagggaaaaactggagaaaattgttccctaatttcttaaagttaagggaccagctctgggatagaattgactatagggctattgtaagcaggcgatgttgtgaggagtagtcaatgaccatcaatcaaataaaggaaagaaaactaatttcttgaagaaagacaaatctatggagtggtttacaggaagtgaagaatgagatggcccaactaaaccaatttggaatcattaactacaaaatgtcaaactaactgcaagacaagtgtcaaaatgggatgtttaagcagttttgctatgttatacatcttttagttgttattttcaaaattatatgtataagttatataagtcatagtaatagctaaaaatgccaatctatggaagcagtgattttcaatataaagttctattttgatatttttccatcttcaagtcagttactgtcatctggagtactcagttaagttgtggtttgaccttcctcaacttgacaagaaaagctaatttaagagaagaaaaacataaagtcattatattaattaaaagaaaaaacaccatttaatatgttctgaaaacattactcacctgtatgaccaggttgccagtgtactggtctagcaacatagggaaatgatccatatggaaaatcagaatgcgattcttctgttgtaaaaaaatatatgtactataag

SEQ ID NO: 185386 - DNA, 758 bp, Homo sapiens
  Payload ID: 16505
  Gene Symbol: SPDYA
  Gene Name: speedy/RINGO cell cycle regulator family member A
  ENST ID: ENST00000449210
  CDS Start-End: 376-758
gttgcccggccctctcccgcgcagccccgggcttccgcaggtacctgtgctcgcccccgggaaggggcctcgcaggcgaatctccagtttcgagtgtgcccggtccctgggttcgctcgccggcgaccccaccgcccgccttagatgagaaggcagcgctccagcctcgtcctcacgccgcctcccgtgggcgccctcagctgccttcgcggcgacgacacacgcgctccccgcagcgggctctgggctgagggacctggcgagggaggcagtggccgcgcagtccttccttcagaagggaaatttctgagggtcaggaaggggaatctgtacctcactccttgaacaccaaggaaggaatattgggaaaccaaaatgaggcacaatcagatgtgttgtgagacaccacctactgtcactgtttatgtaaaatcagggtcaaatagatcacatcagcctaaaaagcccattactctgaagcgtcctatttgtaaagataattggcaagcatttgaaaaaaatacacataataacaacaaatctaaacgccccaaaggaccttgtctggttatacagcgtcaggatatgactgctttctttaaattatttgatgacgatttaattcaagatttcttgtggatggactgctgctgtaaaattgcagacaagtatcttttggctatgacctttgtttatttcaagagggctaaatttactataagtgagcataccaggataaatttctttattgctctgta

SEQ ID NO: 185387 - DNA, 991 bp, Homo sapiens
  Payload ID: 16506
  Gene Symbol: SPDYC
  Gene Name: speedy/RINGO cell cycle regulator family member C
  Uniprot ID: Q5MJ68
  ENST ID: ENST00000377185
  CDS Start-End: 83-964
gaaggccctgattggtggacgggctgctttgggcagggccgccctcaggctatataagcgcactcgcggcggcgttggtgttatgctctgggccattcctgagctcgggtcaccctgccccatctccatctcctatgagatgagtgactcccaagaccccaccacttcccctgtagttaccacccaggtagagctggggggctgcagccggcaaggtgggggcaatgggttcctccgttttcgccagcaccaggaggtccaggccttcctcagccttctggaggacagttttgtccaggaattcctctccaaagacccctgcttccagatttcagataagtatctcctggccatggtgctggtctacttccagcgcgcccacctgaagctcagcgagtatacccacagcagcctgttcttggccctgtaccttgcaaacgacatggaggaggacctggagggccccaaatgtgagatttttccatgggccctgggaaaagattggtgtttacgagtggggaaattcctgcaccagagggataagctttgggcacggatgggtttccgggctgttgtgagccgccagtgctgtgaggaggtcatggcaaaggagccattccactgggcttggactcgggaccggcgcccccaccatggtggggttcagagggtctgtccacaggtccctgttcgccttccccggggccctggcctctcgccgccccactgttccccctgtggtttgccccagcactgcagcagccacttgcttaagcctgtgtcatccaagtgcccttctctgacctctgaatgtcatcgccctccctcccaaaattatctctcaagggtcaaaaacgcctggggtggggactttctcatcgtcttgcctccccagatgcaactggaaccaggcacctactccctccgcatcttcccaaagcctccggcacgccctgggcactgaagctctgcagggtgaagaacagcacgc

SEQ ID NO: 185388 - DNA, 2649 bp, Homo sapiens
  Payload ID: 16507
  Gene Symbol: SPDYE1
  Gene Name: speedy/RINGO cell cycle regulator family member E1
  Uniprot ID: Q8NFV5
  ENST ID: ENST00000258704
  CDS Start-End: 138-1148
tggggaggggaaggagcggcacatggggttgagcagaggagaaaatcagaaagatggcttagagaagtcagcagtctgcgagtctggggaggatggagagtggtttggggttttgggtcggggtctaaggtgatcagatgcagaagcattacacagtggcctggtttctttactcagcccctggggtagatcccagccccccatgtaggtcccttggctggaaaaggaagagggagtggtcagatgaatctgaggaggagccggagaaggagctcgcccctgagcctgaggagacctgggtagtggagacgctgtgtgggctcaagatgaagctgaagcaacagcgagtgtcacccatcctccttgagcaccacaaggacttcaacagtcagcttgcccctggggtagatcccagccccccgcataggtccttttgctggaaaaggaagatggagtggtgggacaaatctgaggagtcggaggaggagccacggaaggtgctcgcccctgagcctgaggagatctgggtggcggagatgctgtgtggcctcaagatgaagctgaagcgacggcgagtgtcgctcgtgctccctgagcaccacgaggccttcaacaggctgcttgaggatcctgtcattaaaagattcctggcctgggacaaagatctgagggtgtcggacaagtatctccttgctatggtcatagcgtatttcagccgagccggcttcccctcctggcaataccaacgccttcatttcttcctggctctctacctggccaatgacatggaggaggacgacgaggactccaaacaaaacatcttccacttcctgtatgggaagaaccgctctcgcatacccttgctccgtaagcgtcggttccagttataccgttccatgaacccgagggccaggaagaaccgctctcacatacccttggtccgtaagcgtcggttccagttacgccgttgcatgaacccgagggccaggaagaaccgctctcagatagtcctgttccagaaacgtcggttccacttcttctgttccatgagctgcagggcttgggtttccccagaggagttggaggagatccaggcttatgacccagagcactgggtgtgggcgcgagatcgcgctcgcctttcctagagctccagggaccgtggaggcctgaggtcatcggcctgagagaagaacaccggacccaggggagatgtggattttcagcaggaactttattccaatgctaatggcagacaccaggaaggaggagaggaaccatttgtgcagatcatctagaagaacctggaccattcttgatggagctgaatacagtgatcacgttgtcctcctaggagcaggggtggggggagggggatggggtccttctaggagtccttggagaaaagtaagaaaccaggagtgtttccagttccaccctttcctggggcaccaccaccctttttatattgctgaattccaacctccctggggcggaacctggaggtcctgtttcttacggacttggttgccacagtccaggagcatttgaaggcacaatgcaggggctcagattggcacagaattcttttgtgaaatatcagtgccacagattgtaacagatagcttcatgcacactctgcattttattggtttgtttggaaaatgttggccattgaattattcatagatttatttcaaatagtttggaaattgttgtacttttgaaaacatgctgttcctgtagttttttgatgagagttatagttgttatatatacataaagataattttcttttcatttttgagacaattctttttatcctaaatattttatcatctttaaatttgtttctgtattattatatgtgctcctgaagcgagcactctttttatctatgatacttccataataatctcttctatttatagctattggtagttcccctaaattctgacgatagaaatttttatttgctgtttaggtttgtgactgaattgtgagaattcagttgtgatttttaacatgtgtcagatatatatactaacacgtctaatatatactattttattggtttattttgaaaaacatgggtatagaattatttaaatattattttatttatttaaatatttattaaatatatttatttatttaaatgttattattactttaaatattattttaaatattttggaaatactggtatttttgaatagatgctgtttctataaagctgtgtgatggtattataactgttatatacacatacatataattttgttttcctttttaagagaggattcttttcatcctaaatcttttacctttcaatctttgtatctattattacacgtgctgctgaagggagcatggtttttatctatgatacttagttaacatatatattacatttatagctatgtagtagttcccctaaattcttgtaaaaataaatttttatttgatatttcatctatgtttgaaatgtgagaattcagatgtaattttttaccttgatttggcatgtttgtatgttactttaaagaggatgtgtgttctaaaggaggacatgagctgtgtgttttcaagagaacaatagagtgtgtctcttggggaaacgtaataaaaatgaacttttctcacctt

SEQ ID NO: 185389 - DNA, 858 bp, Homo sapiens
  Payload ID: 16508
  Gene Symbol: SPDYE16
  Gene Name: speedy/RINGO cell cycle regulator family member E16
  ENST ID: ENST00000632150
  CDS Start-End: 1-858
atgcagaagcattacacggtggcctggtttctttactcagcccctggggtagatcccagccccccatgtaggtcccttggctggaaaaggaagaaggagtggtcagatgaatctgaggaggagccggagaaggagctcgcccctgagcctgaggagacctgggtagtggagatgctgtgtgggctcaagatgaagctgaagcaacagcgagtgtcacccatcctccctgagcaccacaaggacttcaacagtcagcttgcccctggggtagatcccagccccccgcataggtccttttgctggaaaaggaagagggagtggtgggacgaatctgaggagtcgttggaggaggagccacggaaggtgctcgcccctgagcctgaggagatctgggtggcggagatgctgtgtggcctcaagatgaagctgaagcgacggcgagtgtcgctcgtgctccctgagcaccacgaggccttcaacaggctgcttgaggatcctgtcattaaaagattcctggcctgggacaaagatctgagggtgtcggacaagtatctcctggctatggtcatagcgtatttcagccgggccggcctcccctcctggcaataccaacgcattcatttcttcctggctctctacctggccaatgacatggaggaggacgacgaggaccccaaacaaaacatcttctacttcctgaagaaccgctctcagatagccctgttccagaaacttcggttccagttcttctgttccatgagcggcagggcttgggtttcccgggaggagttggaggagatccaggcttatgacccagagcactgggtgtgggcgcgagatcgcgctcgcctttcctag

SEQ ID NO: 185390 - DNA, 2591 bp, Homo sapiens
  Payload ID: 16508
  Gene Symbol: SPDYE16
  Gene Name: speedy/RINGO cell cycle regulator family member E16
  Uniprot ID: A6NNV3
  ENST ID: ENST00000633306
  CDS Start-End: 138-1076
tggggaggggaaggagcggcacatggggttgagcagaggagaaaatcagaaagatggcttagagaagccagcagtctgcgagtctggggaggatggagagtggtttggggttttgggtcggggtctaaggtgatcagatgcagaagcattacacggtggcctggtttctttactcagcccctggggtagatcccagccccccatgtaggtcccttggctggaaaaggaagaaggagtggtcagatgaatctgaggaggagccggagaaggagctcgcccctgagcctgaggagacctgggtagtggagatgctgtgtgggctcaagatgaagctgaagcaacagcgagtgtcacccatcctccctgagcaccacaaggacttcaacagtcagcttgcccctggggtagatcccagccccccgcataggtccttttgctggaaaaggaagagggagtggtgggacgaatctgaggagtcgttggaggaggagccacggaaggtgctcgcccctgagcctgaggagatctgggtggtggagatgctgtgtggcctcaagatgaagctgaagcgacggcgagtgtcgctcgtgctccctgagcaccacgaggccttcaacaggctgcttgaggatcctgtcattaaaagattcctggcctgggacaaagatctgagggtgtcggacaagtatctcctggctatggtcatagcgtatttcagccgggccggcctcccctcctggcaataccaacgcattcatttcttcctggctctctacctggccaatgacatggaggaggacgacgaggaccccaaacaaaacatcttctacttcctgtatgggaagacccgctctcgcatacccttggtccgtaaccgtcggttccagttatgccgttgcatgaacccgagggccaggaagaaccgctctcagatagccctgttccagaaacttcggttccagttcttctgttccatgagcggcagggcttgggtttcccgggaggagttggaggagatccaggcttatgacccagagcactgggtgtgggcgcgagatcgcgctcgcctttcctagagctccagggaccgtggaggcctgaggtcatcggcctgagagaagaacaccggacccacgggagatgtggattttcagcaggaactttattccaatgctaatggcagtcaacaggaaagaggagaggaaccatttgtgcagatcatctagaagaacctggaccattcttgatggagctgaatacagtgatcacgttgtcctcctgggagcaggggtggggggaggggggtggggtccttctaggagtccttggagaaaagtaagaaaccaggagtgtttccagttccaccctttcctgcggcaccaccaccctttttatattgctgaatgccaacctccctggggcggaacctgaggtcctgtttcttacggacttggttgccacagtccaggagcatttgaaggcacaatgcaggggctcagattggcacagaattcttttgtgaaatatcagtgccacagattgtaacagatagcttcatgcacactctgcattttattggtttgtttggaaaatgttggccattgaattattcatagatttatttcaaatagtttggaaattgttgtacttttgaaaacatgctgttcctgtagttttttgatgagagttatagttgttatatatacataaagataattttcttttcatttttaagagacaattctttttatcctaaatattttattatctttaaatttgtttctgtattattatatgtgctcctgaagtgagcactctttttatctatgatatttccataataatctcttctatttatagctattggtagttccccaccagaaaaaaacataattctggtgatagaaatttttatttgctgtttaggtctgtgactgaattgtgagaattcagttgtgatttttaacatgtctcagatatatatactaacacgtctaatatatactatctaatttattggtttattttgaaaaacatgggtatagaattatttaaatattattttatttattgaaatattaaatatatttatttatttgaatattattacttgaaatattattttaaatattttggaaatactggtatttttgaatagatgctgtttctataaagctgtgtgatgggtgttataactgttatatacacatacgtataattttgctttcctttttaagagaggattcttttcatcctaaatcttttacctttcaatctttgtatctattattacacgtgctgctgaagggagcatggtttttatctatgatacttagttaacatatatattacatttatagctatgtagtagttcccctaaattcttgtaaaaataaatttttatttgatatttcatatatgtttgaaatgtgagaattcagatgtaattttttaccttgttttggcatctttgtatgttactttaaagaggatgtgtgttctaaaggaggacatgagctgtgtgttttcaagagaacaatagagtgcgtctcttggggaaacataataaaaatgaacttttctcaccttca

SEQ ID NO: 185391 - DNA, 2598 bp, Homo sapiens
  Payload ID: 16508
  Gene Symbol: SPDYE16
  Gene Name: speedy/RINGO cell cycle regulator family member E16
  ENST ID: ENST00000632012
  CDS Start-End: 138-1076
tggggaggggaaggagcggcacatggggttgagcagaggagaaaatcagaaagatggcttagagaagccagcagtctgcgagtctggggaggatggagagtggtttggggttttgggtcggggtctaaggtgatcagatgcagaagcattacacggtggcctggtttctttactcagcccctggggtagatcccagccccccatgtaggtcccttggctggaaaaggaagaaggagtggtcagatgaatctgaggaggagccggagaaggagctcgcccctgagcctgaggagacctgggtagtggagatgctgtgtgggctcaagatgaagctgaagcaacagcgagtgtcacccatcctccctgagcaccacaaggacttcaacagtcagcttgcccctggggtagatcccagccccccgcataggtccttttgctggaaaaggaagagggagtggtgggacgaatctgaggagtcgttggaggaggagccacggaaggtgctcgcccctgagcctgaggagatctgggtggcggagatgctgtgtggcctcaagatgaagctgaagcgacggcgagtgtcgctcgtgctccctgagcaccacgaggccttcaacaggctgcttgaggatcctgtcattaaaagattcctggcctgggacaaagatctgagggtgtcggacaagtatctcctggctatggtcatagcgtatttcagccgggccggcctcccctcctggcaataccaacgcattcatttcttcctggctctctacctggccaatgacatggaggaggacgacgaggaccccaaacaaaacatcttctacttcctgtatgggaagacccgctctcgcatacccttggtccgtaaccgtcggttccagctatgccgttgcttgaacccgagggccaggaagaaccgctctcagatagccctgttccagaaacttcggttccagttcttctgttccatgagcggcagggcttgggtttcccgggaggagttggaggagatccaggcttatgacccagagcactgggtgtgggcgcgagatcgcgctcgcctttcctagagctccagggaccgtggaggcctgaggtcatcggcctgagagaagaacaccggacccaggggagatgtggattttcagcaggaactttattccaatgctaatggcagacaacaggaaagaggagaggaaccatttgtgcagatcatctagaagaacctggaccattcttgatggagctgaatacagtgatcacgttgtcctcctgggagcaggggtggggggaggggggtggggtccttctaggagtccttggagaaaagtaagaaaccaggagtgtttccagttccaccctttcctgcggcaccaccaccctttctatattgctgaattccaacctccctgggccggaacctggaggtcctgtttcttacagacttggttgccacagtccaggagcatttgaaggcacaatgcaggggctcagattggcacagaattcttttgtgaaatatcagtgccacagattgtaacagatagcttcatgcacactctgcattttattggtttgtttggaaatgttggccattgaattattcatagatttatttcaaatagtttggaaattgttgtacttttgaaaacatgctgttcctgtagttttttgatgagagttatagttgttatatatacataaagataattttcttttcatttttaagagacaattctttttatcctaaatattttattatctttaaatttctttctgtattattatatgcgctcctgaagcgagcactctttttatctatgatacttccataaaaatctcttctatttatagctattggtagttccccaccacaaaaaaacataattctggtgatagaaatttttatttgctgtttaggtttgtgactgaattgtgagaattcagttgtgatttttaacatgtctcagatatatatactaacacgtctaatacatactatctaatttattggtttattttgaaaaacatgggtatagaattatttaaatattattttatttattgaaatatttattaaatatatttatttatttaaatattattattactttaaatattattttaaatattttggaaatactggtatttttgaatagatgctgtttctataaagctgtgtgatgggtgttataactgttatatacacatacatataattttgttttcctttttaagagaggattcttttcatcctaaatcttttacctttcaatctttgtatctattattacacgtgctgctgaagggagcatggtttttatctgtgatacttagttaacatatatattacatttatagctatgtagtagttcccctaaattcttgtaaaaataaatttttatttgatatttcatatatgtttgaaatgtgagaattcagatgtaattttttaccttgttttggcatctttgtatgttactttaaagaggatgtgtgttctaaaggaggacatgagctgtgtgttttcaagagaacaatagagtgcgtgtcttggggaaacataataaaaatgaacttttctcaccttca

SEQ ID NO: 185392 - DNA, 3434 bp, Homo sapiens
  Payload ID: 16508
  Gene Symbol: SPDYE16
  Gene Name: speedy/RINGO cell cycle regulator family member E16
  ENST ID: ENST00000632547
  CDS Start-End: 1-1059
atggacagaacggagactaggttccgtaagaggggacagattaagggaaagatcacgaccagccgtcaacctcacccccagaatgagcagagtccccagcggagcacctcggggtactccctccaggaggtggtggatgatgaagtgttgggatcatcagcccctggggtagatcccagccccccatgtaggtcccttggctggaaaaggaagaaggagtggtcagatgaatctgaggaggagccggagaaggagctcgcccctgagcctgaggagacctgggtagtggagatgctgtgtgggctcaagatgaagctgaagcaacagcgagtgtcacccatcctccctgagcaccacaaggacttcaacagtcagcttgcccctggggtagatcccagccccccgcataggtccttttgctggaaaaggaagagggagtggtgggacgaatctgaggagtcgttggaggaggagccacggaaggtgctcgcccctgagcctgaggagatctgggtggtggagatgctgtgtggcctcaagatgaagctgaagcgacggcgagtgtcgctcgtgctccctgagcaccacgaggccttcaacaggctgcttgaggatcctgtcattaaaagattcctggcctgggacaaagatctgagggtgtcggacaagtatctcctggctatggtcatagcgtatttcagccgggccggcctcccctcctggcaataccaacgcattcatttcttcctggctctctacctggccaatgacatggaggaggacgacgaggaccccaaacaaaacatcttctacttcctgtatgggaagacccgctctcgcatacccttggtccgtaaccgtcggttccagttatgccgttgcatgaacccgagggccaggaagaaccgctctcagatagccctgttccagaaacttcggttccagttcttctgttccatgagcggcagggcttgggtttcccgggaggagttggaggagatccaggcttatgacccagagcactgggtgtgggcgcgagatcgcgctcgcctttcctagagctccagggaccgtggaggcctgaggtcatcggcctgagagaaggtacatctgcatcctccggggtaaaggcagaatattggggtctattttggaaatccgaggaacccaattgcttgatccggcttcaagcctgggcaacgtggcgagattcccctctccacaaaaatacaaaaattagccaggcgacgtgggatgcatctctactcccaactactcaggaggctgaggcgggaggatcgctggagcctggaaggtcggggctgcacggagccctgatcctgccactgcactccagtctgggcgacagagtgagaccctgcctcaaaaagaatcataaatactgagtttggggaggttcattatgactgacgcacttgagttaccgatttgggtcgagggttcagtgaagctttggtttacatcttgtgcagctaaccacggtgagcacagagcatgagacttcatcatgaggaggtaggattaaggattaggcttctggactcgtggtttgtgatgttgtcacattagaaacacatctagcatggttacaagtttagatcttaagtgacacaaaaggccccagctgtgatgaagtccaaagccacattctctgagggtgccctactccctgggcagacccacccaaagtccttgctatgaagcagatcactggggctgaccttgggtgtattaagtgagttttggagtcgtggtcaccaaagtgtgagtttcacagttgaacacgatggttcagaagcagggtatagaatgaaaggcagcagataaaattgcatttctcaattgctctgaactctagacttgacatgggacgtgaataaccttcctgtctagagagctgcctccttgaagtgtgacattgtctctctcacttccagaacaccggacccacgggagatgtggattttcagcaggaactttattccaatgctaatggcagtcaacaggaaagaggagaggaaccatttgtgcagatcatctagaagaacctggaccattcttgatggagctgaatacagtgatcacgttgtcctcctgggagcaggggtggggggaggggggtggggtccttctaggagtccttggagaaaagtaagaaaccaggagtgtttccagttccaccctttcctgcggcaccaccaccctttttatattgctgaatgccaacctccctggggcggaacctgaggtcctgtttcttacggacttggttgccacagtccaggagcatttgaaggcacaatgcaggggctcagattggcacagaattcttttgtgaaatatcagtgccacagattgtaacagatagcttcatgcacactctgcattttattggtttgtttggaaaatgttggccattgaattattcatagatttatttcaaatagtttggaaattgttgtacttttgaaaacatgctgttcctgtagttttttgatgagagttatagttgttatatatacataaagataattttcttttcatttttaagagacaattctttttatcctaaatattttattatctttaaatttgtttctgtattattatatgtgctcctgaagtgagcactctttttatctatgatatttccataataatctcttctatttatagctattggtagttccccaccagaaaaaaacataattctggtgatagaaatttttatttgctgtttaggtctgtgactgaattgtgagaattcagttgtgatttttaacatgtctcagatatatatactaacacgtctaatatatactatctaatttattggtttattttgaaaaacatgggtatagaattatttaaatattattttatttattgaaatattaaatatatttatttatttgaatattattacttgaaatattattttaaatattttggaaatactggtatttttgaatagatgctgtttctataaagctgtgtgatgggtgttataactgttatatacacatacgtataattttgctttcctttttaagagaggattcttttcatcctaaatcttttacctttcaatctttgtatctattattacacgtgctgctgaagggagcatggtttttatctatgatacttagttaacatatatattacatttatagctatgtagtagttcccctaaattcttgtaaaaataaatttttatttgatatttcatatatgtttgaaatgtgagaattcagatgtaattttttaccttgttttggcatctttgtatgttactttaaagaggatgtgtgttctaaaggaggacatgagctgtgtgttttcaagagaacaatagagtgcgtctcttggggaaacataataaaaatgaacttttctcaccttcacagcaa

SEQ ID NO: 185393 - DNA, 3440 bp, Homo sapiens
  Payload ID: 16508
  Gene Symbol: SPDYE16
  Gene Name: speedy/RINGO cell cycle regulator family member E16
  ENST ID: ENST00000633523
  CDS Start-End: 1-1059
atggacagaacggagactaggttccgtaagaggggacagattaagggaaagatcacgaccagccgtcaaccgcacccccagaatgagcagagtccccagcggagcacctcggggtactccctccaggaggtggtggatgatgaagtgttgggatcatcagcccctggggtagatcccagccccccatgtaggtcccttggctggaaaaggaagaaggagtggtcagatgaatctgaggaggagccggagaaggagctcgcccctgagcctgaggagacctgggtagtggagatgctgtgtgggctcaagatgaagctgaagcaacagcgagtgtcacccatcctccctgagcaccacaaggacttcaacagtcagcttgcccctggggtagatcccagccccccgcataggtccttttgctggaaaaggaagagggagtggtgggacgaatctgaggagtcgttggaggaggagccacggaaggtgctcgcccctgagcctgaggagatctgggtggcggagatgctgtgtggcctcaagatgaagctgaagcgacggcgagtgtcgctcgtgctccctgagcaccacgaggccttcaacaggctgcttgaggatcctgtcattaaaagattcctggcctgggacaaagatctgagggtgtcggacaagtatctcctggctatggtcatagcgtatttcagccgggccggcctcccctcctggcaataccaacgcattcatttcttcctggctctctacctggccaatgacatggaggaggacgacgaggaccccaaacaaaacatcttctacttcctgtatgggaagacccgctctcgcatacccttggtccgtaaccgtcggttccagctatgccgttgcttgaacccgagggccaggaagaaccgctctcagatagccctgttccagaaacttcggttccagttcttctgttccatgagcggcagggcttgggtttcccgggaggagttggaggagatccaggcttatgacccagagcactgggtgtgggcgcgagatcgcgctcgcctttcctagagctccagggaccgtggaggcctgaggtcatcggcctgagagaaggtacatctgcatcctccggggtaaaggcagaatattggggtctattttggaaatccgaggaacccaattgcttgatccggcttcaagcctgggcaacgtggcgagatcccctctccacaaaaatacaaaaattagccaggcgatgtgggacgcatctctactcccaactactcaggaggctgaggcgggaggatcgctggagcctggaaggttggggctgcacggagccctgatcctgccactgcactccagtctgggcgacagagtgagaccctgcctcaaaaagaatcataaatactgagtttggggaggttcattatgattgacgcacttgagttaccgatttgggtcgagggttcagtgaagctttggtttacatcttgtgcagctaaccacggtgagcacagagcatgagacttcatcatgaggaggtaggattaaggattaggcttctggactcgtggttcgtgatgttgtcacattagaaacacatctagcatggttacaagtttagatcttaagtgacacaaaaggccccagctgtgatgaagtccaaagccacattctctgagggtgccctactccctgggcagacccacccaaagtccttgctatgaagcagatcactggggctgaccttgggtgtattaagtgagttttggagtcgtggtcaccaaagtgtgagtttcacagttgaacacgatggttcagaagcagggtatagaatgaaaggcagcagataaaattgcatttctcaattgctctgaactctagacttgacatgggacgtgaataaccttcctgtctagagagctgcctccttcaagtgtgacattgtctctctcacttccagaacaccggacccaggggagatgtggattttcagcaggaactttattccaatgctaatggcagacaacaggaaagaggagaggaaccatttgtgcagatcatctagaagaacctggaccattcttgatggagctgaatacagtgatcacgttgtcctcctgggagcaggggtggggggaggggggtggggtccttctaggagtccttggagaaaagtaagaaaccaggagtgtttccagttccaccctttcctgcggcaccaccaccctttctatattgctgaattccaacctccctgggccggaacctggaggtcctgtttcttacagacttggttgccacagtccaggagcatttgaaggcacaatgcaggggctcagattggcacagaattcttttgtgaaatatcagtgccacagattgtaacagatagcttcatgcacactctgcattttattggtttgtttggaaatgttggccattgaattattcatagatttatttcaaatagtttggaaattgttgtacttttgaaaacatgctgttcctgtagttttttgatgagagttatagttgttatatatacataaagataattttcttttcatttttaagagacaattctttttatcctaaatattttattatctttaaatttctttctgtattattatatgcgctcctgaagcgagcactctttttatctatgatacttccataaaaatctcttctatttatagctattggtagttccccaccacaaaaaaacataattctggtgatagaaatttttatttgctgtttaggtttgtgactgaattgtgagaattcagttgtgatttttaacatgtctcagatatatatactaacacgtctaatacatactatctaatttattggtttattttgaaaaacatgggtatagaattatttaaatattattttatttattgaaatatttattaaatatatttatttatttaaatattattattactttaaatattattttaaatattttggaaatactggtatttttgaatagatgctgtttctataaagctgtgtgatgggtgttataactgttatatacacatacatataattttgttttcctttttaagagaggattcttttcatcctaaatcttttacctttcaatctttgtatctattattacacgtgctgctgaagggagcatggtttttatctgtgatacttagttaacatatatattacatttatagctatgtagtagttcccctaaattcttgtaaaaataaatttttatttgatatttcatatatgtttgaaatgtgagaattcagatgtaattttttaccttgttttggcatctttgtatgttactttaaagaggatgtgtgttctaaaggaggacatgagctgtgtgttttcaagagaacaatagagtgcgtgtcttggggaaacataataaaaatgaacttttctcaccttcacagcaa

SEQ ID NO: 185394 - DNA, 858 bp, Homo sapiens
  Payload ID: 16508
  Gene Symbol: SPDYE16
  Gene Name: speedy/RINGO cell cycle regulator family member E16
  ENST ID: ENST00000515340
  CDS Start-End: 1-858
atgcagaagcattacacggtggcctggtttctttactcagcccctggggtagatcccagccccccatgtaggtcccttggctggaaaaggaagaaggagtggtcagatgaatctgaggaggagccggagaaggagctcgcccctgagcctgaggagacctgggtagtggagatgctgtgtgggctcaagatgaagctgaagcaacagcgagtgtcacccatcctccctgagcaccacaaggacttcaacagtcagcttgcccctggggtagatcccagccccccgcataggtccttttgctggaaaaggaagagggagtggtgggacgaatctgaggagtcgttggaggaggagccacggaaggtgctcgcccctgagcctgaggagatctgggtggtggagatgctgtgtggcctcaagatgaagctgaagcgacggcgagtgtcgctcgtgctccctgagcaccacgaggccttcaacaggctgcttgaggatcctgtcattaaaagattcctggcctgggacaaagatctgagggtgtcggacaagtatctcctggctatggtcatagcgtatttcagccgggccggcctcccctcctggcaataccaacgcattcatttcttcctggctctctacctggccaatgacatggaggaggacgacgaggaccccaaacaaaacatcttctacttcctgaagaaccgctctcagatagccctgttccagaaacttcggttccagttcttctgttccatgagcggcagggcttgggtttcccgggaggagttggaggagatccaggcttatgacccagagcactgggtgtgggcgcgagatcgcgctcgcctttcctag

SEQ ID NO: 185395 - DNA, 1219 bp, Homo sapiens
  Payload ID: 16509
  Gene Symbol: SPDYE2
  Gene Name: speedy/RINGO cell cycle regulator family member E2
  ENST ID: ENST00000341656
  CDS Start-End: 145-921
gggaggatggagagtggtttggggttttgggtcgggctctagtgtgatcaactgcagaagcattacaccgtggcctggtttctttactcagcccctggggtagatcccagccccccgcataggtccttttgctggaaaaggaagatggagtggtgggacgaatctgaggagtcgttggaggaggagccacggaaggtgctcgcccctgagcctgaggagatctgggtggcggagatgctgtgtggcctcaagatgaagctgaagcgacggcgagtgtcgctcgtgctccctgagcaccacgaggccttcaacaggctgcttgaggatcctgtcattaaaagattcttggcctgggacaaagatctgagggtgtcggacaagtatctcctggctatggtcatagcgtatttcagccgggccggcttcccctcctggcaataccaacgcattcatttcttcctggctctctacctggccaatgacatggaggaggacgacgaggactccaaacaaaacatcttccacttcctgtataggaagaaccgctctcgcatacccttgctccgtaagccttggttccagttaggccattccatgaacccgagggccaggaagaaccgctctcgcatacccttgctccgtaagcgtcggttccagttataccgttccacgaacccgagggccaggaagaaccgctctcgcatacccttgctccgtaagcgtcggttccagttataccgttccatgaactcgagggccaggaagaaccgctctcagatagtcctgttccagaaacgacggttccacttcttctgttccatgagctgcagggcttgggtttccccagaggagttggaggagatccaggcttatgacccagagcactgggtgtgggcgcgagatcgcgctcacctttcctagagctccagggaccggggaggcctgaggtcatcggcctgagagaagaacaccggacccaggggagatgtggattttcagcgggaactttattccaatgctaatggcagacaccaggcaggaggagaggaaccatttgtgcagatcatctagaagaacctggaccattcttgatggagctgaatacagtgatcacgttgtcctcctaggagcaggggtggggggaggggggtggggtccttctaggagtccttggagaaaagtaagaaaccaggagcgtttccagttccaccctttcctg

SEQ ID NO: 185396 - DNA, 1209 bp, Homo sapiens
  Payload ID: 16509
  Gene Symbol: SPDYE2
  Gene Name: speedy/RINGO cell cycle regulator family member E2
  Uniprot ID: Q495Y8
  ENST ID: ENST00000432940
  CDS Start-End: 1-1209
atggacagaacggagactaggttccgtaagaggggacagattacgggaaagatcacgaccagccgtcaaccgcacccccagaatgagcagagtccccagcggagcacctcggggtaccccctccaggaggtggtggatgatgaaatgttgggaccatcagcccctggggtagatcccagccccccatgtaggtcccttggctggaaaaggaagagggagtggtcagatgaatctgaggaggagccggagaaggagctcgcccctgagcctgaggagacctgggtagtggagatgctgtgtgggctcaagatgaagctgaagcaacagcgagtgtcacccatcctccctgagcaccacaaggacttcaacagtcagcttgcccctggggtagatcccagccccccgcataggtccttttgctggaaaaggaagatggagtggtgggacgaatctgaggagtcgttggaggaggagccacggaaggtgctcgcccctgagcctgaggagatctgggtggcggagatgctgtgtggcctcaagatgaagctgaagcgacggcgagtgtcgctcgtgctccctgagcaccacgaggccttcaacaggctgcttgaggatcctgtcattaaaagattcttggcctgggacaaagatctgagggtgtcggacaagtatctcctggctatggtcatagcgtatttcagccgggccggcttcccctcctggcaataccaacgcattcatttcttcctggctctctacctggccaatgacatggaggaggacgacgaggactccaaacaaaacatcttccacttcctgtataggaagaaccgctctcgcatacccttgctccgtaagccttggttccagttaggccattccatgaacccgagggccaggaagaaccgctctcgcatacccttgctccgtaagcgtcggttccagttataccgttccacgaacccgagggccaggaagaaccgctctcgcatacccttgctccgtaagcgtcggttccagttataccgttccatgaactcgagggccaggaagaaccgctctcagatagtcctgttccagaaacgacggttccacttcttctgttccatgagctgcagggcttgggtttccccagaggagttggaggagatccaggcttatgacccagagcactgggtgtgggcgcgagatcgcgctcacctttcctag

SEQ ID NO: 185397 - DNA, 1742 bp, Homo sapiens
  Payload ID: 16509
  Gene Symbol: SPDYE2
  Gene Name: speedy/RINGO cell cycle regulator family member E2
  Uniprot ID: Q495Y8
  ENST ID: ENST00000507918
  CDS Start-End: 475-1683
agcagagacagaccccagatctgggcccaggactttgtgcagggaggggaaatactggactctgaaatgggcatgtacagagacgaagagaccccaacatgcttcaggctttgagtggagaggacacagcctctgctgggacagggaatagagggatgtggagtccctgaagatgcttttggacaatggtctgaggttgggacagtggcaggagataccattcacccaggatctccaggacaagagatcagcctggcagttacatgtgttttttttcaaactggttgccaggttggcatgaacgatgacatcagagattccgaccttcctgattggagggaccggactccgtggtgcctggagatcagttggacaacagtatcttctcagagctgttctctactcctgacttctcctaggcttgagaattgataacatactcttctggatcctagaagtgtccagaagaaggccatggacagaacggagactaggttccgtaagaggggacagattacgggaaagatcacgaccagccgtcaaccgcacccccagaatgagcagagtccccagcggagcacctcggggtaccccctccaggaggtggtggatgatgaaatgttgggaccatcagcccctggggtagatcccagccccccatgtaggtcccttggctggaaaaggaagagggagtggtcagatgaatctgaggaggagccggagaaggagctcgcccctgagcctgaggagacctgggtagtggagatgctgtgtgggctcaagatgaagctgaagcaacagcgagtgtcacccatcctccctgagcaccacaaggacttcaacagtcagcttgcccctggggtagatcccagccccccgcataggtccttttgctggaaaaggaagatggagtggtgggacgaatctgaggagtcgttggaggaggagccacggaaggtgctcgcccctgagcctgaggagatctgggtggcggagatgctgtgtggcctcaagatgaagctgaagcgacggcgagtgtcgctcgtgctccctgagcaccacgaggccttcaacaggctgcttgaggatcctgtcattaaaagattcttggcctgggacaaagatctgagggtgtcggacaagtatctcctggctatggtcatagcgtatttcagccgggccggcttcccctcctggcaataccaacgcattcatttcttcctggctctctacctggccaatgacatggaggaggacgacgaggactccaaacaaaacatcttccacttcctgtataggaagaaccgctctcgcatacccttgctccgtaagccttggttccagttaggccattccatgaacccgagggccaggaagaaccgctctcgcatacccttgctccgtaagcgtcggttccagttataccgttccacgaacccgagggccaggaagaaccgctctcgcatacccttgctccgtaagcgtcggttccagttataccgttccatgaactcgagggccaggaagaaccgctctcagatagtcctgttccagaaacgacggttccacttcttctgttccatgagctgcagggcttgggtttccccagaggagttggaggagatccaggcttatgacccagagcactgggtgtgggcgcgagatcgcgctcacctttcctagagctccagggaccggggaggcctgaggtcatcggcctgagagaagaacaccggacccag

SEQ ID NO: 185398 - DNA, 1219 bp, Homo sapiens; identical to SEQ ID NO: 185395
  Payload ID: 16510
  Gene Symbol: SPDYE2B
  Gene Name: speedy/RINGO cell cycle regulator family member E2B
  Uniprot ID: A6NHP3
  ENST ID: ENST00000455020
  CDS Start-End: 145-921

SEQ ID NO: 185399 - DNA, 1742 bp, Homo sapiens
  Payload ID: 16510
  Gene Symbol: SPDYE2B
  Gene Name: speedy/RINGO cell cycle regulator family member E2B
  Uniprot ID: A6NHP3
  ENST ID: ENST00000507450
  CDS Start-End: 475-1683
agcagagacagaccccagatctgggcccaggactttgtgcagggaggggaaatactggactctgaaatgggcatgtacagagacgaagagaccccaacatgcttcaggctttgagtggagaggacacagcctctgctgggacagggaatagagggatgtggagtccctgaagatgcttttggacaatggtctgaggttgggacagtggcaggagataccattcacccaggatctccaggacaagagatcagcctggcagttacatgtgttttttttcaaactggttgccaggttggcatgaacgatgacatcagagattccgaccttcctgattggagggaccggactccgtggtgcctggagatcagttggacaacagtatcttctcagagctgttctctactcctgacttctcctaggcttgagaattgataacatactcttctggatcctagaagtgtccagaagaaggccatggacagaacggagactaggttccgtaagaggggacagattacgggaaagatcacgaccagccgtcaaccgcacccccagaatgagcagagtccccagcggagcacctcggggtaccccctccaggaggtggtggatgatgaaatgttgggaccatcagcccctggggtagatcccagccccccatgtaggtcccttggctggaaaaggaagagggagtggtcagatgaatctgaggaggagccggagaaggagctcgcccctgagcctgaggagacctgggtagtggagatgctgtgtgggctcaagatgaagctgaagcaacagcgagtgtcatccatcctccctgagcaccacaaggacttcaacagtcagcttgcccctggggtagatcccagccccccgcataggtccttttgctggaaaaggaagatggagtggtgggacgaatctgaggagtcgttggaggaggagccacggaaggtgctcgcccctgagcctgaggagatctgggtggcggagatgctgtgtggcctcaagatgaagctgaagcgacggcgagtgtcgctcgtgctccctgagcaccacgaggccttcaacaggctgcttgaggatcctgtcattaaaagattcttggcctgggacaaagatctgagggtgtcggacaagtatctcctggctatggtcatagcgtatttcagccgggccggcttcccctcctggcaataccaacgcattcatttcttcctggctctctacctggccaatgacatggaggaggacgacgaggactccaaacaaaacatcttccacttcctgtataggaagaaccgctctcgcatacccttgctccgtaagccttggttccagttaggccattccatgaacccgagggccaggaagaaccgctctcgcatacccttgctccgtaagcgtcggttccagttataccgttccacgaacccgagggccaggaagaaccgctctcgcatacccttgctccgtaagcgtcggttccagttataccgttccatgaactcgagggccaggaagaaccgctctcagatagtcctgttccagaaacgacggttccacttcttctgttccatgagctgcagggcttgggtttccccagaggagttggaggagatccaggcttatgacccagagcactgggtgtgggcgcgagatcgcgctcacctttcctagagctccagggaccggggaggcctgaggtcatcggcctgagagaagaacaccggacccag

SEQ ID NO: 185400 - DNA, 1209 bp, Homo sapiens
  Payload ID: 16510
  Gene Symbol: SPDYE2B
  Gene Name: speedy/RINGO cell cycle regulator family member E2B
  Uniprot ID: A6NHP3
  ENST ID: ENST00000436228
  CDS Start-End: 1-1209
atggacagaacggagactaggttccgtaagaggggacagattacgggaaagatcacgaccagccgtcaaccgcacccccagaatgagcagagtccccagcggagcacctcggggtaccccctccaggaggtggtggatgatgaaatgttgggaccatcagcccctggggtagatcccagccccccatgtaggtcccttggctggaaaaggaagagggagtggtcagatgaatctgaggaggagccggagaaggagctcgcccctgagcctgaggagacctgggtagtggagatgctgtgtgggctcaagatgaagctgaagcaacagcgagtgtcatccatcctccctgagcaccacaaggacttcaacagtcagcttgcccctggggtagatcccagccccccgcataggtccttttgctggaaaaggaagatggagtggtgggacgaatctgaggagtcgttggaggaggagccacggaaggtgctcgcccctgagcctgaggagatctgggtggcggagatgctgtgtggcctcaagatgaagctgaagcgacggcgagtgtcgctcgtgctccctgagcaccacgaggccttcaacaggctgcttgaggatcctgtcattaaaagattcttggcctgggacaaagatctgagggtgtcggacaagtatctcctggctatggtcatagcgtatttcagccgggccggcttcccctcctggcaataccaacgcattcatttcttcctggctctctacctggccaatgacatggaggaggacgacgaggactccaaacaaaacatcttccacttcctgtataggaagaaccgctctcgcatacccttgctccgtaagccttggttccagttaggccattccatgaacccgagggccaggaagaaccgctctcgcatacccttgctccgtaagcgtcggttccagttataccgttccacgaacccgagggccaggaagaaccgctctcgcatacccttgctccgtaagcgtcggttccagttataccgttccatgaactcgagggccaggaagaaccgctctcagatagtcctgttccagaaacgacggttccacttcttctgttccatgagctgcagggcttgggtttccccagaggagttggaggagatccaggcttatgacccagagcactgggtgtgggcgcgagatcgcgctcacctttcctag

SEQ ID NO: 185401 - DNA, 3185 bp, Homo sapiens
  Payload ID: 16511
  Gene Symbol: SPDYE3
  Gene Name: speedy/RINGO cell cycle regulator family member E3
  Uniprot ID: A6NKU9
  ENST ID: ENST00000332397
  CDS Start-End: 185-1834
ctctgtcggcgcctggcagttcaggtgaacaacagtaacttctcagagctgttctccactcctgacttctcccagcctcgagaattgataacacactcttctggatcccagcagtgtccagaagaagaccaaggacagaacagagactagcttcggtgagattggacagattttgggaaagatcatgacgagccatcaaccgcagccccaggaagagcagagcccccagcggagcacctcagggtaccccctccaggaggtggtggatgatgaagtgtcgggaccatcagcccctggggtagatcccagccccccacgtaggtcccttggctgcaaaaggaagagggagtgtttggatgaatctgatgatgagccagagaaggagctcgcccctgagcctgaggagacctgggtggcggagacgctgtgtggcctcaagatgaaggcgaagcgacggcgagtgtcgctcgtgctccctgagtactacgaggccttcaacaggctgcttgcccctggggtagatcccagccccccacgtaggtcccttggctgcaaaaggaagagggagtgtttggatgaatctgatgatgagccagagaaggagctcgcccctgagcctgaggagacctgggtggcggagacgctgtgtggcctcaagatgaaggcgaagcgacggcgagtgtcgctcgtgctccctgagtactacgaggccttcaacaggctgcttgcccctggggtagatcccagccccccacgtaggtcccttggctgcaaaaggaagagggagtgtttggatgaatctgatgatgagccagagaaggagctcgcccctgagcctgaggagacctgggtggcagagacgctgtgtggcctcaagatgaaggcgaagcgacggcgagtgtcgctcgtgctccctgagtactacgaggccttcaacaggctgcttgcccctggggtagatcccagccccccacgtaggtcccttggctgcaaaaggaagagggagtgtttggatgaatctgatgatgagccagagaaggagctcgcccctgagcctgaggagacctgggtggcggagacgctgtgtggcctcaagatgaaggcgaagcgacggcgagtgtcgctcgtgctccctgagtactacgaggccttcaacaggctgcttgcccctggggtagatcccagccccccgcgtaggtcccttggctgcaaaaggaagagggagtgtttggatgaatctgatgatgagccagagaaggagctcgcccctgagcctgaggagacctgggtggcggagacgctgtgtggcctcaagatgaaggcgaagcgacggcgagtgtcgctcgtgctccctgagtactacgaggccttcaacaggctgcttgaggatcctgtcattaaaagattcctggcctgggacaaagatctgagggtgtcagacaagtatctcctggctatggtcatagcgtatttcagccgggccggcctcccctcctggcaataccaacgcattcatttcttcctggctctctatctggccaatgacatggaggaggacgacgaggcccccaaacaaaagatcttctacttcctgtacgggaagacccactctcacatacccttgcgccctaagcattggttccagttatgccgtcccatgaacccgagggccaggaagaactgctctcagatagccttgttccagaagcgtcggttccagttcttctgttccatgcgctgcagggcttgggtttccccggaggagttggaggagatccaggcttatgacccagagcactgggtgtgggcgcgagatcgcgcccacctttcctagagctccagggaccgtggaggcctgaggtcatcggcctgagagaagaacaccggacccaggggagatgtggattttcagcaggaactttattccagtgctaatggcagacatcaggaaggaggagaggagccatttgtgcagatcatctagaagaacctggaccattcttgacagagctgaatacagtgatcacgttgtcctccaaggagcaggggtggggtggggtacttctaggagtccttggagaaaagtaagaaaccaggagtgtttccagttccaccctttcctgcggcaccacctccctttttatattgctgaatgccaacctccctggggcggaacctggaggtcctgtttcttacggacttggttgccacagtccaggagcatttgaaggcacagtgcaggggctcagattggcacagaattctttgtgaaatatgagtgccacagactgtaacagatagcttcatgcacactatgcattttattggtttgtttggaaaatgttggccattgaatcattaataggtttatttcaaatagtttggaaattgttgtacttttgaaaacatgctgttcctgtagagttttttgatgagagttatagttgttatatatacataaagataattttcttttcatttttaagtgagaattctttttatcctaaatcttttattatctttaaatttttctctgtattattatatgtgctcctgaagcgagcactctttttatctatgatacttccataataatctcttctatttatagctattggtagttcccccaaattctggtcatagaaatttttatttgctgtttaggtttgtgactgaattgtgagaattcagttgtgatttttaacatgtcttagatatatatactaacatgtctaatatatactatctattttattgatttatttcgaaaaagatgggcaaagaattatttaaatattattttatttatttaaatatttattaaatatatttatttatttaaatatttattaaatatatttatttatttaaatgttattactttaaatattattttaaatattttggaaatactggtatttttgaatagatgctgtttctataaagctgtgtgatgggtattataactgttatatacacataaatataattttgttttcctttttaagagaggattctttttatcctaaatcttttacctttcaatctttgtatctattactacatatgctgctgaagggagcagactttttatctatgatacttagttaatgtatatattacatttatagctatgtggtagttcccctaaattcttgtaaaaataaatttttatttgatattta

SEQ ID NO: 185402 - DNA, 923 bp, Homo sapiens
  Payload ID: 16512
  Gene Symbol: SPDYE4
  Gene Name: speedy/RINGO cell cycle regulator family member E4
  Uniprot ID: A6NLX3
  ENST ID: ENST00000328794
  CDS Start-End: 178-891
tgcttgggagttcaggtggacaacagcaacttctcagaactactcttcactcctaacttctcccgagcctctagaagagaaacgcactcttctgggtcctaacggagtctggaagaaggctttggacagaacagggactaggttttgtggacagaaacaaagtgtttgggagagattatggccagtggtcaagcgcgccccccgtttgaggaggagagcccccagcctagcacaacggtacggtcccccgaggtggtggtggatgatgaagtgccaggaccatcagccccttggatagatcccagcccccagcctcaatcccttggcctgaaaaggaagagcgaatggtcagacgaatccgaggaggagctggaggaggagctggagttggagcgcgcccctgagcccgaggacacctgggtggtggagacgctgtgtgggctcaagatgaagctgaagcgaaagcgagcatcctccgtgctccctgagcaccacgaggccttcaacaggctccttggggatcctgtcgttcaaaaattcctggcctgggacaaagacctgagggtgtcagacaagtatctcctggctatggtcatagcgtattttagccgtgccggcctcttctcgtggcaataccaacgcattcatttcttcctggctctctacctggccagtgacatggaggaggacaaccaggccccgaaacaagacatcttctccttcctctacgggaagaactactcccagcgacccttgttccataagcttcgataccagctcctctgttccatgcgctggaggacgtgggtttccccagaggagatggaggagatccaggcttatgacccagagcactgggtgtgggcccgagatcgcaccctcatttcctagagctccggggacatggaggcctgaggtcatcg

SEQ ID NO: 185403 - DNA, 406 bp, Homo sapiens
  Payload ID: 16512
  Gene Symbol: SPDYE4
  Gene Name: speedy/RINGO cell cycle regulator family member E4
  ENST ID: ENST00000580999
  CDS Start-End: 1-275
agcgcgcccctgagcccgaggacacctgggtggtggagacgctgtgtgggctcaagatgaagctgaagcgaaagcgagcatcctccgtgctccctgagcaccacgaggccttcaacaggctccttggggatcctgtcgttcaaaaattcctggcctgggacaaagacctgagggtgtcagacaagtatctcctggctatggtcatagcgtattttagccgtgccggcctcttctcgtggcaataccaacgcattcatttcttcctggctctgtgagtagtttgcttcttcccatctgtcaatatccaacaccctgggacagtggacgaagtgggattccaaccttccatctatttttttaccctacttctcctctttactctgtatataaaaacgataagattata

SEQ ID NO: 185404 - DNA, 928 bp, Homo sapiens
  Payload ID: 16512
  Gene Symbol: SPDYE4
  Gene Name: speedy/RINGO cell cycle regulator family member E4
  ENST ID: ENST00000582989
  CDS Start-End: 178-303
tgcttgggagttcaggtggacaacagcaacttctcagaactactcttcactcctaacttctcccgagcctctagaagagaaacgcactcttctgggtcctaacggagtctggaagaaggctttggacagaacagggactaggttttgtggacagaaacaaagtgtttgggagagattatggccagtggtcaagcgcgccccccgtttgaggaggagagcccccagcctagcacaacggtacggtcccccgaggtggtggtggatgatgaagtgccaggaccatcaggtgagccccttggatagatcccagcccccagcctcaatcccttggcctgaaaaggaagagcgaatggtcagacgaatccgaggaggagctggaggaggagctggagttggagcgcgcccctgagcccgaggacacctgggtggtggagacgctgtgtgggctcaagatgaagctgaagcgaaagcgagcatcctccgtgctccctgagcaccacgaggccttcaacaggctccttggggatcctgtcgttcaaaaattcctggcctgggacaaagacctgagggtgtcagacaagtatctcctggctatggtcatagcgtattttagccgtgccggcctcttctcgtggcaataccaacgcattcatttcttcctggctctctacctggccagtgacatggaggaggacaaccaggccccgaaacaagacatcttctccttcctctacgggaagaactactcccagcgacccttgttccataagcttcgataccagctcctctgttccatgcgctggaggacgtgggtttccccagaggagatggaggagatccaggcttatgacccagagcactgggtgtgggcccgagatcgcaccctcatttcctagagctccggggacatggaggcctgaggtcatcg

SEQ ID NO: 185405 - DNA, 1700 bp, Homo sapiens
  Payload ID: 16513
  Gene Symbol: SPDYE5
  Gene Name: speedy/RINGO cell cycle regulator family member E5
  ENST ID: ENST00000625065
  CDS Start-End: 424-1632
agactggactctgaaatgggcatgtacagagacaaagagaccccaacatgcttcaggctttgagtggagaggacacagcctctgctgggacagggaacagagggatgtggagtccctgaagatgcttttggacaatggtctgaggttgggacagtggcaggagataccattcacccaggatctccaggacaagagatcagcctggcagttacatgtgttttttttcaaactggttgccaggttggcatgagcgatgacatcagagattccgaccatcctgattggagggaccggactccgtggtgcctggagatcagttggacaacagtatcttctcagagctgttctccactcctgacttctcctaggcttgagaattgataacatactcttctggatcctagcagtgatcagaagaaggccatggacagaacggagactaggttccgtaagaggggacagattacggaaaagatcacgaccagccgtcaaccgcaaccccagaatgagcagagtccccagcggagcacctcggggtaccccctccaggaggtggtggatgatgaagtgttgggaccatcagcccctggggtagatcccagccccccatgtaggtcccttggctggaaaaggaagagggagtggtcagatgaatctgcggaggagccggagaaggagctcgcccctgaacctgaggagacctgggtagtggagatgctgtgtgggctcaagatgaagctgaagcaacagcgagtgtcacccatcctccctgagcaccacaagggcttcaacagtcagcttgcccctggggtagatcccagccccccgcataggtccttttgctggaaaaggaagatggagtggtgggacgaatctgaggagtcgttggaggaggagccacggaaggtgctcgcccctgagcctgaggagatctgggtggcggagatgctgtgtggcctcaagatgaagctgaagcgacggcgagtgtcgctcgtgctccctgagcaccacgaggccttcaacaggctgcttgaggatcctgtcattaaaagattcctggcctgggacaaagatctgagggtgtcggacaagtatctcctggctatggtcatagcgtatttcagccgggccggcttcccctcctggcaataccaacgcattcatttcttcctggctctctacctggccaatgacatggaggaggacgacgaggactccaaacaaaacatcttccacttcctgtatgggaagaaccgctctcgcatacccttgctccgtaagcgttggttccagttaggccgttccatgaacccgagggccaggaagaagcgctctcgcatacccttgctccgtaagcgtcggttccagttaggccgttccatgaacccgagggccaggaagaaccgctctcgcatacccttgctccgtaagcgtcggttccagttaggccgttccatgaacctgagggccaggaagaaccgctctcagatagtcctgttccagaaacgtcggttccagttcttctgttccatgagcggcagggcttgggtttccccggaggagttggaggagatccaggcttatgacccagagcactgggtgtgggcgcgagatcgcgctcacctttcctagagctccagggaccgtggaggcctgaggtcatcggcctgagagaagaacaccggacccaggggagatgt

SEQ ID NO: 185406 - DNA, 2667 bp, Homo sapiens
  Payload ID: 16513
  Gene Symbol: SPDYE5
  Gene Name: speedy/RINGO cell cycle regulator family member E5
  ENST ID: ENST00000624640
  CDS Start-End: 137-1150
ggggaggggaaggagcggcacatggggttgagcagaggagaaaatcagaaagatggcttagagaagccagcagtctgcgagtctggggaggatggagagtggtttggggttttgggtcggggtctaaggtgatcagatgcagaagcattacacggtggcctggtttctttactcagcccctggggtagatcccagccccccatgtaggtcccttggctggaaaaggaagagggagtggtcagatgaatctgcggaggagccggagaaggagctcgcccctgaacctgaggagacctgggtagtggagatgctgtgtgggctcaagatgaagctgaagcaacagcgagtgtcacccatcctccctgagcaccacaagggcttcaacagtcagcttgcccctggggtagatcccagccccccgcataggtccttttgctggaaaaggaagatggagtggtgggacgaatctgaggagtcgttggaggaggagccacggaaggtgctcgcccctgagcctgaggagatctgggtggcggagatgctgtgtggcctcaagatgaagctgaagcgacggcgagtgtcgctcgtgctccctgagcaccacgaggccttcaacaggctgcttgaggatcctgtcattaaaagattcctggcctgggacaaagatctgagggtgtcggacaagtatctcctggctatggtcatagcgtatttcagccgggccggcttcccctcctggcaataccaacgcattcatttcttcctggctctctacctggccaatgacatggaggaggacgacgaggactccaaacaaaacatcttccacttcctgtatgggaagaaccgctctcgcatacccttgctccgtaagcgttggttccagttaggccgttccatgaacccgagggccaggaagaaccgctctcgcatacccttgctccgtaagcgtcggttccagttaggccgttccatgaacctgagggccaggaagaaccgctctcagatagtcctgttccagaaacgtcggttccagttcttctgttccatgagcggcagggcttgggtttccccggaggagttggaggagatccaggcttatgacccagagcactgggtgtgggcgcgagatcgcgctcacctttcctagagctccagggaccgtggaggcctgaggtcatcggcctgagagaagaacaccggacccaggggagatgtggattttcagcaggaactttattccaatgctaatggcagacaccaggaaggaggagaggaaccatttgtgcagatcatctagaagaacctggaccattcttgatggagctgaatacagtgatcacgttgtcctcctaggagcaggggtggggggaggggggtggggtccttctaggagtccttggagaaaagtaagaaaccaggagtgtttccagttccaccctttcctgcagcaccaccaccctttctatattgctgaattccaacctccctggggcggaacctggaggtcctgtttcttatggacttggttaccacagtccagaagcatttgaaggcacaatgcaggggctcagattggcacagatttcttctgtgaaatatcagtgccacagattgtaacagatagcttcatgcacactctgcattttattggtttgtttggaaaatgttggccattgaattattcatagatttatttcaaatagtttggaaattgttgtacttttgaaaacatgctgttcctgtagttttttgatgagagttatagttgttatatatacataaagataattttcttttcatttttaagagacaattctttttatcctaaatattttattatctttaaatttctttctgtattattatatgtgctcctgaagcgagcactctttttatctatgatacttccataataatctcttctatttatagctattggtagttccccaccacaaaaaaaacataattctggtgatagaaatttttatttgctgtttaggtttgtgactgaattgtgagaattcagttgtgatttttaacatgtctcagatatatatactaacacgtctaatatatactatctattttattggtttattttgaaaaacatgggtatagaattatttaaatattattttatttattgaaatatttattaaatatatttatttaaatattattacttgaaatattattttaaatatttttgaaatactgctatttttgaatagatgctgtttctataaagctgtgtgatgggtgttataactgttatatacacatacgtataattttgctttcctttttaagagaggattcttttcatcctaaatcttttacctttcaatctttgtatctattattacacgtgttgctgaagggagcatggtttttatctgtgatacttagttaacatatatattacatttatagctatgtagtagttcccctaaattcttgtaaaaataaatttttatttgatatttcatatatgtttgaaatgtgagaattcaggtgtaattttttaccttgttttggcatgtttgtatgttactttaaagaggatgtgtgttctaaaggaggacatgagctgtgtgttttcaagagaacaatagagtgcgtctcttggggaaacataataaaaatgaacttttctcaccttca

SEQ ID NO: 185407 - DNA, 1209 bp, Homo sapiens
  Payload ID: 16513
  Gene Symbol: SPDYE5
  Gene Name: speedy/RINGO cell cycle regulator family member E5
  ENST ID: ENST00000455862
  CDS Start-End: 1-1209
atggacagaacggagactaggttccgtaagaggggacagattacggaaaagatcacgaccagccgtcaaccgcaaccccagaatgagcagagtccccagcggagcacctcggggtaccccctccaggaggtggtggatgatgaagtgttgggaccatcagcccctggggtagatcccagccccccatgtaggtcccttggctggaaaaggaagagggagtggtcagatgaatctgcggaggagccggagaaggagctcgcccctgaacctgaggagacctgggtagtggagatgctgtgtgggctcaagatgaagctgaagcaacagcgagtgtcacccatcctccctgagcaccacaagggcttcaacagtcagcttgcccctggggtagatcccagccccccgcataggtccttttgctggaaaaggaagatggagtggtgggacgaatctgaggagtcgttggaggaggagccacggaaggtgctcgcccctgagcctgaggagatctgggtggcggagatgctgtgtggcctcaagatgaagctgaagcgacggcgagtgtcgctcgtgctccctgagcaccacgaggccttcaacaggctgcttgaggatcctgtcattaaaagattcctggcctgggacaaagatctgagggtgtcggacaagtatctcctggctatggtcatagcgtatttcagccgggccggcttcccctcctggcaataccaacgcattcatttcttcctggctctctacctggccaatgacatggaggaggacgacgaggactccaaacaaaacatcttccacttcctgtatgggaagaaccgctctcgcatacccttgctccgtaagcgttggttccagttaggccgttccatgaacccgagggccaggaagaagcgctctcgcatacccttgctccgtaagcgtcggttccagttaggccgttccatgaacccgagggccaggaagaaccgctctcgcatacccttgctccgtaagcgtcggttccagttaggccgttccatgaacctgagggccaggaagaaccgctctcagatagtcctgttccagaaacgtcggttccagttcttctgttccatgagcggcagggcttgggtttccccggaggagttggaggagatccaggcttatgacccagagcactgggtgtgggcgcgagatcgcgctcacctttcctag

SEQ ID NO: 185408 - DNA, 1691 bp, Homo sapiens
  Payload ID: 16514
  Gene Symbol: SPDYE6
  Gene Name: speedy/RINGO cell cycle regulator family member E6
  ENST ID: ENST00000563237
  CDS Start-End: 422-1630
actggactctgaaatgggcatgtacagagacgaagagaccccaacatgcttcaggctttgagtggagaggacacagcctctgctgggacagggaatagagggatgtggagtccctgaagatgcttttggacaatggtctgaggttgggacagtggcaggagataccattcacccaggatctccaggacaagagatcagcctggcagttacatgtgttttttttcaaactggttgccaggttggcatgaacgatgacatcagagattccgaccttcctgattggagggaccggactccgtggtgcctggagatcagttggacaacagtatcttctcagagctgttctctactcctgacttctcctaggcttgagaattgataacatactcttctggatcctagaagtgtccagaagaaggccatggacagaacggagactaggttccgtaagaggggacagattacgggaaagatcacgaccagccgtcaaccgcacccccagaatgagcagagtccccagcggagcacctcggggtaccccctccaggaggtggtggatgatgaaatgttgggaccatcagcccctggggtagatcccagccccccatgtaggtcccttggctggaaaaggaagagggagtggtcagatgaatctgaggaggagccggagaaggagctcgcccctgagcctgaggagacctgggtagtggagatgctgtgtgggctcaagatgaagctgaagcaacagcgagtgtcatccatcctccctgagcaccacaaggacttcaacagtcagcttgcccctggggtagatcccagccccccgcataggtccttttgctggaaaaggaagatggagtggtgggacgaatctgaggagtcgttggaggaggagccacggaaggtgctcgcccctgagcctgaggagatctgggtggcggagatgctgtgtggcctcaagatgaagctgaagcgacggcgagtgtcgctcgtgctccctgagcaccacgaggccttcaacaggctgcttgaggatcctgtcattaaaagattcttggcctgggacaaagatctgagggtgtcggacaagtatctcctggctatggtcatagcgtatttcagccgggctggcttcccctcctggcaataccaacgcattcatttcttcctggctctctacctggccaatgacatggaggaggacgacgaggactccaaacaaaacatcttccacttcctgtataggaagaaccgctctcgcatacccttgctccgtaagcgttggttccagttaggccattccatgaacccgagggccaggaagaaccgctctcgcatacccttgctccgtaagcgtcggttccagttataccgttccacgaacccgagggccaggaagaaccgctctcgcatacccttgctccgtaagcatcggttccagttataccgttccatgaactcgagggccaggaagaaccgctctcagatagtcctgttccagaaacgacggttccacttcttctgttccatgagctgcagggcttgggtttccccagaggagttggaggagatccaggcttatgacccagagcactgggtgtgggcgcgagatcgcgctcacctttcctagagctccagggaccggggaggcctgaggtcatcggcctgagagaagaacaccggacccaggg

SEQ ID NO: 185409 - DNA, 10782 bp, Homo sapiens
  Payload ID: 16515
  Gene Symbol: SPEG
  Gene Name: SPEG complex locus
  Uniprot ID: Q15772
  ENST ID: ENST00000312358
  CDS Start-End: 133-9936
acaggccgaaggcgggcgggcagcaggaaggcaggccgccggccccccagacttgtctcctagggcaccgtcccgcgggtgcccccgtggccgcccagttccggcgtccccccagcccagctctcagtggccatgcagaaagcccggggcacgcgaggcgaggatgcgggcacgagggcaccccccagccccggagtgcccccgaaaagggccaaggtgggggccggcggcggggctcctgtggccgtggccggggcgccagtcttcctgcggcccctgaagaacgcggcggtgtgcgcgggcagcgacgtgcggctgcgggtggtggtgagcgggacgccccagcccagcctccgctggttccgggatgggcagctcctgcccgcgccggcccccgagcccagctgcctgtggctgcggcgctgcggggcgcaggacgccggcgtgtacagctgcatggcccagaacgagcggggccgggcctcctgcgaggcggtgctcacagtgctggaggtcggagactcagagacggctgaggatgacatcagcgatgtgcagggaacccagcgcctggagcttcgggatgacggggccttcagcacccccacggggggttctgacaccctggtgggcacctccctggacacacccccgacctccgtgacaggcacctcagaggagcaagtgagctggtggggcagcgggcagacggtcctggagcaggaagcgggcagtgggggtggcacccgccgcctcccgggcagcccaaggcaagcacaggcaaccggggccgggccacggcacctgggggtggagccgctggtgcgggcatctcgagctaatctggtgggcgcaagctgggggtcagaggatagcctttccgtggccagtgacctgtacggcagcgcattcagcctgtacagaggacgggcgctctctatccacgtcagcgtccctcagagcgggttgcgcagggaggagcccgaccttcagcctcaactggccagcgaagccccacgccgccctgcccagccgcctccttccaaatccgcgctgctccccccaccgtcccctcgggtcgggaagcggtccccgccgggacccccggcccagcccgcggccacccccacgtcgccccaccgtcgcactcaggagcctgtgctgcccgaggacaccaccaccgaagagaagcgagggaagaagtccaagtcgtccgggccctccctggcgggcaccgcggaatcccgaccccagacgccactgagcgaggcctcaggccgcctgtcggcgttgggccgatcgcctaggctggtgcgcgccggctcccgcatcctggacaagctgcagttcttcgaggagcgacggcgcagcctggagcgcagcgactcgccgccggcgcccctgcggccctgggtgcccctgcgcaaggcccgctctctggagcagcccaagtcggagcgcggcgcaccgtggggcacccccggggcctcgcaggaagaactgcgggcgccaggcagcgtggccgagcggcgccgcctgttccagcagaaagcggcctcgctggacgagcgcacgcgtcagcgcagcccggcctcagacctcgagctgcgcttcgcccaggagctgggccgcatccgccgctccacgtcgcgggaggagctggtgcgctcgcacgagtccctgcgcgccacgctgcagcgtgccccatcccctcgagagcccggcgagcccccgctcttctctcggccctccacccccaagacatcgcgggccgtgagccccgccgccgcccagccgccctctccgagcagcgcggagaagccgggggacgagcctgggaggcccaggagccgcgggccggcgggcaggacagagccgggggaaggcccgcagcaggaggttaggcgtcgggaccaattcccgctgacccggagcagagccatccaggagtgcaggagccctgtgccgccccccgccgccgatcccccagaggccaggacgaaagcaccccccggtcggaagcgggagcccccggcgcaggccgtgcgcttcctgccctgggccacgccgggcctggagggcgctgctgtaccccagaccttggagaagaacagggcggggcctgaggcagagaagaggcttcgcagagggccggaggaggacggtccctgggggccctgggaccgccgaggggcccgcagccagggcaaaggtcgccgggcccggcccacctcccctgagctcgagtcttcggatgactcctacgtgtccgctggagaagagcccctagaggcccctgtgtttgagatccccctgcagaatgtggtggtggcaccaggggcagatgtgctgctcaagtgtatcatcactgccaaccccccgccccaagtgtcctggcacaaggatgggtcagcgctgcgcagcgagggccgcctcctcctccgggctgagggtgagcggcacaccctgctgctcagggaggccagggcagcagatgccgggagctatatggccaccgccaccaacgagctgggccaggccacctgtgccgcctcactgaccgtgagacccggtgggtctacatcccctttcagcagccccatcacctccgacgaggaatacctgagccccccagaggagttcccagagcctggggagacctggccgcgaacccccaccatgaagcccagtcccagccagaaccgccgttcttctgacactggctccaaggcaccccccaccttcaaggtctcacttatggaccagtcagtaagagaaggccaagatgtcatcatgagcatccgcgtgcagggggagcccaagcctgtggtctcctggctgagaaaccgccagcccgtgcgcccagaccagcggcgctttgcggaggaggctgagggtgggctgtgccggctgcggatcctggctgcagagcgtggcgatgctggtttctacacttgcaaagcggtcaatgagtatggtgctcggcagtgcgaggcccgcttggaggtccgagcacaccctgaaagccggtccctggccgtgctggcccccctgcaggacgtggacgtgggggccggggagatggcgctgtttgagtgcctggtggcggggcccactgacgtggaggtggattggctgtgccgtggccgcctgctgcagcctgcactgctcaaatgcaagatgcatttcgatggccgcaaatgcaagctgctacttacatctgtacatgaggacgacagtggcgtctacacctgcaagctcagcacggccaaagatgagctgacctgcagtgcccggctgaccgtgcggccctcgttggcacccctgttcacacggctgctggaagatgtggaggtgttggagggccgagctgcccgtttcgactgcaagatcagtggcaccccgccccctgttgttacctggactcattttggctgccccatggaggagagtgagaacttgcggctgcggcaggacgggggtctgcactcactgcacattgcccatgtgggcagcgaggacgaggggctctatgcggtcagtgctgttaacacccatggccaggcccactgctcagcccagctgtatgtagaagagccccggacagccgcctcaggccccagctcgaagctggagaagatgccatccattcccgaggagccagagcagggtgagctggagcggctgtccattcctgacttcctgcggccactgcaggacctggaggtgggactggccaaggaggccatgctagagtgccaggtgaccggcctgccctaccccaccatcagctggttccacaatggccaccgcatccagagcagcgacgaccggcgcatgacacagtacagggatgtccatcgcttggtgttccctgccgtggggcctcagcacgccggtgtctacaagagcgtcattgccaacaagctgggcaaagctgcctgctatgcccacctgtatgtcacagatgtggtcccaggccctccagatggcgccccgcaggtggtggctgtgacggggaggatggtcacactcacatggaacccccccaggagtctggacatggccatcgacccggactccctgacgtacacagtgcagcaccaggtgctgggctcggaccagtggacggcactggtcacaggcctgcgggagccagggtgggcagccacagggctgcgtaagggggtccagcacatcttccgggtcctcagcaccactgtcaagagcagcagcaagccctcacccccttctgagcctgtgcagctgctggagcacggcccaaccctggaggaggcccctgccatgctggacaaaccagacatcgtgtatgtggtggagggacagcctgccagcgtcaccgtcacattcaaccatgtggaggcccaggtcgtctggaggagctgccgaggggccctcctagaggcacgggccggtgtgtacgagctgagccagccagatgatgaccagtactgtcttcggatctgccgggtgagccgccgggacatgggggccctcacctgcaccgcccgaaaccgtcacggcacacagacctgctcggtcacattggagctggcagaggcccctcggtttgagtccatcatggaggacgtggaggtgggggctggggaaactgctcgctttgcggtggtggtcgagggaaaaccactgccggacatcatgtggtacaaggacgaggtgctgctgaccgagagcagccatgtgagcttcgtgtacgaggagaatgagtgctccctggtggtgctcagcacgggggcccaggatggaggcgtctacacctgcaccgcccagaacctggcgggtgaggtctcctgcaaagcagagttggctgtgcattcagctcagacagctatggaggtcgagggggtcggggaggatgaggaccatcgaggaaggagactcagcgacttttatgacatccaccaggagatcggcaggggtgctttctcctacttgcggcgcatagtggagcgtagctccggcctggagtttgcggccaagttcatccccagccaggccaagccaaaggcatcagcgcgtcgggaggcccggctgctggccaggctccagcacgactgtgtcctctacttccatgaggccttcgagaggcgccggggactggtcattgtcaccgagctctgcacagaggagctgctggagcgaatcgccaggaaacccaccgtgtgtgagtctgagatccgggcctatatgcggcaggtgctagagggaatacactacctgcaccagagccacgtgctgcacctcgatgtcaagcctgagaacctgctggtgtgggatggtgctgcgggcgagcagcaggtgcggatctgtgactttgggaatgcccaggagctgactccaggagagccccagtactgccagtatggcacacctgagtttgtagcacccgagattgtcaatcagagccccgtgtctggagtcactgacatctggcctgtgggtgttgttgccttcctctgtctgacaggaatctccccgtttgttggggaaaatgaccggacaacattgatgaacatccgaaactacaacgtggccttcgaggagaccacattcctgagcctgagcagggaggcccggggcttcctcatcaaagtgttggtgcaggaccggctgagacctaccgcagaagagaccctagaacatccttggttcaaaactcaggcaaagggcgcagaggtgagcacggatcacctgaagctattcctctcccggcggaggtggcagcgctcccagatcagctacaaatgccacctggtgctgcgccccatccccgagctgctgcgggcccccccagagcgggtgtgggtgaccatgcccagaaggccaccccccagtggggggctctcatcctcctcggattctgaagaggaagagctggaagagctgccctcagtgccccgcccactgcagcccgagttctctggctcccgggtgtccctcacagacattcccactgaggatgaggccctggggaccccagagactggggctgccacccccatggactggcaggagcagggaagggctccctctcaggaccaggaggctcccagcccagaggccctcccctccccaggccaggagcccgcagctggggctagccccaggcggggagagctccgcaggggcagctcggctgagagcgccctgccccgggccgggccgcgggagctgggccggggcctgcacaaggcggcgtctgtggagctgccgcagcgccggagccccagcccgggagccacccgcctggcccggggaggcctgggtgagggcgagtatgcccagaggctgcaggccctgcgccagcggctgctgcggggaggccccgaggatggcaaggtcagcggcctcaggggtcccctgctggagagcctggggggccgtgctcgggacccccggatggcacgagctgcctccagcgaggcagcgccccaccaccagcccccactcgagaaccggggcctgcaaaagagcagcagcttctcccagggtgaggcggagccccggggccggcaccgccgagcgggggcgcccctcgagatccccgtggccaggcttggggcccgtaggctacaggagtctccttccctgtctgccctcagcgaggcccagccatccagccctgcacggcccagcgcccccaaacccagtacccctaagtctgcagaaccttctgccaccacacctagtgatgctccgcagccccccgcaccccagcctgcccaagacaaggctccagagcccaggccagaaccagtccgagcctccaagcctgcaccacccccccaggccctgcaaaccctagcgctgcccctcacaccctatgctcagatcattcagtccctccagctgtcaggccacgcccagggcccctcgcagggccctgccgcgccgccttcagagcccaagccccacgctgctgtctttgccagggtggcctccccacctccgggagcccccgagaagcgcgtgccctcagccgggggtcccccggtgctagccgagaaagcccgagttcccacggtgccccccaggccaggcagcagtctcagtagcagcatcgaaaacttggagtcggaggccgtgttcgaggccaagttcaagcgcagccgcgagtcgcccctgtcgctggggctgcggctgctgagccgttcgcgctcggaggagcgcggccccttccgtggggccgaggaggaggatggcatataccggcccagcccggcggggaccccgctggagctggtgcgacggcctgagcgctcacgctcggtgcaggacctcagggctgtcggagagcctggcctcgtccgccgcctctcgctgtcactgtcccagcggctgcggcggacccctcccgcgcagcgccacccggcctgggaggcccgcggcggggacggagagagctcggagggcgggagctcggcgcggggctccccggtgctggcgatgcgcaggcggctgagcttcaccctggagcggctgtccagccgattgcagcgcagtggcagcagcgaggactcggggggcgcgtcgggccgcagcacgccgctgttcggacggcttcgcagggccacgtccgagggcgagagtctgcggcgccttggccttccgcacaaccagttggccgcccaggccggcgccaccacgccttccgccgagtccctgggctccgaggccagcgccacgtcgggctcctcagccccaggggaaagccgaagccggctccgctggggcttctctcggccgcggaaggacaaggggttatcgccaccaaacctctctgccagcgtccaggaggagttgggtcaccagtacgtgcgcagtgagtcagacttccccccagtcttccacatcaaactcaaggaccaggtgctgctggagggggaggcagccaccctgctctgcctgccagcggcctgccctgcaccgcacatctcctggatgaaagacaagaagtccttgaggtcagagccctcagtgatcatcgtgtcctgcaaagatgggcggcagctgctcagcatcccccgggcgggcaagcggcacgccggtctctatgagtgctcggccaccaacgtactgggcagcatcaccagctcctgtaccgtggctgtggcccgagtcccaggaaagctagctcctccagaggtaccccagacctaccaggacacggcgctggtgctgtggaagccgggagacagccgggcaccttgcacgtatacgctggagcggcgagtggatggggagtctgtgtggcaccctgtgagctcaggcatccccgactgttactacaacgtgacccacctgccagttggcgtgactgtgaggttccgtgtggcctgtgccaaccgtgctgggcaggggcccttcagcaactcttctgagaaggtctttgtcaggggtactcaagattcttcagctgtgccatctgctgcccaccaagaggcccctgtcacctcaaggccagccagggcccggcctcctgactctcctacctcactggccccacccctagctcctgctgcccccacacccccgtcagtcactgtcagcccctcatctccccccacacctcctagccaggccttgtcctcgctcaaggctgtgggtccaccaccccaaacccctccacgaagacacaggggcctgcaggctgcccggccagcggagcccaccctacccagtacccacgtcaccccaagtgagcccaagcctttcgtccttgacactgggaccccgatcccagcctccactcctcaaggggttaaaccagtgtcttcctctactcctgtgtatgtggtgacttcctttgtgtctgcaccaccagcccctgagcccccagcccctgagccccctcctgagcctaccaaggtgactgtgcagagcctcagcccggccaaggaggtggtcagctcccctgggagcagtccccgaagctctcccaggcctgagggtaccactcttcgacagggtccccctcagaaaccctacaccttcctggaggagaaagccaggggccgctttggtgttgtgcgagcgtgccgggagaatgccacggggcgaacgttcgtggccaagatcgtgccctatgctgccgagggcaagcggcgggtcctgcaggagtacgaggtgctgcggaccctgcaccacgagcggatcatgtccctgcacgaggcctacatcacccctcggtacctcgtgctcattgctgagagctgtggcaaccgggaactcctctgtgggctcagtgacaggttccggtattctgaggatgacgtggccacttacatggtgcagctgctacaaggcctggactacctccacggccaccacgtgctccacctagacatcaagccagacaacctgctgctggcccctgacaatgccctcaagattgtggactttggcagtgcccagccctacaacccccaggcccttaggccccttggccaccgcacgggcacgctggagttcatggctccggagatggtgaagggagaacccatcggctctgccacggacatctggggagcgggtgtgctcacttacattatgctcagtggacgctccccgttctatgagccagacccccaggaaacggaggctcggattgtggggggccgctttgatgccttccagctgtaccccaatacatcccagagcgccaccctcttcttgcgaaaggttctctctgtacatccctggagccggccctccctgcaggactgcctggcccacccatggttgcaggacgcctacctgatgaagctgcgccgccagacgctcaccttcaccaccaaccggctcaaggagttcctgggcgagcagcggcggcgccgggctgaggctgccacccgccacaaggtgctgctgcgctcctaccctggcggcccctagaggcacggaccacagccaggcctcgggcttcaactggggttcccaccaatgccacgggacattccagggcccacgctgagccaggcgggcctggggcttcggttaccaccagcagcaacatctggctgggctcttacctcatagaccttcaaggacagagaccccagggcctggacctgatgccaccccaggccaaagccagagtgggagacccattggtcaggctcagcagggtgggaacaggcagagggacaagaggggaatggagaagtggagaggaaaaggaatcgagggacaggaagggggaggctctaggaaggttctgggttgggggtcagtgcatctcagggagaaccaaggaaggtgggcatggctggagaggaggaaaaggaaggagccccaggtgtcagggcagtaggctgggagtcagtgtggcaaagcgggggcaggacacagatacagtggcaggggcccagggctgggacatgagagaaggcagcgaggcggcagagggagaagagaggactcaggtggaggtggggtgggtcagctgtcagcatccctcagaggagaaatgtggagagctggaggccagcagtcactcacactcgctctgtcctcctgtccagtggatacagccctgggcgctctgctggcccaaggatgtccccactgcccctccatggcctctggccttcttcccattcatatttatttatttattgacttttatgaagtttccccttccatccgatccctactgcccatgttgtcctgaccatccctcccagccatccagctgtctgtctgtctgccacaaggaaataaaaatggcaagcagcataa

SEQ ID NO: 185410 - DNA, 1086 bp, Homo sapiens
  Payload ID: 16515
  Gene Symbol: SPEG
  Gene Name: SPEG complex locus
  Uniprot ID: Q15772
  ENST ID: ENST00000396686
  CDS Start-End: 154-495
tccctcgagcgtttgggggtgcaagctgtagggctgtggccaacaggtgggtctacatcccctttcagcagccccatcacctccgacgaggaatacctgagccccccagaggagttcccagagcctggggagacctggccgcgaacccccaccatgaagcccagtcccagccagaaccgccgttcttctgacactggctccaaggcaccccccaccttcaaggtctcacttatggaccagtcagtaagagaaggccaagatgtcatcatgagcatccgcgtgcagggggagcccaagcctgtggtctcctggctgagaaaccgccagcccgtgcgcccagaccagcggcgctttgcggaggaggctgagggtgggctgtgccggctgcggatcctggctgcagagcgtggcgatgctggtttctacacttgcaaagcggtcaatgagtatggtgctcggcagtgcgaggcccgcttggaggtccgaggcgagtgagctcagggggccacctgtgctccccccgctaccctccgagccgcgcccctgtctcaggcacctctcggacctcgctgtgtttcactgcctcctgcccacagacccaggcctgccggcccggacccgtcccagcctcccctccccaccccatgcagcccccagggggatagcccatgggcccctgtggaccctccctccccaagtggacacatggctgtgcaggccaggaggcccacagatggactgagtgctgggaaggggcggctgcgaggggtatcaaccccccgagtctctccctgaaggggagcaccgggcgagtgcatgtgctactgctgctacaggcctgtctatctgtttgtctgtctgtgtgtctgtgacagtcagggaaggatgcctcggagctgaggtggggtgagacagagtgggagagattacggcatggcatggaggggcccaaggagcaggggctgttgacaaaggccttaccaggaagggttaggacactgaccattctagaaatgggtttcgaatggcacaacactttctatttcacaaaagaccaaaagccagaggccccaggctctgtgctga

SEQ ID NO: 185411 - DNA, 1457 bp, Homo sapiens
  Payload ID: 16515
  Gene Symbol: SPEG
  Gene Name: SPEG complex locus
  Uniprot ID: Q15772
  ENST ID: ENST00000396688
  CDS Start-End: 339-680
caacctcctccttcccctcctcaggcgccttcccctcccccagggccttctccgtgcagggcctcagctgggtcagccgagtgagtggggctgggcaggctggacaggctgggctcctgctccctggggagccacgctggggtgggcagtgggcaggcagcaggagggcctggtgccagggcagagccttcaggacaggcacaggctggggtctgtgtgcagagcctcggggtgggtctacatcccctttcagcagccccatcacctccgacgaggaatacctgagccccccagaggagttcccagagcctggggagacctggccgcgaacccccaccatgaagcccagtcccagccagaaccgccgttcttctgacactggctccaaggcaccccccaccttcaaggtctcacttatggaccagtcagtaagagaaggccaagatgtcatcatgagcatccgcgtgcagggggagcccaagcctgtggtctcctggctgagaaaccgccagcccgtgcgcccagaccagcggcgctttgcggaggaggctgagggtgggctgtgccggctgcggatcctggctgcagagcgtggcgatgctggtttctacacttgcaaagcggtcaatgagtatggtgctcggcagtgcgaggcccgcttggaggtccgaggcgagtgagctcagggggccacctgtgctccccccgctaccctccgagccgcgcccctgtctcaggcacctctcggacctcgctgtgtttcactgcctcctgcccacagacccaggcctgccggcccggacccgtcccagcctcccctccccaccccatgcagcccccagggggatagcccatgggcccctgtggaccctccctccccaagtggacacatggctgtgcaggccaggaggcccacagatggactgagtgctgggaaggggcggctgcgaggggtatcaaccccccgagtctctccctgaaggggagcaccgggcgagtgcatgtgctactgctgctacaggcctgtctatctgtttgtctgtctgtgtgtctgtgacagtcagggaaggatgcctcggagctgaggtggggtgagacagagtgggagagattacggcatggcatggaggggcccaaggagcaggggctgttgacaaaggccttaccaggaagggttaggacactgaccattctagaaatgggtttcgaatggcacaacactttctatttcacaaaagaccaaaagccagaggccccaggctctgtgctgatgaacagcctggctgagccctggccctggcaggtttagggcccatttggggccccctccttctctgtcagggctggggtgctctgtctgggaatgagggagttaaccaagtttggtgcaggagcaggggcagggggccactgtagtgagcgtggagaaatttggaaacacctatttcttaactcaa

SEQ ID NO: 185412 - DNA, 1274 bp, Homo sapiens
  Payload ID: 16515
  Gene Symbol: SPEG
  Gene Name: SPEG complex locus
  Uniprot ID: Q15772
  ENST ID: ENST00000396689
  CDS Start-End: 135-476
ccgaggtcgggatgtgacttgtctgcggtgggtctacatcccctttcagcagccccatcacctccgacgaggaatacctgagccccccagaggagttcccagagcctggggagacctggccgcgaacccccaccatgaagcccagtcccagccagaaccgccgttcttctgacactggctccaaggcaccccccaccttcaaggtctcacttatggaccagtcagtaagagaaggccaagatgtcatcatgagcatccgcgtgcagggggagcccaagcctgtggtctcctggctgagaaaccgccagcccgtgcgcccagaccagcggcgctttgcggaggaggctgagggtgggctgtgccggctgcggatcctggctgcagagcgtggcgatgctggtttctacacttgcaaagcggtcaatgagtatggtgctcggcagtgcgaggcccgcttggaggtccgaggcgagtgagctcagggggccacctgtgctccccccgctaccctccgagccgcgcccctgtctcaggcacctctcggacctcgctgtgtttcactgcctcctgcccacagacccaggcctgccggcccggacccgtcccagcctcccctccccaccccatgcagcccccagggggatagcccatgggcccctgtggaccctccctccccaagtggacacatggctgtgcaggccaggaggcccacagatggactgagtgctgggaaggggcggctgcgaggggtatcaaccccccgagtctctccctgaaggggagcaccgggcgagtgcatgtgctactgctgctacaggcctgtctatctgtttgtctgtctgtgtgtctgtgacagtcagggaaggatgcctcggagctgaggtggggtgagacagagtgggagagattacggcatggcatggaggggcccaaggagcaggggctgttgacaaaggccttaccaggaagggttaggacactgaccattctagaaatgggtttcgaatggcacaacactttctatttcacaaaagaccaaaagccagaggccccaggctctgtgctgatgaacagcctggctgagccctggccctggcaggtttagggcccatttggggccccctccttctctgtcagggctggggtgctctgtctgggaatgagggagttaaccaagtttggtgcaggagcaggggcagggggccactgtagtgagcgtggagaaatttggaaacacctatttcttaactcaaataaagtccagtttgtaccta

SEQ ID NO: 185413 - DNA, 3379 bp, Homo sapiens
  Payload ID: 16515
  Gene Symbol: SPEG
  Gene Name: SPEG complex locus
  ENST ID: ENST00000396698
  CDS Start-End: 7-2583
cccgccatgaagaagctgtgggtgaagaagcgtttccagaaaaccggccattcccgccgggcctttggccgactcacccatgactcagagacggctgaggatgacatcagcgatgtgcagggaacccagcgcctggagcttcgggatgacggggccttcagcacccccacggggggttctgacaccctggtgggcacctccctggacacacccccgacctccgtgacaggcacctcagaggagcaagtgagctggtggggcagcgggcagacggtcctggagcaggaagcgggcagtgggggtggcacccgccgcctcccgggcagcccaaggcaagcacaggcaaccggggccgggccacggcacctgggggtggagccgctggtgcgggcatctcgagctaatctggtgggcgcaagctgggggtcagaggatagcctttccgtggccagtgacctgtacggcagcgcattcagcctgtacagaggacgggcgctctctatccacgtcagcgtccctcagagcgggttgcgcagggaggagcccgaccttcagcctcaactggccagcgaagccccacgccgccctgcccagccgcctccttccaaatccgcgctgctccccccaccgtcccctcgggtcgggaagcggtccccgccgggacccccggcccagcccgcggccacccccacgtcgccccaccgtcgcactcaggagcctgtgctgcccgaggacaccaccaccgaagagaagcgagggaagaagtccaagtcgtccgggccctccctggcgggcaccgcggaatcccgaccccagacgccactgagcgaggcctcaggccgcctgtcggcgttgggccgatcgcctaggctggtgcgcgccggctcccgcatcctggacaagctgcagttcttcgaggagcgacggcgcagcctggagcgcagcgactcgccgccggcgcccctgcggccctgggtgcccctgcgcaaggcccgctctctggagcagcccaagtcggagcgcggcgcaccgtggggcacccccggggcctcgcaggaagaactgcgggcgccaggcagcgtggccgagcggcgccgcctgttccagcagaaagcggcctcgctggacgagcgcacgcgtcagcgcagcccggcctcagacctcgagctgcgcttcgcccaggagctgggccgcatccgccgctccacgtcgcgggaggagctggtgcgctcgcacgagtccctgcgcgccacgctgcagcgtgccccatcccctcgagagcccggcgagcccccgctcttctctcggccctccacccccaagacatcgcgggccgtgagccccgccgccgcccagccgccctctccgagcagcgcggagaagccgggggacgagcctgggaggcccaggagccgcgggccggcgggcaggacagagccgggggaaggcccgcagcaggaggttaggcgtcgggaccaattcccgctgacccggagcagagccatccaggagtgcaggagccctgtgccgccccccgccgccgatcccccagaggccaggacgaaagcaccccccggtcggaagcgggagcccccggcgcaggccgtgcgcttcctgccctgggccacgccgggcctggagggcgctgctgtaccccagaccttggagaagaacagggcggggcctgaggcagagaagaggcttcgcagagggccggaggaggacggtccctgggggccctgggaccgccgaggggcccgcagccagggcaaaggtcgccgggcccggcccacctcccctgagctcgagtcttcggatgactcctacgtgtccgctggagaagagcccctagaggcccctgtgtttgagatccccctgcagaatgtggtggtggcaccaggggcagatgtgctgctcaagtgtatcatcactgccaaccccccgccccaagtgtcctggcacaaggatgggtcagcgctgcgcagcgagggccgcctcctcctccgggctgagggtgagcggcacaccctgctgctcagggaggccagggcagcagatgccgggagctatatggccaccgccaccaacgagctgggccaggccacctgtgccgcctcactgaccgtgagacccggtgggtctacatcccctttcagcagccccatcacctccgacgaggaatacctgagccccccagaggagttcccagagcctggggagacctggccgcgaacccccaccatgaagcccagtcccagccagaaccgccgttcttctgacactggctccaaggcaccccccaccttcaaggtctcacttatggaccagtcagtaagagaaggccaagatgtcatcatgagcatccgcgtgcagggggagcccaagcctgtggtctcctggctgagaaaccgccagcccgtgcgcccagaccagcggcgctttgcggaggaggctgagggtgggctgtgccggctgcggatcctggctgcagagcgtggcgatgctggtttctacacttgcaaagcggtcaatgagtatggtgctcggcagtgcgaggcccgcttggaggtccgaggcgagtgagctcagggggccacctgtgctccccccgctaccctccgagccgcgcccctgtctcaggcacctctcggacctcgctgtgtttcactgcctcctgcccacagacccaggcctgccggcccggacccgtcccagcctcccctccccaccccatgcagcccccagggggatagcccatgggcccctgtggaccctccctccccaagtggacacatggctgtgcaggccaggaggcccacagatggactgagtgctgggaaggggcggctgcgaggggtatcaaccccccgagtctctccctgaaggggagcaccgggcgagtgcatgtgctactgctgctacaggcctgtctatctgtttgtctgtctgtgtgtctgtgacagtcagggaaggatgcctcggagctgaggtggggtgagacagagtgggagagattacggcatggcatggaggggcccaaggagcaggggctgttgacaaaggccttaccaggaagggttaggacactgaccattctagaaatgggtttcgaatggcacaacactttctatttcacaaaagaccaaaagccagaggccccaggctctgtgctgatgaacagcctggctgagccctggccctggcaggtttagggcccatttggggccccctccttctctgtcagggctggggtgctctgtctgggaatgagggagttaaccaagtttggtgcaggagcaggggcagggggccactgtagtgagcgtggagaaatttggaaacacctatttcttaactcaaataaagtccagtttgtacc

SEQ ID NO: 185414 - DNA, 546 bp, Homo sapiens
  Payload ID: 16515
  Gene Symbol: SPEG
  Gene Name: SPEG complex locus
  ENST ID: ENST00000403148
  CDS Start-End: 36-197
ctcgcccggccgccggcccggccccctcccccgccatgaagaagctgtgggtgaagaagcgtttccagaaaaccggccattcccgccgggcctttggccgactcacccatggtgcgtggaccgtgggcgtccttgctctagcccatgcctactcctcctcttggtccctgtccctctgtgaggcatcgagttcctgaagacagcccatgagatgtggaaccctcccactcacccccacacttatctaccacccacccgaccaggccccctgtgccctacagctgagagaggacccagcagaagggagggcggctcactagcacacccctgcatggactgggtgccctgttctccatgtgaggcctaatgggaaggagttcattgccatgctttggcaaccacgaagttttccgctcctgcagaaagcaaagttacgactcagagacggctgaggatgacatcagcgatgtgcagggaacccagcgcctggagcttcgggatgacggggccttcagcacccccacggggggttctgacaccctggtg

SEQ ID NO: 185415 - DNA, 420 bp, Homo sapiens
  Payload ID: 16515
  Gene Symbol: SPEG
  Gene Name: SPEG complex locus
  ENST ID: ENST00000409595
  CDS Start-End: 1-130
atctcgagctaatctggtgggcgcaagctgggggtcagaggatagcctttccgtggccagtgacctgtacggcagcgcattcagcctgtacagaggacgggcgctctctatccacgtagtcttcggatgactcctacgtgtccgctggagaagagcccctagaggcccctgtgtttgagatccccctgcagaatgtggtggtggcaccaggggcagatgtgctgctcaagtgtatcatcactgccaaccccccgccccaagtgtcctggcacaaggatgggtcagcgctgcgcagcgagggccgcctcctcctccgggctgagggtgagcggcacaccctgctgctcagggaggccagggcagcagatgccgggagctatatggccaccgccaccaacgagctgggccaggccacctgtg

SEQ ID NO: 185416 - DNA, 1085 bp, Homo sapiens
  Payload ID: 16515
  Gene Symbol: SPEG
  Gene Name: SPEG complex locus
  ENST ID: ENST00000412982
  CDS Start-End: 1-1030
tatgctcagtggacgctccccgttctatgagccagacccccaggaaacggaggctcggattgtggggggccgctttgatgccttccagctgtaccccaatacatcccagagcgccaccctcttcttgcgaaaggttctctctgtacatccctggagccggccctccctgcaggactgcctggcccacccatggttgcaggacgcctacctgatgaagctgcgccgccagacgctcaccttcaccaccaaccggctcaaggagttcctgggcgagcagcggcggcgccgggctgaggctgccacccgccacaagatgtctaaagcagctcctgccaaaaagccagtggctgtggccccagctcctggatgtaccctggacatcaatgacccacaggtccagagtgcggccattcgtatccaggcctcttaccggggccacaggtcccggaaggagctgcgcgagaaggggccgccgcgggtgctggagccgctgaaggacgtggtgctgatcgaaggcagcgcggccaagctcacttgccgcatttcggctttcccggacccattcatccgctggagtaaggacggcaaggagctacgtgacggtcccaagtaccgctacgtcttcgaggaccctgacgtggtggcactggtggtgcgcgacggcgagctggcagacctgggccagtacagcatcaacgtcaccaaccccttcggccagtgctccgactcggcgcgcatcctcgtggaagtcccgacgaagattcaaaagggacccgacaacactaaggcgcgcaaaggcaccaccgtgacgctgactgcggagatcctgggagagcctgcgcccgacgtaggctggaccaaggacggggaggacatcgaggaggatgacagggtgttcttcgagatcggcagcaccaccacgacgctgaccattcgccgggccacgcctcaggacagcggcaagtacgaggtgtacgtggagaacagcctgggcatggaccagagcttcgctcgcgtcgacgtggcctgaacggcacccccggaccttccgccctggcgccgagcccgggggtggtgggacccac

SEQ ID NO: 185417 - DNA, 605 bp, Homo sapiens
  Payload ID: 16515
  Gene Symbol: SPEG
  Gene Name: SPEG complex locus
  ENST ID: ENST00000435853
  CDS Start-End: 43-605
acagtgtgtgtgcgcgcatgtttgtggaatgagcaagtcgagatgctgctgaccttccagagaggccccgcgggaggagaaaaccggccattcccgccgggcctttggccgactcacccatgcgaagttttccgctcctgcagaaagcaaagttacgactcagagacggctgaggatgacatcagcgatgtgcagggaacccagcgcctggagcttcgggatgacggggccttcagcacccccacggggggttctgacaccctggtgggcacctccctggacacacccccgacctccgtgacaggcacctcagaggagcaagtgagctggtggggcagcgggcagacggtcctggagcaggaagcgggcagtgggggtggcacccgccgcctcccgggcagcccaagcagcgtccctcagagcgggttgcgcagggaggagcccgaccttcagcctcaactggccagcgaagccccacgccgccctgcccagccgcctccttccaaatccgcgctgctccccccaccgtcccctcgggtcgggaagcggtccccgccgggacccccggcccagcccgcggccacccccacgtcgccccaccgtcg

SEQ ID NO: 185418 - DNA, 579 bp, Homo sapiens
  Payload ID: 16515
  Gene Symbol: SPEG
  Gene Name: SPEG complex locus
  ENST ID: ENST00000420132
  CDS Start-End: 3-164
ccatgaagaagctgtgggtgaagaagcgtttccagaaaaccggccattcccgccgggcctttggccgactcacccatggtgcgtggaccgtgggcgtccttgctctagcccatgcctactcctcctcttggtccctgtccctctgtgaggcatcgagttcctgaagacagcccatgagatgtggaaccctcccactcacccccacacttatctaccacccacccgaccaggccccctgtgccctacagctgagagaggacccagcagaagggagggcggctcactagcacacccctgcatggactgggtgccctgttctccatgtgaggcctaatgggaaggagttcattgccatgctttggcaaccattttccgctcctgcagaaagcaaagttacgactcagagacggctgaggatgacatcagcgatgtgcagggaacccagcgcctggagcttcgggatgacggggccttcagcacccccacggggggttctgacaccctggtgggcacctccctggacacacccccgacctccgtgacaggcacctcagaggagcaagtgagctggtggggcag

SEQ ID NO: 185419 - DNA, 583 bp, Homo sapiens
  Payload ID: 16515
  Gene Symbol: SPEG
  Gene Name: SPEG complex locus
  ENST ID: ENST00000452101
  CDS Start-End: 5-259
cgccatgaagaagctgtgggtgaagaagcgtttccagaaaaccggccattcccgccgggcctttggccgactcacccatgcgaagttttccgctcctgcagaaagcaaagttacgactcagagacggctgaggatgacatcagcgatgtgcagggaacccagcgcctggagcttcgggatgacggggccttcagcacccccacggggggttctgacaccctggtgggcacctccctggacacacccccgacctccgtgacaggcacctcagaggagcaagtgagctggtggggcagcgggcagacggtcctggagcaggaagcgggcagtgggggtggcacccgccgcctcccgggcagcccaagcagcgtccctcagagcgggttgcgcagggaggagcccgaccttcagcctcaactggccagcgaagccccacgccgccctgcccagccgcctccttccaaatccgcgctgctccccccaccgtcccctcgggtcgggaagcggtccccgccgggacccccggcccagcccgcggccacccccacgtcgccccaccgtcgcactcaggagcctgtgctgc

SEQ ID NO: 185420 - DNA, 926 bp, Homo sapiens
  Payload ID: 16515
  Gene Symbol: SPEG
  Gene Name: SPEG complex locus
  ENST ID: ENST00000431523
  CDS Start-End: 29-926
ggccgccggcccggccccctcccccgccatgaagaagctgtgggtgaagaagcgtttccagaaaaccggccattcccgccgggcctttggccgactcacccatgttttccgctcctgcagaaagcaaagttacgactcagagacggctgaggatgacatcagcgatgtgcagggaacccagcgcctggagcttcgggatgacggggccttcagcacccccacggggggttctgacaccctggtgggcacctccctggacacacccccgacctccgtgacaggcacctcagaggagcaagtgagctggtggggcagcgggcagacggtcctggagcaggaagcgggcagtgggggtggcacccgccgcctcccgggcagcccaagcagcgtccctcagagcgggttgcgcagggaggagcccgaccttcagcctcaactggccagcgaagccccacgccgccctgcccagccgcctccttccaaatccgcgctgctccccccaccgtcccctcgggtcgggaagcggtccccgccgggacccccggcccagcccgcggccacccccacgtcgccccaccgtcgcactcaggagcctgtgctgcccgaggacaccaccaccgaagagaagcgagggaagaagtccaagtcgtccgggccctccctggcgggcaccgcggaatcccgaccccagacgccactgagcgaggcctcaggccgcctgtcggcgttgggccgatcgcctaggctggtgcgcgccggctcccgcatcctggacaagctgcagttcttcgaggagcgacggcgcagcctggagcgcagcgactcgccgccggcgcccctgcggccctgggtgcccctgcgcaaggcccgctctctggagcagcccaagtcggagcgcggcgcaccgtggggcacccccggggcct

SEQ ID NO: 185421 - DNA, 551 bp, Homo sapiens
  Payload ID: 16515
  Gene Symbol: SPEG
  Gene Name: SPEG complex locus
  ENST ID: ENST00000451076
  CDS Start-End: 1-551
agagacggctgaggatgacatcagcgatgtgcagggaacccagcgcctggagcttcgggatgacggggccttcagcacccccacgggcacctcagaggagcaagtgagctggtggggcagcgggcagacggtcctggagcaggaagcgggcagtgggggtggcacccgccgcctcccgggcagcccaaggcaagcacaggcaaccggggccgggccacggcacctgggggtggagccgctggtgcgggcatctcgagctaatctggtgggcgcaagctgggggtcagaggatagcctttccgtggccagtgacctgtacggcagcgcattcagcctgtacagaggacgggcgctctctatccacgtcagcgtccctcagagcgggttgcgcagggaggagcccgaccttcagcctcaactggccagcgaagccccacgccgccctgcccagccgcctccttccaaatccgcgctgctccccccaccgtcccctcgggtcgggaagcggtccccgccgggacccccggcccagcccgcggccacccccacgt

SEQ ID NO: 185422 - DNA, 815 bp, Homo sapiens
  Payload ID: 16515
  Gene Symbol: SPEG
  Gene Name: SPEG complex locus
  ENST ID: ENST00000617028
  CDS Start-End: 1-717
atgtctaaagcagctcctgccaaaaagccagtggctgtggccccagctcctggatgtaccctggacatcaatgacccacaggtccagagtgcggccattcgtatccaggcctcttaccggggccacaggtcccggaaggagctgcgcgagaaggggccgccgcgggtgctggagccgctgaaggacgtggtgctgatcgaaggcagcgcggccaagctcacttgccgcatttcggctttcccggacccattcatccgctggagtaaggacggcaaggagctacgtgacggtcccaagtaccgctacgtcttcgaggaccctgacgtggtggcactggtggtgcgcgacggcgagctggcagacctgggccagtacagcatcaacgtcaccaaccccttcggccagtgctccgactcggcgcgcatcctcgtggaagtcccgacgaagattcaaaagggacccgacaacactaaggcgcgcaaaggcaccaccgtgacgctgactgcggagatcctgggagagcctgcgcccgacgtaggctggaccaaggacggggaggacatcgaggaggatgacagggtgttcttcgagatcggcagcaccaccacgacgctgaccattcgccgggccacgcctcaggacagcggcaagtacgaggtgtacgtggagaacagcctgggcatggaccagagcttcgctcgcgtcgacgtggcctgaacggcacccccggaccttccgccctggcgccgagcccgggggtggtgggacccacagccctccaccagcttgcttaataaagctgctctctgaccctc

SEQ ID NO: 185423 - DNA, 12232 bp, Homo sapiens
  Payload ID: 16516
  Gene Symbol: SPEN
  Gene Name: spen family transcriptional repressor
  Uniprot ID: Q96T58
  ENST ID: ENST00000375759
  CDS Start-End: 205-11199
tgagctgcgaggcccgagagtcagaacctgggggagagggatggtctctgcacgggggggagccggaggagccgccgccgctgccgacgccaccgccgcagccgccgccgccgccgccccggcacccgcctcccggcgctgacggtctcgtacgaagccggcgagggggagccagcagcggcggtcgccggcacgccgcccagcatggtccgggaaaccaggcatctctgggtgggcaacttacccgagaacgtgcgggaagagaagatcatcgagcatttcaaacgatatggccgcgtggaaagtgtcaaaattcttcccaagaggggatctgaaggaggagtggctgcctttgtggattttgtggacatcaaaagtgcacagaaagctcacaactcggtcaacaaaatgggtgacagagacctacgcacggattataatgaaccaggcaccatcccgagtgctgctcggggattggatgatacagtttccatagcatctcgtagtagagaggtttctgggttcagaggaggtggtggagggcctgcttatggtcccccaccgtcacttcatgcacgagaaggacgttatgagcggagacttgatggggcttcagataacagggagcgtgcttatgaacatagtgcctatggacaccatgaacgggggacgggaggatttgatcggacaagacattacgatcaggattactatagagatcctcgagagcggactttacaacatgggctctattacgcttctcggagtcgaagtccaaatcgctttgatgctcatgacccccgatatgaacctagggctcgcgagcagtttacactgcccagtgtggtacacagggatatctacagggatgatattacccgggaggtacgaggcagaaggccagagcggaattaccagcacagcaggagtcggtcaccacattcatcccagtctagaaatcagtctcctcagagactggctagccaagcatctagacccacaaggtcccctagcggcagcggctctagaagtagatcctccagtagtgattcaatcagcagcagcagtagtaccagcagtgacagcagtgattccagcagtagttcaagtgatgattctccagctcgatcagttcagtctgcagcagtccctgcacccacttcccagttgctttcatctctggaaaaagatgagccccgtaaaagttttggcatcaaggtccagaatcttccagtacgctctacagatacaagccttaaagatggccttttccatgaatttaagaaatttggaaaagtaacttcagtgcagatacatggaacttcagaagagaggtatggtctggtattctttcggcagcaagaggaccaagaaaaagccttgactgcatcaaaaggaaaacttttctttggcatgcagattgaagtaacagcatggataggtccagaaacagaaagtgaaaatgaatttcgccccttggatgaaaggatagatgaatttcaccccaaagcaacaagaactctctttattggcaaccttgaaaaaaccactacttaccatgaccttcgcaacatcttccagcgctttggagaaattgtggatattgacattaagaaagtaaatggagttcctcagtatgcgtttctgcaatactgtgatattgctagcgtttgtaaagctattaagaagatggatggggaatatcttggaaataatcgcctcaagctgggttttggaaagagcatgcctacaaactgcgtgtggctagatgggctttcttcgaatgtgtcagatcagtatttaacacgacatttctgccgatatgggcctgtggtaaaggtggtgtttgaccgcttaaaaggcatggccctggttctctacaatgaaattgaatatgcacaagcagctgtaaaagagaccaaagggaggaaaatcggtgggaataaaattaaggtggattttgcaaatcgggaaagtcagctggctttttatcactgcatggagaaatctggtcaagacatcagagacttttatgaaatgttagccgaaagaagagaggaacgaagggcatcctacgactataaccaagatcgtacatattatgagagtgttcgaactccaggcacttatcctgaggattccaggcgggactatccagctcgagggagagagttttattcagaatgggaaacttaccaaggagactactatgaatcacgatactacgatgatcctcgggaatacagggattacaggaatgatccttatgaacaagatattagggaatatagttacaggcaaagggaacgagaaagagaacgtgaaagatttgagtctgaccgggacagagaccatgagaggaggccgattgaacgaagtcaaagtcctgttcacttgcgacgtccacagagtcctggagcgtctccctctcaggcagagaggttgccgagtgattctgagaggaggctttacagccgatcctcagaccggagtggaagctgtagctcactctcccctccaagatatgagaaactggacaagtctcgtttggagcgctatacaaaaaatgaaaagacagataaagaacgaacttttgatccggagagagtggagagagagagacgcttaatacggaaggaaaaagtggaaaaggacaaaactgacaagcagaaacgcaaaggaaaggttcactcccctagttctcagtcttcagaaacggaccaagaaaatgagcgagagcaaagccctgaaaagcccaggagttgtaataaactgagcagagagaaagctgacaaagagggaatagcgaaaaaccgcctggaactcatgccttgcgtggttttgactcgagtgaaagagaaagagggaaaggtcattgaccacactcctgtggaaaagttgaaagccaagcttgataatgacactgtcaaatcttctgccctggaccagaaacttcaggtctctcagacggagcctgcaaaatctgacttgtctaaactggaatcagttagaatgaaagtaccaaaggaaaaggggctttcaagccatgttgaagtggtggagaaggaaggcaggcttaaagccaggaagcacctcaagcctgagcagcctgcagatggggtaagtgctgtggatctggagaagctggaagccaggaaaaggcgctttgcagattccaatttaaaagcagaaaagcaaaaaccagaggtcaagaaaagcagtccagagatggaggatgctcgcgtgctttcaaaaaagcagcctgacgtgtcctctagagaggtcattctgctgagggaaggagaggctgaaagaaagcctgtgaggaaagaaattcttaaaagagaatctaaaaaaatcaaactggacagacttaatactgttgccagccccaaagactgtcaggagcttgccagtatttctgttgggtctggctcaaggcccagctcagacctacaagcaagactgggagaactagcaggtgaatctgtggaaaatcaagaagtccaatcaaaaaagcccattccctcaaaaccacagctcaaacagctgcaggtattagatgatcaaggaccagagagagaagacgttaggaaaaactattgcagtcttcgtgatgaaacacctgaacgtaaatcaggccaagagaaatcacattcagtaaatactgaagaaaaaattggcattgacatcgatcacacgcagagttaccgaaaacaaatggaacagagtcgtaggaaacagcagatggaaatggaaatagccaagtctgagaagtttggcagtcctaaaaaagatgtagatgaatatgaaagacgtagcctcgttcacgaggtaggcaaaccccctcaagatgtcactgatgactctcctcctagcaaaaagaaaaggatggatcatgtcgattttgatatctgcaccaagcgagaacggaattacagaagttcacgccaaatcagcgaagattctgaaaggactggtggttctcccagtgtccgacatggttccttccatgaagatgaggatcccataggctcccctaggctactgtcagtaaaagggtctcctaaagtagatgaaaaagtcctcccctattctaacataacagtcagggaagagtctttaaaatttaatccttatgattctagcaggagagaacagatggcagatatggccaaaataaaactatctgtcttgaattctgaagatgaactaaatcgttgggactctcagatgaaacaggatgctggcagatttgatgtgagtttcccaaacagcataattaagagagatagccttcgaaaaaggtctgtacgagatctggaacctggtgaggtgccttctgattctgacgaagatggtgaacacaaatcccactcacccagagcctctgcattatatgaaagttctcgattgtcttttttattgagggacagagaagacaagctacgtgagcgagatgaaagactctctagttctttagaaaggaacaaattttactcttttgcattggataagacaatcacaccagacactaaagctttgcttgaaagagctaaatccctctcttcatctcgtgaagaaaattggtcttttcttgattgggactcccgatttgcaaattttcgaaacaacaaagataaagaaaaggttgactctgctccaagacctattccatcctggtacatgaaaaagaagaaaattaggactgattcagaagggaaaatggatgataagaaagaggaccataaagaagaagagcaagagaggcaggaattgtttgcttctcgttttttacacagctcaatctttgaacaagattccaagcgattgcagcatctagagagaaaagaggaagattctgacttcatttctggtaggatctatgggaagcagacatctgagggagcaaacagcacaactgattccattcaagaaccagtagttctgttccatagcagatttatggagctcacacggatgcaacagaaagaaaaagaaaaagaccagaaacccaaagaggttgagaaacaggaagatacagagaatcatcccaagaccccagaatctgctcctgagaataaagattcagaactgaaaactccaccttccgttgggcctccaagtgtcacagtcgtaactctagaatcagccccatcagcactagagaagaccactggtgacaaaacggtagaggcgcctttggtaacagaagagaagactgtggagccagctaccgtctcagaagaagcaaagcctgcatctgaacctgctcctgcccctgtggaacagctggaacaagtagacctgcccccaggagcagaccccgataaagaagctgccatgatgcctgcgggtgttgaggaaggttcatcaggtgaccagccgccttatctggatgccaagcctccaactcccggggcctcgttttcccaggcagagagcaacgtagatccagagcctgacagtacccagccactttcaaaaccagctcagaagtctgaggaagccaatgagccaaaggccgaaaagccagacgccactgcagatgctgagcctgatgcaaaccagaaagccgaagctgctcctgagtctcagcccccagcttctgaagatttagaggttgatcctccagttgctgcaaaggataaaaagccaaacaaaagcaagcgttcaaagacccctgttcaggcagctgcagtgagtatcgtggagaagcccgtcacaaggaagagtgagaggatagaccgggaaaaactcaagcggtccaattctcctcggggagaagcacagaagcttttggaattgaagatggaggcagagaagattacaaggactgcttctaaaaactctgctgcagaccttgaacatcccgaaccaagtttgcctctcagccgaacaaggcgccggaatgtaaggagcgtctatgcaaccatgggtgaccatgaaaaccgctctcctgtcaaagagcccgttgagcaaccaagagtgaccagaaagagattggagcgagagcttcaggaggctgcagcggttcccaccacccctcggaggggaaggcctccaaagacacgccggcgagccgatgaagaggaggagaacgaggccaaggaacctgcagaaacactcaagccacctgagggatggcggtcgccaaggtcccagaaaactgcagctggtggtggaccccaagggaaaaagggaaaaaatgaaccgaaggtggatgctacacgtcctgaggccaccactgaggtgggcccccaaataggcgtgaaagagagctccatggaacccaaggctgctgaggaggaggcagggagtgaacagaaacgtgacagaaaagatgctggcacagacaaaaacccccctgaaaccgcccctgttgaagttgtagagaaaaaaccggcccctgaaaaaaactccaaatcaaagagaggaagatctcgaaactccaggttagcagtggacaaatctgcaagtctgaaaaatgtggatgctgctgtcagtcccaggggggctgcagcacaggcaggggagagggaatctggggtggtggcagtctcccctgagaaaagtgagagtccccaaaaggaggatggtttatcatcccagttgaaaagtgatccagttgatccagacaaggaaccagagaaagaagacgtgtctgcctctgggccgtccccagaagccacccagttagccaagcagatggagctggagcaggccgtggaacacatcgcaaagctcgctgaggcctctgcctctgctgcctataaggcagatgcaccagagggccttgccccagaggacagggacaagcctgcacaccaagcaagtgaaacagagctggctgcggccatcggctccatcatcaatgacatttctggggagccagaaaacttcccagcacctccaccttatcctggagaatcccagacagatctgcaaccccccgcaggtgcacaggcgctgcagccttctgaggaaggaatggagacagatgaggctgtatctggcatcctggaaactgaggctgctacagaatcttctaggcctccagtcaatgctcctgacccctcagccggcccaacagataccaaggaagccagaggaaatagcagtgaaacctcacactcagtgccagaagccaaagggtctaaagaagtggaagtcactcttgttcggaaagacaaagggcgccagaaaacaacccgatcacgccgcaagcgaaacacaaacaagaaagtggtggctcctgtagagagccatgtccctgaatccaaccaagctcaaggtgagagtcctgctgcaaatgaggggacaacagtacagcaccccgaagccccacaggaagaaaagcagagtgagaaaccccattccactcctcctcagtcatgtacttctgacctaagcaagattccctccacagagaattcgtcccaagaaatcagtgttgaggaaaggactccaaccaaagcatctgtgcccccagaccttcccccacctccccagccagcaccggtggatgaggagcctcaagccaggttcagggtgcattccatcattgaaagtgacccggtgaccccacccagcgatccaagcatccccatacccacactgccttctgtaactgcagcaaagctctcacctcctgtcgcctctggggggatcccacaccagagcccccctactaaggtgacagagtggatcacaaggcaggaggagccacgggctcagtctactccatctccagctcttcccccagacacaaaggcctctgatgttgacaccagctccagcaccctgaggaagattctcatggaccccaagtatgtgtctgccacaagtgtcacttccacaagtgtcaccacagccattgcagagcctgtcagtgctgccccttgcctacatgaggccccgcccccgccagttgactctaaaaagcctttagaagaaaaaacagcacctccagtgacaaacaactctgagatacaagcctcggaggtgctggtagctgctgacaaggaaaaggtggctccagtcattgctcccaaaattacctctgttattagccggatgcctgtcagcattgacctggaaaattcacagaagataaccttggcaaaaccagctcctcaaaccctcactggtctggtgagcgcactcactggcctggtgaacgtctccctggtcccggtgaatgccctgaaaggccccgtgaagggctcagtgaccacactgaaaagtttggtgagcacccctgctgggcccgtgaacgtcctgaaagggcctgtgaatgttcttacggggccagtgaatgttctcaccactccagtgaacgccacggtgggcacagtgaatgccgccccaggcacagtcaatgccgctgcgagtgcagtgaatgccacagcaagtgcagtgaccgtcacagcgggtgcggttactgctgcatctggtggtgtaacggccacaacaggcacggtgacaatggcaggggcagtgattgcgccgtcaacaaagtgcaaacagagagcgagtgctaatgaaaacagtcggttccacccagggtccatgcctgtgatcgacgatcgtccggcagacgcgggctcaggggcggggctgcgtgtgaacacttctgaaggggttgtgctcctgagttactcagggcagaagaccgaaggcccacagcggatcagcgccaagatcagccagatccccccggccagtgcaatggacattgaatttcagcagtcagtgtccaagtcccaggtcaaacctgattctgtcacagcatcgcagcctccatccaaaggccctcaagctcctgcaggctatgcgaacgtggccacccattccacgttggtactgaccgcccagacatataatgcctctcctgtgatttcgtctgtgaaggccgataggccatccttggagaagcccgagcccattcacctctcggtgtccacgcctgtcacccagggaggcacagtgaaggttctcacccaggggatcaacacaccccctgtgctggttcacaaccagctggtcctcaccccaagcattgtcaccacaaacaagaagcttgctgaccccgtcacccttaaaatcgagaccaaggtccttcagccggccaacctggggtccacgctcacgccccaccaccctcctgctctgcccagcaaactgcctacagaagtcaaccatgtcccctcggggcccagcatcccagcagatcgaactgtctcccatttggcagctgcaaagctagatgctcattctcctcgaccaagtggacccgggccatcctcattcccaagggcaagccaccccagcagtactgcatctacggcgctctccaccaacgccacagtcatgctggctgcaggcatcccagtgccccagttcatctccagcatccacccagagcagtctgtcatcatgccaccccacagcatcacccagactgtgtccctgagccacctctcccagggcgaggtgagaatgaacactcccacgctgcccagtatcacctacagcatccggccagaagcgcttcactctcctcgggctccgctgcagccccagcaaatagaggtcagggccccacagcgtgccagcaccccgcagccagccccagctggtgtgcctgcactggcctcccagcaccctcccgaggaggaagtgcattatcaccttcctgtcgctcgagccacagcccctgtgcagtcagaggtactagtcatgcagtctgagtaccgactgcacccctatactgtgccacgggatgtgaggatcatggtgcatccacatgtgacggcagtcagcgagcagcccagggccgcggatggggtggtgaaggtgccaccagccagcaaggcccctcagcagccagggaaggaagctgccaagacaccagatgccaaagctgcccccacccccacccctgcccccgtccctgtccctgtcccccttcctgcccctgctcctgcccctcatggtgaggcccgtatcctcacagttacccccagtaaccaactccaggggctgcctctgacccctcctgtggtggtgacccatggggtgcagattgtgcactccagcggggagctgtttcaagagtaccggtacggcgacatccgcacctaccaccccccggcccagctcacacacactcagtttcccgccgcttcctctgttggcctgccttcccggaccaagacagctgctcagggccctcctcctgaaggtgagcccctgcagcctcctcagcctgtgcagtccacacagcctgcccagcctgcaccaccctgcccgccctcccagctcggtcagcccggccagccaccaagcagcaagatgcctcaagtgtcccaggaggcaaaggggacccagacgggagtagagcagcctcgcctcccagctggacctgcaaacaggccacctgagcctcacacccaggttcagagggcacaagcagaaacaggcccgacttccttcccctcccctgtgtctgtctccatgaagcctgaccttccagtctctcttcccactcagactgccccaaaacagccgttgtttgtcccaacaacctctggccccagcaccccaccaggactggttctgccacacactgaattccagccagcccccaaacaagattcctctccacacctgacttcccagagacccgtggatatggttcaacttctgaagaagtaccccatcgtgtggcagggcctgctggccctcaagaatgacacagctgctgtgcagctccacttcgtctctggcaacaacgtcctggcccatcggtccctgcccctttctgaaggagggcccccactaaggatcgcccagaggatgcggctggaggcaacgcagctggaaggggttgcccgaaggatgacggtggagacagattactgtctgctgctggctctgccctgtggccgtgaccaagaggatgttgtgagccagaccgagtccctcaaggctgccttcatcacttacctgcaggccaagcaggcggcagggatcatcaacgttcccaaccctggctccaatcagcctgcctacgtgctgcagatcttcccgccctgtgagttctctgagagtcacctgtcccgcctggcccctgacctccttgccagcatctccaacatctctccccacctcatgattgtcattgcctccgtgtgagccactgagtggttatcacctcagtgaatcttcccagggctctgcagtaaaaacaaaggacaacccagccaagcagaggaagaagctgccgaaggggacagactccactgccagacggccagccgtttgctgtcctgccgcccggctcagtcggccagacttcctctaggagtggtgctgctaccttgtatgtttacataatgctttagcccaaggacacatcaccaacccatggactcgcagacaccggggctgggtttctctttcctctttttggagaaaaggaacagggcagtggaatgaaaattttttgtttgtttgtttttaagaaacaagaaaacagaactgcctttgcactaaattagtgacttggacttttgcccagtgaagacaggctgtgacactctggatgtcttggtgtgtgtagacacacattgcagactcttaacgcaggaaggacttcaaacttctgctgagaccttggggtcaaggaacatttcattggttttttttgtccacccccatctcccttgctcatttggatgcgtcaccttaattctcctgctgccaccgtctttgattcaccgggatgtacagtttacagttgaagagcaaacagaaaggttttctcttggtgggatatgcagaacttgggatgtgtgtatatataaatatataatatatataaatatatataatactgacttaaaaaatcaaatcccccgacatacgttttttttaatctgtgccaaaaatgtgttttcagaggaaatcttattttcatattcagactttgtattgcccactcatttgtataagtgcgcttcggtacagcacgggtcctgctcccgcgatgtggaagtgtcacacggcacctgtacaaaaagactggctaacccctcttcctattaccttgatctcttcccccaacttcctaacacttattaatttatgaaactgtttttctcagcgcagttttgttttgtgtgtccattggattacaaactttattaaaaaatataaaacacaccaa

SEQ ID NO: 185424 - DNA, 1733 bp, Homo sapiens
  Payload ID: 16516
  Gene Symbol: SPEN
  Gene Name: spen family transcriptional repressor
  ENST ID: ENST00000438066
  CDS Start-End: 614-1733
ctatatggaatatttctggaatattagagcctacagattcttttagaagttgatatctgcctctccattttcactacataaagtgtacaaacaaattggattgtaacaaaaaatctggcagaccataatgattcaaccacttggattctacaaacaatactttaacatggaaatgtgtacttggatgaagaagagagaaggcaatgcctgatttttccattttggatctacacaatttctgtattgttggaattacactctttgatggaatggggaaaaattaaaatgatggatgtttcctaaatcctggaatatagccattcttttctaattgctgggatatatgggatgtcttgctgtcaagattccactagcccagggaaagaggattactatatcatttcttaagcaagttgctgtccaatcaaaggtactttagctttgaacacatggtgatgatcagttgtggatacagcaatcaaaattgactgggctggatggctacaaaagtgaactattggcgagcaactgtgccttcctcattcgttggaattgtagaggatatttcctcttctgccagctacctgattcatacttagggctggaaatatttatgaatgtggataaatttctaattgtctgctatctcaagaaagaagtctgggggtttgagagttacagtttgtctgggactacttgcttccagtggaattattttgtctggtcactaagattttttttttcttgtggttcatctaaatatcatttgacacccttgcccattaagaaggtggattacccccataagaggggccaaaattggggaagttatgttcacaattctctccctagatttaattgggattataggtcgtgtttccacacttggaaaagggcttcagataacagggagcgtgcttatgaacatagtgcctatggacaccatgaacgggggacgggaggatttgatcggacaagacattacgatcaggattactatagagatcctcgagagcggactttacaacatgggctctattacgcttctcggagtcgaagtccaaatcgctttgatgctcatgacccccgatatgaacctagggctcgcgagcagtttacactgcccagtgtggtacacagggatatctacagggatgatattacccgggaggtacgaggcagaaggccagagcggaattaccagcacagcaggagtcggtcaccacattcatcccagtctagaaatcagtctcctcagagactggctagccaagcatctagacccacaaggtcccctagcggcagcggctctagaagtagatcctccagtagtgattcaatcagcagcagcagtagtaccagcagtgacagcagtgattccagcagtagttcaagtgatgattctccagctcgatcagttcagtctgcagcagtccctgcacccacttcccagttgctttcatctctggaaaaagatgagccccgtaaaagttttggcatcaaggtccagaatcttccagtacgctctacagatacaagccttaaagatggccttttccatgaatttaagaaatttggaaaagtaacttcagtgcagatacatggaacttcagaagagaggtatggtctggtattctttcggcagcaagaggaccaagaaaaagccttgactgcatcaaaaggaaaacttttctttggcatgcagattgaagtaacagcatggataggtccag

SEQ ID NO: 185425 - DNA, 891 bp, Homo sapiens
  Payload ID: 16516
  Gene Symbol: SPEN
  Gene Name: spen family transcriptional repressor
  ENST ID: ENST00000442985
  CDS Start-End: 1-891
gccaagcatctagacccacaaggtcccctagcggcagcggctctagaagtagatcctccagtagtgattcaatcagcagcagcagtagtaccagcagtgacagtgattccagcagtagttcaagtgatgattctccagctcgatcagttcagtctgcagcagtccctgcacccacttcccagttgctttcatctctggaaaaagatgagccccgtaaaagttttggcatcaaggtccagaatcttccagtacgctctacagatacaagccttaaagatggccttttccatgaatttaagaaatttggaaaagtaacttcagtgcagatacatggaacttcagaagagaggtatggtctggtattctttcggcagcaagaggaccaagaaaaagccttgactgcatcaaaaggaaaacttttctttggcatgcagattgaagtaacagcatggataggtccagaaacagaaagtgaaaatgaatttcgccccttggatgaaaggatagatgaatttcaccccaaagcaacaagaactctctttattggcaaccttgaaaaaaccactacttaccatgaccttcgcaacatcttccagcgctttggagaaattgtggatattgacattaagaaagtaaatggagttcctcagtatgcgtttctgcaatactgtgatattgctagcgtttgtaaagctattaagaagatggatggggaatatcttggaaataatcgcctcaagctgggttttggaaagagcatgcctacaaactgcgtgtggctagatgggctttcttcgaatgtgtcagatcagtatttaacacgacatttctgccgatatgggcctgtggtaaaggtggtgtttgaccgcttaaaaggcatggccctggttc

SEQ ID NO: 185426 - DNA, 1499 bp, Homo sapiens
  Payload ID: 16517
  Gene Symbol: SPACA1
  Gene Name: sperm acrosome associated 1
  Uniprot ID: Q9HBV2
  ENST ID: ENST00000237201
  CDS Start-End: 118-1002
gtcacgggattcggagccgggcggctacgggcggggtgtcgcagctctcttcgacgtacctgtcctcaggagccgcggcggcgactgcgcctcggacggccgtcggggccgagaaccatgagccccaggggcacgggctgctccgccgggctgctgatgactgtcggctggctgcttctggcgggcctccagtccgcgcgcgggaccaacgtcaccgctgccgtccaggatgccggcctggcccacgaaggcgagggcgaggaggagaccgaaaacaacgacagcgagaccgcggagaactacgctccgcctgaaaccgaggatgtttcaaataggaatgtcgtcaaagaagtagaattcggaatgtgcaccgttacatgtggtattggtgttagagaagttatattaacaaatggatgccctggtggtgaatccaagtgtgttgtacgggtagaagaatgccgtggaccaacagattgtggctggggtaaaccaatttcagaaagtcttgaaagtgttagattggcatgtattcacacatctcccttaaatcgtttcaaatatatgtggaaacttctaagacaagaccaacaatccattatacttgtaaatgattcagcaatcctagaagtacgcaaggaaagtcaccccttggctttcgagtgtgacacactggataataatgaaatagtagcaactattaaattcacagtctatacgagcagtgaattgcagatgagaagatcaagcctaccagccactgatgcagccctaatttttgtgctgaccataggagtcattatctgtgtatttataattttcttattgatcttcataatcataaattgggcagcagtcaaggctttctggggggcaaaagcctctacacctgaggtacaatccgagcagagttctgtgagatacaaagattcaacttctcttgaccaattaccaacagaaatgcctggtgaagatgatgctttaagtgaatggaatgaatgatgtttgaatgatatataacaaaccaaaggatattacagaatattagattcattattacaaaaataaaatacacattgaaatactttaataatgttgcgatggattgccacagtgtgaaggaaatgcagtgtggggataggactattttatcagtgcatttttccagtacagttatcaaatattacttttaatttgttctcaacacttatttcaggtaatagcttggggatatttatctaaaggtacccccaacaaatcttctaagtgcatttttgatcactttgataacttcttaggtgatttgcctgttttgtcttaaataagaacaatgtaatatagaaatgctttacatattagactttctctcccctggaagcactgggttgaacttgctaaagtaaatcatactttagaatctcttcagggaatgtgacatacaaagtttgtaagacatgaagtaataacgataatgataacaataaatgcttacttagtga

SEQ ID NO: 185427 - DNA, 817 bp, Homo sapiens
  Payload ID: 16518
  Gene Symbol: SPACA3
  Gene Name: sperm acrosome associated 3
  Uniprot ID: Q8IXA5
  ENST ID: ENST00000269053
  CDS Start-End: 71-718
ggcaaggttgtgggggacatcttgagctgaagcagggttttgagccactgctgctgctgccattgtcaccatggtctcagctctgcggggagcacccctgatcagggtgcactcaagccctgtttcttctccttctgtgagtggaccacggaggctggtgagctgcctgtcatcccaaagctcagctctgagccagagtggtggtggctccacctctgccgccggcatagaagccaggagcagggctctcagaaggcggtggtgcccagctgggatcatgttgttggccctggtctgtctgctcagctgcctgctaccctccagtgaggccaagctctacggtcgttgtgaactggccagagtgctacatgacttcgggctggacggataccggggatacagcctggctgactgggtctgccttgcttatttcacaagcggtttcaacgcagctgctttggactacgaggctgatgggagcaccaacaacgggatcttccagatcaacagccggaggtggtgcagcaacctcaccccgaacgtccccaacgtgtgccggatgtactgctcagatttgttgaatcctaatctcaaggataccgttatctgtgccatgaagataacccaagagcctcagggtctgggttactgggaggcctggaggcatcactgccagggaaaagacctcactgaatgggtggatggctgtgacttctaggatggacggaaccatgcacagcaggctgggaaatgtggtttggttcctgacctaggcttgggaagacaagccagcgaataaaggatggttgaacgtgaa

SEQ ID NO: 185428 - DNA, 508 bp, Homo sapiens
  Payload ID: 16518
  Gene Symbol: SPACA3
  Gene Name: sperm acrosome associated 3
  ENST ID: ENST00000394638
  CDS Start-End: 71-409
ggcaaggttgtgggggacatcttgagctgaagcagggttttgagccactgctgctgctgccattgtcaccatggtctcagctctgcggggagcacccctgatcagggtctgccttgcttatttcacaagcggtttcaacgcagctgctttggactacgaggctgatgggagcaccaacaacgggatcttccagatcaacagccggaggtggtgcagcaacctcaccccgaacgtccccaacgtgtgccggatgtactgctcagatttgttgaatcctaatctcaaggataccgttatctgtgccatgaagataacccaagagcctcagggtctgggttactgggaggcctggaggcatcactgccagggaaaagacctcactgaatgggtggatggctgtgacttctaggatggacggaaccatgcacagcaggctgggaaatgtggtttggttcctgacctaggcttgggaagacaagccagcgaataaaggatggttgaacgtgaa

SEQ ID NO: 185429 - DNA, 949 bp, Homo sapiens
  Payload ID: 16518
  Gene Symbol: SPACA3
  Gene Name: sperm acrosome associated 3
  Uniprot ID: Q8IXA5
  ENST ID: ENST00000580599
  CDS Start-End: 410-850
ttgtgactaaaagctggcctagcaggccagggagtgcagctgcaggcgtgggggtggcaggagccgcagagccagagcagacagccgagaaaaaggtggacagtgtgaaagaaccagtggtctcgctctgttgcccaggctagagtgtactggcgtgatcatagctcactgcagcctcagactcctggacttgagaaatcctcctgccttagcctcctgcatatctgggactccaggggtgcactcaagccctgtttcttctccttctgtgagtggaccacggaggctggtgagctgcctgtcatcccaaagctcagctctgagccagagtggtggtggctccacctctgccgccggcatagaagccaggagcagggctctcagaaggcggtggtgcccagctgggatcatgttgttggccctggtctgtctgctcagctgcctgctaccctccagtgaggccaagctctacggtcgttgtgaactggccagagtgctacatgacttcgggctggacggataccggggatacagcctggctgactgggtctgccttgcttatttcacaagcggtttcaacgcagctgctttggactacgaggctgatgggagcaccaacaacgggatcttccagatcaacagccggaggtggtgcagcaacctcaccccgaacgtccccaacgtgtgccggatgtactgctcagatttgttgaatcctaatctcaaggataccgttatctgtgccatgaagataacccaagagcctcagggtctgggttactgggaggcctggaggcatcactgccagggaaaagacctcactgaatgggtggatggctgtgacttctaggatggacggaaccatgcacagcaggctgggaaatgtggtttggttcctgacctaggcttgggaagacaagccagcgaataaaggatggttgaacgtgaa

SEQ ID NO: 185430 - DNA, 972 bp, Homo sapiens
  Payload ID: 16519
  Gene Symbol: SPACA4
  Gene Name: sperm acrosome associated 4
  Uniprot ID: Q8TDM5
  ENST ID: ENST00000321762
  CDS Start-End: 237-611
ttccattcacagactcttgttgggcagcagccacccgctcacctccatccccaggacttagagggacgcagggcgttgggaacagaggacactccaggcgctgaccctgggaggccaggaccagggccaaagtcccgtgggcaagaggagtcctcagaggtccttcattcagcggttccgggaggtctgggaagcccacggcctggctggggcagggtcaacgccgccaggccgccatggtcctgtgctggctgctgcttctggtgatggctctgcccccaggcacgacgggcgtcaaggactgcgtcttctgtgagctcaccgactccatgcagtgtcctggtacctacatgcactgtggcgatgacgaggactgcttcacaggccacggggtcgccccgggcactggtccggtcatcaacaaaggctgcctgcgagccaccagctgcggccttgaggaacccgtcagctacaggggcgtcacctacagcctcaccaccaactgctgcaccggccgcctgtgtaacagagccccgagcagccagacagtgggggccaccaccagcctggcactggggctgggtatgctgcttcctccacgtttgctgtgaccaacagggaggacagggcctgggactgttctcccagatccgccactccccatgtccccatgtccttcccccactaaatggccagagaggccctggacaacctcttgcggccctggcttcatcccttctaaggctgtccaccaggagcccggtgctaggggaagcatccccaggcctgactgagcggcaggggagcacggcccgtgggtttgattgtattactctgttccactggttctaagacgcagagcttctcacatctcaatcaggatgcttctctccattggtagcactttagagtccatgaaatatggtaaaaaatatatatatatcataataaatgacagctgatgttcatgga

SEQ ID NO: 185431 - DNA, 648 bp, Homo sapiens
  Payload ID: 16520
  Gene Symbol: SPACA5
  Gene Name: sperm acrosome associated 5
  Uniprot ID: Q96QH8
  ENST ID: ENST00000304355
  CDS Start-End: 169-648
ggcagcaacagggttgcaggtgtaaaataacgggaaggcgggatgcgtggctaaattgctctgcgtgcacaaagagtaggagagcccagagttccagaatgcccctaattccgaacaccacagggtgagtctggagcaagtcacctgggagggcttacaggtgccataatgaaggcctggggcactgtggtagtgaccttggccacgctgatggttgtcactgtggatgccaagatctatgaacgctgcgagctggcggcaagactggagagagcagggctgaacggctacaagggctacggcgttggagactggctgtgcatggctcattatgagagtggctttgacaccgccttcgtggaccacaatcctgatggcagcagtgaatatggcattttccaactgaattctgcctggtggtgtgacaatggcattacacccaccaagaacctctgccacatggattgtcatgacctgctcaatcgccatattctggatgacatcaggtgtgccaagcagattgtgtcctcacagaatgggctttctgcctggacttcttggaggctacactgttctggccatgatttatctgaatggctcaaggggtgtgatatgcatgtgaaaattgatccaaaaattcatccatga

SEQ ID NO: 185432 - DNA, 571 bp, Homo sapiens
  Payload ID: 16520
  Gene Symbol: SPACA5
  Gene Name: sperm acrosome associated 5
  Uniprot ID: Q96QH8
  ENST ID: ENST00000376940
  CDS Start-End: 8-487
tgccataatgaaggcctggggcactgtggtagtgaccttggccacgctgatggttgtcactgtggatgccaagatctatgaacgctgcgagctggcggcaagactggagagagcagggctgaacggctacaagggctacggcgttggagactggctgtgcatggctcattatgagagtggctttgacaccgccttcgtggaccacaatcctgatggcagcagtgaatatggcattttccaactgaattctgcctggtggtgtgacaatggcattacacccaccaagaacctctgccacatggattgtcatgacctgctcaatcgccatattctggatgacatcaggtgtgccaagcagattgtgtcctcacagaatgggctttctgcctggacttcttggaggctacactgttctggccatgatttatctgaatggctcaaggggtgtgatatgcatgtgaaaattgatccaaaaattcatccatgactcagattcgaagagacagattttatcttcctttcatttctttctcttgtgcatttaataaaggatggtatctataaacaatgc

SEQ ID NO: 185433 - DNA, 595 bp, Homo sapiens
  Payload ID: 16521
  Gene Symbol: SPACA5B
  Gene Name: sperm acrosome associated 5B
  Uniprot ID: Q96QH8
  ENST ID: ENST00000304270
  CDS Start-End: 32-511
aagtcacctgggagggcttacaggtgccataatgaaggcctggggcactgtggtagtgaccttggccacgctgatggttgtcactgtggatgccaagatctatgaacgctgcgagctggcggcaagactggagagagcagggctgaacggctacaagggctacggcgttggagactggctgtgcatggctcattatgagagtggctttgacaccgccttcgtggaccacaatcctgatggcagcagtgaatatggcattttccaactgaattctgcctggtggtgtgacaatggcattacacccaccaagaacctctgccacatggattgtcatgacctgctcaatcgccatattctggatgacatcaggtgtgccaagcagattgtgtcctcacagaatgggctttctgcctggacttcttggaggctacactgttctggccatgatttatctgaatggctcaaggggtgtgatatgcatgtgaaaattgatccaaaaattcatccatgactcagattcgaagagacagattttatcttcctttcatttctttctcttgtgcatttaataaaggatggtatctataaacaatgc

SEQ ID NO: 185434 - DNA, 795 bp, Homo sapiens
  Payload ID: 16522
  Gene Symbol: SPACA7
  Gene Name: sperm acrosome associated 7
  Uniprot ID: Q96KW9
  ENST ID: ENST00000283550
  CDS Start-End: 68-655
gtcctggagaccaaggatgggaaactgtcaaccttcagaacgtccttctccctcagctggagggagcatggcagtgagccaaggagacgggaccctctgctttgtcctcctgctgtgctgttggcaagaaactgagctccggccgagaaccgtgattccaggttcacctactgaaataccattcagttcaaaacaggaggatatgtctgaattattagatgaaattctggtccaggagattttagatctgaataaaacaacaccgagcgaaatgccaagtacagcatcaacattatcaacaccgttacatgctggtattgatgagaattatcaagctggtggttctgagaattaccatgaattattagagaatttacaattctctcctggcattgaggtcaaaatttccaatgatgaagccaatgctaatgcaaatctccatggcgatccttctgagaattatcgtgggccacaggtgtctcctggcagtgagaagagtgtttccagtaaagaaaagaattcaaagaacactcagtatgaaaatctatccattctggaccaaatccttcaaaatattggaagatcttcaggaaacattttccataaagagcagcagaggaccagcgcacagaggaggagccaaggcagtcagtgaggccgcagccccagaccccctgcgcaggagaggagcctgctagaacccccacccaccagcctccggaacagggcacttgtgtgcacacgcccacgttctctgaaccattccacataaaggaaaatcgtttattcacacga

SEQ ID NO: 185435 - DNA, 807 bp, Homo sapiens
  Payload ID: 16522
  Gene Symbol: SPACA7
  Gene Name: sperm acrosome associated 7
  ENST ID: ENST00000375699
  CDS Start-End: 173-667
agtctcactctgttgccagactggagtgcagaggcgcctctcgatttcttgacctcatggtccgcccgcctcagcctcccaaagtgctgggactacaggcatgagccaccgtgcctggccaataacaccttaatcttcaggtgcaggctgtgaagatgggaaaaggctgtcaatgctctggcttcttcccactgacaggggacgtagtgggaatgggaatgaaccccaagatgaaattctggtccaggagattttagatctgaataaaacaacaccgagcgaaatgccaagtacagcatcaacattatcaacaccgttacatgctggtattgatgagaattatcaagctggtggttctgagaattaccatgaattattagagaatttacaattctctcctggcattgaggtcaaaatttccaatgatgaagccaatgctaatgcaaatctccatggcgatccttctgagaattatcgtgggccacaggtgtctcctggcagtgagaagagtgtttccagtaaagaaaagaattcaaagaacactcagtatgaaaatctatccattctggaccaaatccttcaaaatattggaagatcttcaggaaacattttccataaagagcagcagaggaccagcgcacagaggaggagccaaggcagtcagtgaggccgcagccccagaccccctgcgcaggagaggagcctgctagaacccccacccaccagcctccggaacagggcacttgtgtgcacacgcccacgttctctgaaccattccacataaaggaaaatcgtttattcacacga

SEQ ID NO: 185436 - DNA, 464 bp, Homo sapiens
  Payload ID: 16522
  Gene Symbol: SPACA7
  Gene Name: sperm acrosome associated 7
  ENST ID: ENST00000443541
  CDS Start-End: 130-464
ggcagtgagccaaggagacgggaccctctgctttgtcctcctgctgtgctgttggcaagaaactgagctccggccgagaaccgtgattccaggtctcgaggttcccaaagttcctggatctgccagcaaatgaccttcttcactcacctgtgggatggggacccggtgagccaggtagcaggttcacctactgaaataccattcagttcaaaacaggaggatatgtctgaattattagatgaaattctggtccaggagattttagatctgaataaaacaacaccgagcgaaatgccaagtacagcatcaacattatcaacaccgttacatgctggtattgatgagaattatcaagctggtggttctgagaattaccatgaattattagagaatttacaattctctcctggcattgaggtcaaaatttccaatgatgaagccaatgctaatgcaaatctccatgg

SEQ ID NO: 185437 - DNA, 699 bp, Homo sapiens
  Payload ID: 16522
  Gene Symbol: SPACA7
  Gene Name: sperm acrosome associated 7
  ENST ID: ENST00000414180
  CDS Start-End: 387-699
agaacgtccttctccctcagctggagggagcatggcagtgagccaaggagacgggaccctctgctttgtcctcctgctgtgctgttggcaagaaactgagctccggccgagaaccgtgattccaggtctcgaggttcccaaagttcctggatctgccagcaaatgaccttcttcactcacctgtgggatggggacccggtgagccaggtagcagagtctcactctgttgccagactggagtgcagaggcgcctctcgatttcttgacctcatggtccgcccgcctcagcctcccaaagtgctgggactacaggcatgagccaccgtgcctggccaataacaccttaatcttcaggtgcaggctgtgaagatgggaaaaggctgtcaatgctctggcttcttcccactgacaggggacgtagtgggaatgggaatgaaccccaaggttcacctactgaaataccattcagttcaaaacaggaggatatgtctgaattattagatgaaattctggtccaggagattttagatctgaataaaacaacaccgagcgaaatgccaagtacagcatcaacattatcaacaccgttacatgctggtattgatgagaattatcaagctggtggttctgagaattaccatgaattattagagaatttacaattctctcctggcattgaggtcaaaatttccaatgatg

SEQ ID NO: 185438 - DNA, 795 bp, Homo sapiens; identical to SEQ ID NO: 185434
  Payload ID: 16522
  Gene Symbol: SPACA7
  Gene Name: sperm acrosome associated 7
  Uniprot ID: Q96KW9
  ENST ID: ENST00000610393
  CDS Start-End: 68-655

SEQ ID NO: 185439 - DNA, 699 bp, Homo sapiens; identical to SEQ ID NO: 185437
  Payload ID: 16522
  Gene Symbol: SPACA7
  Gene Name: sperm acrosome associated 7
  ENST ID: ENST00000632976
  CDS Start-End: 387-699

SEQ ID NO: 185440 - DNA, 464 bp, Homo sapiens; identical to SEQ ID NO: 185436
  Payload ID: 16522
  Gene Symbol: SPACA7
  Gene Name: sperm acrosome associated 7
  ENST ID: ENST00000631374
  CDS Start-End: 130-464

SEQ ID NO: 185441 - DNA, 807 bp, Homo sapiens; identical to SEQ ID NO: 185435
  Payload ID: 16522
  Gene Symbol: SPACA7
  Gene Name: sperm acrosome associated 7
  ENST ID: ENST00000631817
  CDS Start-End: 173-667

SEQ ID NO: 185442 - DNA, 2007 bp, Homo sapiens
  Payload ID: 16523
  Gene Symbol: SPAM1
  Gene Name: sperm adhesion molecule 1 (PH-20 hyaluronidase, zona pellucida binding)
  Uniprot ID: P38567
  ENST ID: ENST00000223028
  CDS Start-End: 408-1937
acaggttaaatactgcagagctaatagattggagtgacttctgacctagtcacatcttaaaggaaaacttttcagtttttactttaaaaggatgctaatgactagccaatgctctaggaagacattgagaccagccaacttcttgccttgataactactgaagagacattgggtggctggattttgaaagcagacttctggttataggtgatgcaacttgaaaaacaatcctgaaacatgaaacaagaataataatatttaaatgtaacttaatcattatacctctttatccatcaaagtgaattcattccattccctttcatctgtgctcatactttgcatcagatattgggtaaaccaaagtgtgtaggaagaaataaatgttttcatagtcattactctttacaatgggagtgctaaaattcaagcacatctttttcagaagctttgttaaatcaagtggagtatcccagatagttttcaccttccttctgattccatgttgcttgactctgaatttcagagcacctcctgttattccaaatgtgcctttcctctgggcctggaatgccccaagtgaattttgtcttggaaaatttgatgagccactagatatgagcctcttctctttcataggaagcccccgaataaacgccaccgggcaaggtgttacaatattttatgttgatagacttggctactatccttacatagattcaatcacaggagtaactgtgaatggaggaatcccccagaagatttccttacaagaccatctggacaaagctaagaaagacattacattttatatgccagtagacaatttgggaatggctgttattgactgggaagaatggagacccacttgggcaagaaactggaaacctaaagatgtttacaagaataggtctattgaattggttcagcaacaaaatgtacaacttagtctcacagaggccactgagaaagcaaaacaagaatttgaaaaggcagggaaggatttcctggtagagactataaaattgggaaaattacttcggccaaatcacttgtggggttattatctttttccggattgttacaaccatcactataagaaacccggttacaatggaagttgcttcaatgtagaaataaaaagaaatgatgatctcagctggttgtggaatgaaagcactgctctttacccatccatttatttgaacactcagcagtctcctgtagctgctacactctatgtgcgcaatcgagttcgggaagccatcagagtttccaaaatacctgatgcaaaaagtccacttccggtttttgcatatacccgcatagtttttactgatcaagttttgaaattcctttctcaagatgaacttgtgtatacatttggcgaaactgttgctctgggtgcttctggaattgtaatatggggaaccctcagtataatgcgaagtatgaaatcttgcttgctcctagacaattacatggagactatactgaatccttacataatcaacgtcacactagcagccaaaatgtgtagccaagtgctttgccaggagcaaggagtgtgtataaggaaaaactggaattcaagtgactatcttcacctcaacccagataattttgctattcaacttgagaaaggtggaaagttcacagtacgtggaaaaccgacacttgaagacctggagcaattttctgaaaaattttattgcagctgttatagcaccttgagttgtaaggagaaagctgatgtaaaagacactgatgctgttgatgtgtgtattgctgatggtgtctgtatagatgcttttctaaaacctcccatggagacagaagaacctcaaattttctacaatgcttcaccctccacactatctgccacaatgttcattgttagtattttgtttcttatcatttcttctgtagcgagtttgtaattgcgcaggttagctgaaatgaacaatatgtccatcttaaagtgtgctttttcgactaattaaatctttg

SEQ ID NO: 185443 - DNA, 2349 bp, Homo sapiens
  Payload ID: 16523
  Gene Symbol: SPAM1
  Gene Name: sperm adhesion molecule 1 (PH-20 hyaluronidase, zona pellucida binding)
  Uniprot ID: P38567
  ENST ID: ENST00000340011
  CDS Start-End: 358-1893
aggtggttagcagcacctcataaggtccttcctagcaagggatgctaatgactagccaatgctctaggaagacattgagaccagccaacttcttgccttgataactactgaagagacattgggtggctggattttgaaagcagacttctggttataggtgatgcaacttgaaaaacaatcctgaaacatgaaacaagaataataatatttaaatgtaacttaatcattatacctctttatccatcaaagtgaattcattccattccctttcatctgtgctcatactttgcatcagatattgggtaaaccaaagtgtgtaggaagaaataaatgttttcatagtcattactctttacaatgggagtgctaaaattcaagcacatctttttcagaagctttgttaaatcaagtggagtatcccagatagttttcaccttccttctgattccatgttgcttgactctgaatttcagagcacctcctgttattccaaatgtgcctttcctctgggcctggaatgccccaagtgaattttgtcttggaaaatttgatgagccactagatatgagcctcttctctttcataggaagcccccgaataaacgccaccgggcaaggtgttacaatattttatgttgatagacttggctactatccttacatagattcaatcacaggagtaactgtgaatggaggaatcccccagaagatttccttacaagaccatctggacaaagctaagaaagacattacattttatatgccagtagacaatttgggaatggctgttattgactgggaagaatggagacccacttgggcaagaaactggaaacctaaagatgtttacaagaataggtctattgaattggttcagcaacaaaatgtacaacttagtctcacagaggccactgagaaagcaaaacaagaatttgaaaaggcagggaaggatttcctggtagagactataaaattgggaaaattacttcggccaaatcacttgtggggttattatctttttccggattgttacaaccatcactataagaaacccggttacaatggaagttgcttcaatgtagaaataaaaagaaatgatgatctcagctggttgtggaatgaaagcactgctctttacccatccatttatttgaacactcagcagtctcctgtagctgctacactctatgtgcgcaatcgagttcgggaagccatcagagtttccaaaatacctgatgcaaaaagtccacttccggtttttgcatatacccgcatagtttttactgatcaagttttgaaattcctttctcaagatgaacttgtgtatacatttggcgaaactgttgctctgggtgcttctggaattgtaatatggggaaccctcagtataatgcgaagtatgaaatcttgcttgctcctagacaattacatggagactatactgaatccttacataatcaacgtcacactagcagccaaaatgtgtagccaagtgctttgccaggagcaaggagtgtgtataaggaaaaactggaattcaagtgactatcttcacctcaacccagataattttgctattcaacttgagaaaggtggaaagttcacagtacgtggaaaaccgacacttgaagacctggagcaattttctgaaaaattttattgcagctgttatagcaccttgagttgtaaggagaaagctgatgtaaaagacactgatgctgttgatgtgtgtattgctgatggtgtctgtatagatgcttttctaaaacctcccatggagacagaagaacctcaaattttctacaatgcttcaccctccacactatctgccacaatgttcatttggaggctggaagtctgggatcaaggtattagcagaattggtttcttctgagagtcatgagggaaaaatgtgtttcaggcctcttcccttggcttacaggaaatgaaaaaaccatgactatcatcaccaacatccttgggtattaagtgcagtcactctcctagatgctgtggggagaaggcaagttacaaagatagaccttccctcaagataatcagattttcatggtattatccttaacctttttgacatcatggaggctttgggaatctgatgaagcctatcaattttcttccagaagatatttatataagattataagaaaaattatgtacacagcttattttattgcattggatcaaaatgccatttataaagaattatgccttttccatcaattttagcatggaaaaataatttcaggcaatatgcttaaaaattgggggaagacaaaagaaatccatatcgtgtaaataaaaataaattttggttttgctcaaaaataaa

SEQ ID NO: 185444 - DNA, 1860 bp, Homo sapiens
  Payload ID: 16523
  Gene Symbol: SPAM1
  Gene Name: sperm adhesion molecule 1 (PH-20 hyaluronidase, zona pellucida binding)
  Uniprot ID: P38567
  ENST ID: ENST00000402183
  CDS Start-End: 325-1860
tcaaagggatgctaatgactagccaatgctctaggaagacattgagaccagccaacttcttgccttgataactactgaagagacattgggtggctggattttgaaagcagacttctggttataggtgatgcaacttgaaaaacaatcctgaaacatgaaacaagaataataatatttaaatgtaacttaatcattatacctctttatccatcaaagtgaattcattccattccctttcatctgtgctcatactttgcatcagatattgggtaaaccaaagtgtgtaggaagaaataaatgttttcatagtcattactctttacaatgggagtgctaaaattcaagcacatctttttcagaagctttgttaaatcaagtggagtatcccagatagttttcaccttccttctgattccatgttgcttgactctgaatttcagagcacctcctgttattccaaatgtgcctttcctctgggcctggaatgccccaagtgaattttgtcttggaaaatttgatgagccactagatatgagcctcttctctttcataggaagcccccgaataaacgccaccgggcaaggtgttacaatattttatgttgatagacttggctactatccttacatagattcaatcacaggagtaactgtgaatggaggaatcccccagaagatttccttacaagaccatctggacaaagctaagaaagacattacattttatatgccagtagacaatttgggaatggctgttattgactgggaagaatggagacccacttgggcaagaaactggaaacctaaagatgtttacaagaataggtctattgaattggttcagcaacaaaatgtacaacttagtctcacagaggccactgagaaagcaaaacaagaatttgaaaaggcagggaaggatttcctggtagagactataaaattgggaaaattacttcggccaaatcacttgtggggttattatctttttccggattgttacaaccatcactataagaaacccggttacaatggaagttgcttcaatgtagaaataaaaagaaatgatgatctcagctggttgtggaatgaaagcactgctctttacccatccatttatttgaacactcagcagtctcctgtagctgctacactctatgtgcgcaatcgagttcgggaagccatcagagtttccaaaatacctgatgcaaaaagtccacttccggtttttgcatatacccgcatagtttttactgatcaagttttgaaattcctttctcaagatgaacttgtgtatacatttggcgaaactgttgctctgggtgcttctggaattgtaatatggggaaccctcagtataatgcgaagtatgaaatcttgcttgctcctagacaattacatggagactatactgaatccttacataatcaacgtcacactagcagccaaaatgtgtagccaagtgctttgccaggagcaaggagtgtgtataaggaaaaactggaattcaagtgactatcttcacctcaacccagataattttgctattcaacttgagaaaggtggaaagttcacagtacgtggaaaaccgacacttgaagacctggagcaattttctgaaaaattttattgcagctgttatagcaccttgagttgtaaggagaaagctgatgtaaaagacactgatgctgttgatgtgtgtattgctgatggtgtctgtatagatgcttttctaaaacctcccatggagacagaagaacctcaaattttctacaatgcttcaccctccacactatctgccacaatgttcatttggaggctggaagtctgggatcaaggtattagcagaattggtttcttctga

SEQ ID NO: 185445 - DNA, 760 bp, Homo sapiens
  Payload ID: 16523
  Gene Symbol: SPAM1
  Gene Name: sperm adhesion molecule 1 (PH-20 hyaluronidase, zona pellucida binding)
  ENST ID: ENST00000413927
  CDS Start-End: 520-760
ttccagttgtcctgagagtgatgactggctccaccttgatgtggctcacataaattcagaaagtatgatagcagtgtaggtggttagcagcacctcataaggtccttcctagcaaggttaaatactgcagagctaatagattggagtgacttctgacctagtcacatcttaaaggaaaacttttcagtttttactttaaaaggatgctaatgactagccaatgctctaggaagacattgagaccagccaacttcttgccttgataactactgaagagacattgggtggctggattttgaaagcagacttctggttataggtgatgcaacttgaaaaacaatcctgaaacatgaaacaagaataataatatttaaatgtaacttaatcattatacctctttatccatcaaagtgaattcattccattccctttcatctgtgctcatactttgcatcagatattgggtaaaccaaagtgtgtaggaagaaataaatgttttcatagtcattactctttacaatgggagtgctaaaattcaagcacatctttttcagaagctttgttaaatcaagtggagtatcccagatagttttcaccttccttctgattccatgttgcttgactctgaatttcagagcacctcctgttattccaaatgtgcctttcctctgggcctggaatgccccaagtgaattttgtcttggaaaatttgatgagccactagatatgagcctcttctctttcataggaagcccccgaa

SEQ ID NO: 185446 - DNA, 2220 bp, Homo sapiens
  Payload ID: 16523
  Gene Symbol: SPAM1
  Gene Name: sperm adhesion molecule 1 (PH-20 hyaluronidase, zona pellucida binding)
  Uniprot ID: P38567
  ENST ID: ENST00000439500
  CDS Start-End: 614-2143
atgggagaatggggaacgtggaggtaaaggagggaacctaatgtaagaatactgaatttgccaattaaggcaccagctgtgactacttcatacaggaatggggacatgcctgatgccatagggtctaattgacttgagaatgtgaaaggaaaataaaaactcagaaccccaattcatcatgccaaaaggaaaaaaaaattaagctgaaatgttaaatactgcagagctaatagattggagtgacttctgacctagtcacatcttaaaggaaaacttttcagtttttactttaaaaggatgctaatgactagccaatgctctaggaagacattgagaccagccaacttcttgccttgataactactgaagagacattgggtggctggattttgaaagcagacttctggttataggtgatgcaacttgaaaaacaatcctgaaacatgaaacaagaataataatatttaaatgtaacttaatcattatacctctttatccatcaaagtgaattcattccattccctttcatctgtgctcatactttgcatcagatattgggtaaaccaaagtgtgtaggaagaaataaatgttttcatagtcattactctttacaatgggagtgctaaaattcaagcacatctttttcagaagctttgttaaatcaagtggagtatcccagatagttttcaccttccttctgattccatgttgcttgactctgaatttcagagcacctcctgttattccaaatgtgcctttcctctgggcctggaatgccccaagtgaattttgtcttggaaaatttgatgagccactagatatgagcctcttctctttcataggaagcccccgaataaacgccaccgggcaaggtgttacaatattttatgttgatagacttggctactatccttacatagattcaatcacaggagtaactgtgaatggaggaatcccccagaagatttccttacaagaccatctggacaaagctaagaaagacattacattttatatgccagtagacaatttgggaatggctgttattgactgggaagaatggagacccacttgggcaagaaactggaaacctaaagatgtttacaagaataggtctattgaattggttcagcaacaaaatgtacaacttagtctcacagaggccactgagaaagcaaaacaagaatttgaaaaggcagggaaggatttcctggtagagactataaaattgggaaaattacttcggccaaatcacttgtggggttattatctttttccggattgttacaaccatcactataagaaacccggttacaatggaagttgcttcaatgtagaaataaaaagaaatgatgatctcagctggttgtggaatgaaagcactgctctttacccatccatttatttgaacactcagcagtctcctgtagctgctacactctatgtgcgcaatcgagttcgggaagccatcagagtttccaaaatacctgatgcaaaaagtccacttccggtttttgcatatacccgcatagtttttactgatcaagttttgaaattcctttctcaagatgaacttgtgtatacatttggcgaaactgttgctctgggtgcttctggaattgtaatatggggaaccctcagtataatgcgaagtatgaaatcttgcttgctcctagacaattacatggagactatactgaatccttacataatcaacgtcacactagcagccaaaatgtgtagccaagtgctttgccaggagcaaggagtgtgtataaggaaaaactggaattcaagtgactatcttcacctcaacccagataattttgctattcaacttgagaaaggtggaaagttcacagtacgtggaaaaccgacacttgaagacctggagcaattttctgaaaaattttattgcagctgttatagcaccttgagttgtaaggagaaagctgatgtaaaagacactgatgctgttgatgtgtgtattgctgatggtgtctgtatagatgcttttctaaaacctcccatggagacagaagaacctcaaattttctacaatgcttcaccctccacactatctgccacaatgttcattgttagtattttgtttcttatcatttcttctgtagcgagtttgtaattgcgcaggttagctgaaatgaacaatatgtccatcttaaagtgtgctttttcgactaattaaatctttgaaaagaa

SEQ ID NO: 185447 - DNA, 2154 bp, Homo sapiens
  Payload ID: 16523
  Gene Symbol: SPAM1
  Gene Name: sperm adhesion molecule 1 (PH-20 hyaluronidase, zona pellucida binding)
  Uniprot ID: P38567
  ENST ID: ENST00000460182
  CDS Start-End: 548-2077
gatagcagtgtaggtggttagcagcacctcataaggtccttcctagcaaggtaacagtacaagctttttctaaaaatcttgatgtatacctgatctcctggttgaaagagttggcttgatggattttttcctataagttctttttatgtctagatttttatgttccacttgacctgatgattgaggatggtatgaagtaagaagttttaatgagtaatccagagattttggatgctaatgactagccaatgctctaggaagacattgagaccagccaacttcttgccttgataactactgaagagacattgggtggctggattttgaaagcagacttctggttataggtgatgcaacttgaaaaacaatcctgaaacatgaaacaagaataataatatttaaatgtaacttaatcattatacctctttatccatcaaagtgaattcattccattccctttcatctgtgctcatactttgcatcagatattgggtaaaccaaagtgtgtaggaagaaataaatgttttcatagtcattactctttacaatgggagtgctaaaattcaagcacatctttttcagaagctttgttaaatcaagtggagtatcccagatagttttcaccttccttctgattccatgttgcttgactctgaatttcagagcacctcctgttattccaaatgtgcctttcctctgggcctggaatgccccaagtgaattttgtcttggaaaatttgatgagccactagatatgagcctcttctctttcataggaagcccccgaataaacgccaccgggcaaggtgttacaatattttatgttgatagacttggctactatccttacatagattcaatcacaggagtaactgtgaatggaggaatcccccagaagatttccttacaagaccatctggacaaagctaagaaagacattacattttatatgccagtagacaatttgggaatggctgttattgactgggaagaatggagacccacttgggcaagaaactggaaacctaaagatgtttacaagaataggtctattgaattggttcagcaacaaaatgtacaacttagtctcacagaggccactgagaaagcaaaacaagaatttgaaaaggcagggaaggatttcctggtagagactataaaattgggaaaattacttcggccaaatcacttgtggggttattatctttttccggattgttacaaccatcactataagaaacccggttacaatggaagttgcttcaatgtagaaataaaaagaaatgatgatctcagctggttgtggaatgaaagcactgctctttacccatccatttatttgaacactcagcagtctcctgtagctgctacactctatgtgcgcaatcgagttcgggaagccatcagagtttccaaaatacctgatgcaaaaagtccacttccggtttttgcatatacccgcatagtttttactgatcaagttttgaaattcctttctcaagatgaacttgtgtatacatttggcgaaactgttgctctgggtgcttctggaattgtaatatggggaaccctcagtataatgcgaagtatgaaatcttgcttgctcctagacaattacatggagactatactgaatccttacataatcaacgtcacactagcagccaaaatgtgtagccaagtgctttgccaggagcaaggagtgtgtataaggaaaaactggaattcaagtgactatcttcacctcaacccagataattttgctattcaacttgagaaaggtggaaagttcacagtacgtggaaaaccgacacttgaagacctggagcaattttctgaaaaattttattgcagctgttatagcaccttgagttgtaaggagaaagctgatgtaaaagacactgatgctgttgatgtgtgtattgctgatggtgtctgtatagatgcttttctaaaacctcccatggagacagaagaacctcaaattttctacaatgcttcaccctccacactatctgccacaatgttcattgttagtattttgtttcttatcatttcttctgtagcgagtttgtaattgcgcaggttagctgaaatgaacaatatgtccatcttaaagtgtgctttttcgactaattaaatctttgaaaagaa

SEQ ID NO: 185448 - DNA, 3948 bp, Homo sapiens
  Payload ID: 16524
  Gene Symbol: SPECC1
  Gene Name: sperm antigen with calponin homology and coiled-coil domains 1
  Uniprot ID: Q5M775
  ENST ID: ENST00000261503
  CDS Start-End: 52-3258
agaagcagaaaaggttggataaaagataaggacagacccacgaagtcaagcatgcggagtgcagccaagccctggaacccagccatcagagcagggggccacggcccagaccgggtgcggcctctgcctgcagcctcttccggcatgaagagttctaagtcttcaacttccttggcttttgagtcccgactcagcaggctcaagagggccagcagtgaggacacgctcaacaagccaggaagtaccgctgcatcgggggtggttcgcctgaagaagaccgccactgccggagccatctcggagctcacggagagccgcctgaggagcggcacaggggcctttacaacaactaaacggacaggcattccagccccacgggaattttcagtaactgtctcaagagagaggtctgtgccacgtggtccctccaaccccaggaaatcagtgtccagtccaacttcttccaacactcccactcctacgaaacacctgaggaccccttccacaaagcccaagcaagagaatgaaggtggagaaaaggctgcgcttgagtcccaagttcgggaacttttggcagaagccaaagcaaaagatagtgaaattaacaggcttcgaagtgaactaaagaaatacaaagagaaaaggactctgaacgctgaggggactgatgctttgggcccaaatgtcgatggaacatcagtctccccaggtgacacggaacctatgataagagctcttgaggagaagaacaagaactttcagaaagagctttccgatctagaggaagaaaaccgggtcctgaaggagaaactgatctatcttgagcactccccaaattcagaaggggcagcaagtcacactggcgacagcagctgcccaacatccataactcaagagtcaagcttcggaagcccaactggaaatcagatgtccagtgacattgatgagtataaaaaaaacatacatggaaatgcattacggacatcaggctcctcaagtagcgatgttaccaaagcttctttgtcgccagatgcttccgactttgagcacattacagcagagacaccctcaaggcccctgtcctccaccagtaacccctttaagagttcaaagtgttctactgctgggagttccccaaacagcgtaagtgaattgtccctggcttccctcacagagaagatacaaaagatggaagaaaaccaccatagcactgcagaagaactacaggctactctacaagaattatcagaccagcaacaaatggtacaggaattgacagctgaaaatgagaagctggtggatgaaaagacgattttagagacatcctttcatcagcatcgagagagggcagagcagctaagtcaagaaaatgagaagctgatgaatcttttacaagagcgagtaaagaatgaagagcccaccactcaggaaggaaaaattattgaactggagcagaagtgcacaggtattcttgaacagggccgctttgaaagagagaagctactcaacattcagcagcagttgacctgtagcttgcggaaggttgaggaagaaaaccaaggagctttagaaatgattaaacgtctgaaggaagaaaatgaaaaactgaatgagtttctagaactggaacggcataataataacatgatggccaaaactttggaagagtgtagagttaccttggaagggctaaaaatggagaatggatctttgaagtctcatttgcagggtgagaagcagaaagccacagaggccagtgctgtggagcagacggcagagagctgcgaagttcaagaaatgttgaaagtagcccgagcagagaaagatctactggaactgtcttgcaatgagctcagacaagaattactaaaggcaaacggtgaaattaaacatgtttccagtctgctggccaaggtggaaaaggattattcatacctgaaggagatatgtgatcaccaagccgaacagctgagcagaaccagcctaaagctgcaagaaaaagcatcagagagtgatgcagagatcaaagacatgaaagaaaccatatttgaattggaagatcaggtggaacagcaccgggctgtcaagttacacaataatcaactcatcagtgagctagaaagtagtgtgatcaagctggaggaacagaagtcagacctggagaggcagctgaagactctgaccaagcagatgaaggaggagaccgaggaatggaggcggttccaggcggatctgcagaccgcagtggtggtggccaatgacatcaagtgtgaggcccagcaggagctgcgcaccgtgaagaggaaactgctggaggaggaggagaagaatgcccggttgcagaaggagctgggggatgtgcagggccacggcagggtggtcaccagcagagccgcccctccacctgtggatgaagagccagagtcctctgaggtcgatgctgctggtcggtggcctggtgtctgtgttagcagaacatctccaacacccccagagtcggcaaccaccgttaagtcacttatcaagtcatttgacttgggacgcccaggtggagctggacagaatatttctgtccataagacccccagaagtcccctaagtgggataccagtgaggactgctccagcagctgctgtctctccaatgcagaggcattcgacttacagcagtgtgcggccagccagcagaggggtgactcaacgcttggaccttcctgaccttcccctctcagatattctaaagggaaggactgagaccctgaagccagacccccacctccgcaagagtccctcactagagtcactgagcagacccccgtctctgggctttggggacacaagactgctgagtgcttccacccgggcatggaaaccacaaagcaaactcagtgtggaaagaaaagaccctctggcagccttggcccgggaatacggtggttccaagcgcaatgctctactgaaatggtgccagaagaagacacaaggttatgcgaacattgacatcaccaatttcagcagcagctggagcgatggcctggccttctgtgctctgctccacacctacctgcctgcccacatcccctaccaggagctgaatagtcaggagaaaaagaggaatctcttgttggcatttgaagcggctgaaagtgtaggcatcaaacccagcctggaactcagcgagatgctgtacacagaccggcccgactggcagagtgtgatgcagtacgtggcccaaatctacaagtactttgagacgtaaccctggagggcctggggcagccaccattgccacctactgcagcttttcctggaagcgcctgattactgtccactgaccctgctctgcccaccacccagctgcctagacttcaaagacaggctcaatccaagtggaccaacacccaaataagaaacagagtgggtcccacgatgtacctgtctgaaatgcaaatgcagctggactgtaaattggggactctttgatctcttgtgggatgcttctaaagagggcagcctccctccttccagaccaagaccccacacccaggcttgttttgctgattatattgggtggctgaacgaacacattatctgcagaaattcagacaaagaacatctccaaatcagtcttttggttgctgttgttaaaaatatcccggctttgcctttatgaaacctttgcccttggctgggtgtggtagctcgtggctgtaatcccagcactttaggaagccaaggcagtaggatcgtttgagcccaggagttcgaggctgcagtgagctatgagcataccactgcactccagcctgtgtgaaagagccagaccctgtctcaaaaaaatgataaaacccaaaactttgcccttgtgaaccctcccttcccccctccccccccaaaaaaaaacaacaaaacacaaaaaataaacatttgttccagggcaacctggaaa

SEQ ID NO: 185449 - DNA, 2982 bp, Homo sapiens
  Payload ID: 16524
  Gene Symbol: SPECC1
  Gene Name: sperm antigen with calponin homology and coiled-coil domains 1
  Uniprot ID: Q5M775
  ENST ID: ENST00000395522
  CDS Start-End: 115-2226
ctggagcggacccgccggacgcaaccgcctcgccagccggagccagcgcgagctcggcacggtggacacccggtccgaggccggcaagccggctggtgcccgagtcggccaagcatgggcaaccactcaggacggcccgaggatccggaaccaggggcctttacaacaactaaacggacaggcattccagccccacgggaattttcagtaactgtctcaagagagaggtctgtgccacgtggtccctccaaccccaggaaatcagtgtccagtccaacttcttccaacactcccactcctacgaaacacctgaggaccccttccacaaagcccaagcaagagaatgaaggtggagaaaaggctgcgcttgagtcccaagttcgggaacttttggcagaagccaaagcaaaagatagtgaaattaacaggcttcgaagtgaactaaagaaatacaaagagaaaaggactctgaacgctgaggggactgatgctttgggcccaaatgtcgatggaacatcagtctccccaggtgacacggaacctatgataagagctcttgaggagaagaacaagaactttcagaaagagctttccgatctagaggaagaaaaccgggtcctgaaggagaaactgatctatcttgagcactccccaaattcagaaggggcagcaagtcacactggcgacagcagctgcccaacatccataactcaagagtcaagcttcggaagcccaactggaaatcagatgtccagtgacattgatgagtataaaaaaaacatacatggaaatgcattacggacatcaggctcctcaagtagcgatgttaccaaagcttctttgtcgccagatgcttccgactttgagcacattacagcagagacaccctcaaggcccctgtcctccaccagtaacccctttaagagttcaaagtgttctactgctgggagttccccaaacagcgtaagtgaattgtccctggcttccctcacagagaagatacaaaagatggaagaaaaccaccatagcactgcagaagaactacaggctactctacaagaattatcagaccagcaacaaatggtacaggaattgacagctgaaaatgagaagctggtggatgaaaagacgattttagagacatcctttcatcagcatcgagagagggcagagcagctaagtcaagaaaatgagaagctgatgaatcttttacaagagcgagtaaagaatgaagagcccaccactcaggaaggaaaaattattgaactggagcagaagtgcacaggtattcttgaacagggccgctttgaaagagagaagctactcaacattcagcagcagttgacctgtagcttgcggaaggttgaggaagaaaaccaaggagctttagaaatgattaaacgtctgaaggaagaaaatgaaaaactgaatgagtttctagaactggaacggcataataataacatgatggccaaaactttggaagagtgtagagttaccttggaagggctaaaaatggagaatggatctttgaagtctcatttgcagggtgagaagcagaaagccacagaggccagtgctgtggagcagacggcagagagctgcgaagttcaagaaatgttgaaagtagcccgagcagagaaagatctactggaactgtcttgcaatgagctcagacaagaattactaaaggcaaacggtgaaattaaacatgtttccagtctgctggccaaggtggaaaaggattattcatacctgaaggagatatgtgatcaccaagccgaacagctgagcagaaccagcctaaagctgcaagaaaaagcatcagagagtgatgcagagatcaaagacatgaaagaaaccatatttgaattggaagatcaggtggaacagcaccgggctgtcaagttacacaataatcaactcatcagtgagctagaaagtagtgtgatcaagctggaggaacagaagtcagacctggagaggcagctgaagactctgaccaagcagatgaaggaggagaccgaggaatggaggcggttccaggcggatctgcagaccgcagtggtggtggccaatgacatcaagtgtgaggcccagcaggagctgcgcaccgtgaagaggaaactgctggaggaggaggagaagaatgcccggttgcagaaggagctgggggatgtgcagggccacggcagggtggtcaccagcagagccgcccctccgtgagtctgctccctgggctctgtcagctagcagagcatttggtggaagaaagacagcccagctcttgccatgattgggagccgcagccatctctagatgaaagggggaatgtgtagaggagaaattgcctctttataaagagcccagttgtctccttgtgacattctctgtttctcagagtcattgccgtcgagtctctgctttttgtccacattttgggatcagcttactgcatgatcaaagatgatgtttccctctttttacttttcctcagaagattgagctgtcttttatttggagaataaaatgaagttctgaaaaaaacaaagtacaagtcttatgaaaagttatttgcagctggagtgctgaaaagggcacagtggcagagcagatgcagagctgggtacagcgcaggcccgagttcttttgttttttgttgttgttgttgttgttgttttgttttgttttttttttttttttgagacagagtttcactcttgttgcccaggctggagtgcaatggtacgatctcggctcactgcaacctctgcctcccgggttcaagtgattctcttgcctcagccttccaagtagctggaattacaggcgcctgccaccacacccagctaatttttgtattgttagtagagatggggtttcaccgtgttggccaggctgctcttgaactcctgacctcaggtgatccccacctcagcctcccaaagtgctgggattacagacatgagccaccgcacccag

SEQ ID NO: 185450 - DNA, 2536 bp, Homo sapiens
  Payload ID: 16524
  Gene Symbol: SPECC1
  Gene Name: sperm antigen with calponin homology and coiled-coil domains 1
  Uniprot ID: Q5M775
  ENST ID: ENST00000395525
  CDS Start-End: 109-2238
cggacccgccggacgcaaccgcctcgccagccggagccagcgcgagctcggcacggtggacacccggtccgaggccggcaagccggctggtgcccgagtcggccaagcatgggcaaccactcaggacggcccgaggatccggaaccaggggcctttacaacaactaaacggacaggcattccagccccacgggaattttcagtaactgtctcaagagagaggtctgtgccacgtggtccctccaaccccaggaaatcagtgtccagtccaacttcttccaacactcccactcctacgaaacacctgaggaccccttccacaaagcccaagcaagagaatgaaggtggagaaaaggctgcgcttgagtcccaagttcgggaacttttggcagaagccaaagcaaaagatagtgaaattaacaggcttcgaagtgaactaaagaaatacaaagagaaaaggactctgaacgctgaggggactgatgctttgggcccaaatgtcgatggaacatcagtctccccaggtgacacggaacctatgataagagctcttgaggagaagaacaagaactttcagaaagagctttccgatctagaggaagaaaaccgggtcctgaaggagaaactgatctatcttgagcactccccaaattcagaaggggcagcaagtcacactggcgacagcagctgcccaacatccataactcaagagtcaagcttcggaagcccaactggaaatcagatgtccagtgacattgatgagtataaaaaaaacatacatggaaatgcattacggacatcaggctcctcaagtagcgatgttaccaaagcttctttgtcgccagatgcttccgactttgagcacattacagcagagacaccctcaaggcccctgtcctccaccagtaacccctttaagagttcaaagtgttctactgctgggagttccccaaacagcgtaagtgaattgtccctggcttccctcacagagaagatacaaaagatggaagaaaaccaccatagcactgcagaagaactacaggctactctacaagaattatcagaccagcaacaaatggtacaggaattgacagctgaaaatgagaagctggtggatgaaaagacgattttagagacatcctttcatcagcatcgagagagggcagagcagctaagtcaagaaaatgagaagctgatgaatcttttacaagagcgagtaaagaatgaagagcccaccactcaggaaggaaaaattattgaactggagcagaagtgcacaggtattcttgaacagggccgctttgaaagagagaagctactcaacattcagcagcagttgacctgtagcttgcggaaggttgaggaagaaaaccaaggagctttagaaatgattaaacgtctgaaggaagaaaatgaaaaactgaatgagtttctagaactggaacggcataataataacatgatggccaaaactttggaagagtgtagagttaccttggaagggctaaaaatggagaatggatctttgaagtctcatttgcagggtgagaagcagaaagccacagaggccagtgctgtggagcagacggcagagagctgcgaagttcaagaaatgttgaaagtagcccgagcagagaaagatctactggaactgtcttgcaatgagctcagacaagaattactaaaggcaaacggtgaaattaaacatgtttccagtctgctggccaaggtggaaaaggattattcatacctgaaggagatatgtgatcaccaagccgaacagctgagcagaaccagcctaaagctgcaagaaaaagcatcagagagtgatgcagagatcaaagacatgaaagaaaccatatttgaattggaagatcaggtggaacagcaccgggctgtcaagttacacaataatcaactcatcagtgagctagaaagtagtgtgatcaagctggaggaacagaagtcagacctggagaggcagctgaagactctgaccaagcagatgaaggaggagaccgaggaatggaggcggttccaggcggatctgcagaccgcagtggtggtggccaatgacatcaagtgtgaggcccagcaggagctgcgcaccgtgaagaggaaactgctggaggaggaggagaagaatgcccggttgcagaaggagctgggggatgtgcagggccacggcagggtggtcaccagcagagccgcccctccctccctgggctctgtcagctagcagagcatttggtggaagaaagacagcccagctcttgccatgattgggagccgcagccatctctagatgaaagggggaatgtgtagaggagaaattgcctctttataaagagcccagttgtctccttgtgacattctctgtttctcagagtcattgccgtcgagtctctgctttttgtccacattttgggatcagcttactgcatgatcaaagatgatgtttccctctttttacttttcctcagaagattgagctgtcttttatttggagaataaaatgaagttctgaaaaaaacaaa

SEQ ID NO: 185451 - DNA, 3363 bp, Homo sapiens
  Payload ID: 16524
  Gene Symbol: SPECC1
  Gene Name: sperm antigen with calponin homology and coiled-coil domains 1
  Uniprot ID: Q5M775
  ENST ID: ENST00000395527
  CDS Start-End: 84-3290
atcagtgagcgcccggagccgtggccgctgggggttgcggcggcgctgagccagcggggccggacagacccacgaagtcaagcatgcggagtgcagccaagccctggaacccagccatcagagcagggggccacggcccagaccgggtgcggcctctgcctgcagcctcttccggcatgaagagttctaagtcttcaacttccttggcttttgagtcccgactcagcaggctcaagagggccagcagtgaggacacgctcaacaagccaggaagtaccgctgcatcgggggtggttcgcctgaagaagaccgccactgccggagccatctcggagctcacggagagccgcctgaggagcggcacaggggcctttacaacaactaaacggacaggcattccagccccacgggaattttcagtaactgtctcaagagagaggtctgtgccacgtggtccctccaaccccaggaaatcagtgtccagtccaacttcttccaacactcccactcctacgaaacacctgaggaccccttccacaaagcccaagcaagagaatgaaggtggagaaaaggctgcgcttgagtcccaagttcgggaacttttggcagaagccaaagcaaaagatagtgaaattaacaggcttcgaagtgaactaaagaaatacaaagagaaaaggactctgaacgctgaggggactgatgctttgggcccaaatgtcgatggaacatcagtctccccaggtgacacggaacctatgataagagctcttgaggagaagaacaagaactttcagaaagagctttccgatctagaggaagaaaaccgggtcctgaaggagaaactgatctatcttgagcactccccaaattcagaaggggcagcaagtcacactggcgacagcagctgcccaacatccataactcaagagtcaagcttcggaagcccaactggaaatcagatgtccagtgacattgatgagtataaaaaaaacatacatggaaatgcattacggacatcaggctcctcaagtagcgatgttaccaaagcttctttgtcgccagatgcttccgactttgagcacattacagcagagacaccctcaaggcccctgtcctccaccagtaacccctttaagagttcaaagtgttctactgctgggagttccccaaacagcgtaagtgaattgtccctggcttccctcacagagaagatacaaaagatggaagaaaaccaccatagcactgcagaagaactacaggctactctacaagaattatcagaccagcaacaaatggtacaggaattgacagctgaaaatgagaagctggtggatgaaaagacgattttagagacatcctttcatcagcatcgagagagggcagagcagctaagtcaagaaaatgagaagctgatgaatcttttacaagagcgagtaaagaatgaagagcccaccactcaggaaggaaaaattattgaactggagcagaagtgcacaggtattcttgaacagggccgctttgaaagagagaagctactcaacattcagcagcagttgacctgtagcttgcggaaggttgaggaagaaaaccaaggagctttagaaatgattaaacgtctgaaggaagaaaatgaaaaactgaatgagtttctagaactggaacggcataataataacatgatggccaaaactttggaagagtgtagagttaccttggaagggctaaaaatggagaatggatctttgaagtctcatttgcagggtgagaagcagaaagccacagaggccagtgctgtggagcagacggcagagagctgcgaagttcaagaaatgttgaaagtagcccgagcagagaaagatctactggaactgtcttgcaatgagctcagacaagaattactaaaggcaaacggtgaaattaaacatgtttccagtctgctggccaaggtggaaaaggattattcatacctgaaggagatatgtgatcaccaagccgaacagctgagcagaaccagcctaaagctgcaagaaaaagcatcagagagtgatgcagagatcaaagacatgaaagaaaccatatttgaattggaagatcaggtggaacagcaccgggctgtcaagttacacaataatcaactcatcagtgagctagaaagtagtgtgatcaagctggaggaacagaagtcagacctggagaggcagctgaagactctgaccaagcagatgaaggaggagaccgaggaatggaggcggttccaggcggatctgcagaccgcagtggtggtggccaatgacatcaagtgtgaggcccagcaggagctgcgcaccgtgaagaggaaactgctggaggaggaggagaagaatgcccggttgcagaaggagctgggggatgtgcagggccacggcagggtggtcaccagcagagccgcccctccacctgtggatgaagagccagagtcctctgaggtcgatgctgctggtcggtggcctggtgtctgtgttagcagaacatctccaacacccccagagtcggcaaccaccgttaagtcacttatcaagtcatttgacttgggacgcccaggtggagctggacagaatatttctgtccataagacccccagaagtcccctaagtgggataccagtgaggactgctccagcagctgctgtctctccaatgcagaggcattcgacttacagcagtgtgcggccagccagcagaggggtgactcaacgcttggaccttcctgaccttcccctctcagatattctaaagggaaggactgagaccctgaagccagacccccacctccgcaagagtccctcactagagtcactgagcagacccccgtctctgggctttggggacacaagactgctgagtgcttccacccgggcatggaaaccacaaagcaaactcagtgtggaaagaaaagaccctctggcagccttggcccgggaatacggtggttccaagcgcaatgctctactgaaatggtgccagaagaagacacaaggttatgcgaacattgacatcaccaatttcagcagcagctggagcgatggcctggccttctgtgctctgctccacacctacctgcctgcccacatcccctaccaggagctgaatagtcaggagaaaaagaggaatctcttgttggcatttgaagcggctgaaagtgtaggcatcaaacccagcctggaactcagcgagatgctgtacacagaccggcccgactggcagagtgtgatgcagtacgtggcccaaatctacaagtactttgagacgtaaccctggagggcctggggcagccaccattgccacctactgcagcttttcctggaagcgcctgattactgtccac

SEQ ID NO: 185452 - DNA, 4971 bp, Homo sapiens
  Payload ID: 16524
  Gene Symbol: SPECC1
  Gene Name: sperm antigen with calponin homology and coiled-coil domains 1
  Uniprot ID: Q5M775
  ENST ID: ENST00000395529
  CDS Start-End: 53-2425
aagaagcagaaaaggttggataaaagataaggacagacccacgaagtcaagcatgcggagtgcagccaagccctggaacccagccatcagagcagggggccacggcccagaccgggtgcggcctctgcctgcagcctcttccggcatgaagagttctaagtcttcaacttccttggcttttgagtcccgactcagcaggctcaagagggccagcagtgaggacacgctcaacaagccaggaagtaccgctgcatcgggggtggttcgcctgaagaagaccgccactgccggagccatctcggagctcacggagagccgcctgaggagcggcacaggggcctttacaacaactaaacggacaggcattccagccccacgggaattttcagtaactgtctcaagagagaggtctgtgccacgtggtccctccaaccccaggaaatcagtgtccagtccaacttcttccaacactcccactcctacgaaacacctgaggaccccttccacaaagcccaagcaagagaatgaaggtggagaaaaggctgcgcttgagtcccaagttcgggaacttttggcagaagccaaagcaaaagatagtgaaattaacaggcttcgaagtgaactaaagaaatacaaagagaaaaggactctgaacgctgaggggactgatgctttgggcccaaatgtcgatggaacatcagtctccccaggtgacacggaacctatgataagagctcttgaggagaagaacaagaactttcagaaagagctttccgatctagaggaagaaaaccgggtcctgaaggagaaactgatctatcttgagcactccccaaattcagaaggggcagcaagtcacactggcgacagcagctgcccaacatccataactcaagagtcaagcttcggaagcccaactggaaatcagatgtccagtgacattgatgagtataaaaaaaacatacatggaaatgcattacggacatcaggctcctcaagtagcgatgttaccaaagcttctttgtcgccagatgcttccgactttgagcacattacagcagagacaccctcaaggcccctgtcctccaccagtaacccctttaagagttcaaagtgttctactgctgggagttccccaaacagcgtaagtgaattgtccctggcttccctcacagagaagatacaaaagatggaagaaaaccaccatagcactgcagaagaactacaggctactctacaagaattatcagaccagcaacaaatggtacaggaattgacagctgaaaatgagaagctggtggatgaaaagacgattttagagacatcctttcatcagcatcgagagagggcagagcagctaagtcaagaaaatgagaagctgatgaatcttttacaagagcgagtaaagaatgaagagcccaccactcaggaaggaaaaattattgaactggagcagaagtgcacaggtattcttgaacagggccgctttgaaagagagaagctactcaacattcagcagcagttgacctgtagcttgcggaaggttgaggaagaaaaccaaggagctttagaaatgattaaacgtctgaaggaagaaaatgaaaaactgaatgagtttctagaactggaacggcataataataacatgatggccaaaactttggaagagtgtagagttaccttggaagggctaaaaatggagaatggatctttgaagtctcatttgcagggtgagaagcagaaagccacagaggccagtgctgtggagcagacggcagagagctgcgaagttcaagaaatgttgaaagtagcccgagcagagaaagatctactggaactgtcttgcaatgagctcagacaagaattactaaaggcaaacggtgaaattaaacatgtttccagtctgctggccaaggtggaaaaggattattcatacctgaaggagatatgtgatcaccaagccgaacagctgagcagaaccagcctaaagctgcaagaaaaagcatcagagagtgatgcagagatcaaagacatgaaagaaaccatatttgaattggaagatcaggtggaacagcaccgggctgtcaagttacacaataatcaactcatcagtgagctagaaagtagtgtgatcaagctggaggaacagaagtcagacctggagaggcagctgaagactctgaccaagcagatgaaggaggagaccgaggaatggaggcggttccaggcggatctgcagaccgcagtggtggtggccaatgacatcaagtgtgaggcccagcaggagctgcgcaccgtgaagaggaaactgctggaggaggaggagaagaatgcccggttgcagaaggagctgggggatgtgcagggccacggcagggtggtcaccagcagagccgcccctccctccctgggctctgtcagctagcagagcatttggtggaagaaagacagcccagctcttgccatgattgggagccgcagccatctctagatgaaagggggaatgtgtagaggagaaattgcctctttataaagagcccagttgtctccttgtgacattctctgtttctcagagtcattgccgtcgagtctctgctttttgtccacattttgggatcagcttactgcatgatcaaagatgatgtttccctctttttacttttcctcagaagattgagctgtcttttatttggagaataaaatgaagttctgaaaaaaacaaagtacaagtcttatgaaaagttatttgcagctggagtgctgaaaagggcacagtggcagagcagatgcagagctgggtacagcgcaggcccgagttcttttgttttttgttgttgttgttgttgttgttttgttttgttttttttttttttttgagacagagtttcactcttgttgcccaggctggagtgcaatggtacgatctcggctcactgcaacctctgcctcccgggttcaagtgattctcttgcctcagccttccaagtagctggaattacaggcgcctgccaccacacccagctaatttttgtattgttagtagagatggggtttcaccgtgttggccaggctgctcttgaactcctgacctcaggtgatccccacctcagcctcccaaagtgctgggattacagacatgagccaccgcacccagaacctaaggcccaagttctactttttggtgttcatttctctgcttccttttgatcgtggtgtctgatcatcttggaattcacattactcaaggcaaaataggaagccatctgcgtgatgtcacattccgaagaagtcagaaggttcggcgagttggagctttactcttgttgcccaggctagagtgcagtggtgcgatcttggctcattgcaagctccgcttcctgggtttaagctattctcctgccttggcctcccaagtagctgggattacaggcatgtgccgtcactcctggctaattttgtatttttagtagagatgcaatttcaccatgttggtcaggctggtctcgaactcctgacctcaagtgatctggccgcctcagcctcccaaagtgctgggattacaggcttgagaccccatgtctggccccttctgtggggtcttgattgagccccttcacttggagtctgacttcattacctcgtctgaaacaaggtgcctccaagctttgggttgatttccagaatcttgttgggttaaacataagtagaagtttgatcataaaggatgttattaagccggataggtaagcacggtgacaatggcaatagaaatctaatggaaaacgattgaatgacaactacaccaaagtttcatggatgaaactcaccccagaaacttagtgttcaaatcagagtgatacacaattcaaaatgtgattttaaacttctggaaatatgtgtgtttgtgaagatccaaatccaattcagcaacctccatcaggcagaaaccttctgcaatcctcacatgaggaactggttcacagtgtacacagcatggagccattagtgacgttatccaaaggatgagacaagacaaaagttactgtctaataaaaggaaaattaggaacaggaatgctctttaaactcaggaagatcttttggggtgtcaaactggacagcacagaatcattagaaaaattagcttggcgtgagaagagacattgaggtcttctctgtaaaatttacttagatacttgtgaataggactgaaatttatattttgggcactctttacctcagattcagagttcttaggattatttaaaattcatttgctggatgttttcaagtataaacaataagaaaactgcaacttcaacttaaaaggcactgctgtatttgcaccctatattttgacctgtcgttaggtactgttgaatatttttatctgtaagcatttatgaagtgcaaaataaacatgttattatatagaagcgtctgctgcttagttttaatcaccagctacgtttctgcagggcctttatgtcgttttgttctacatttttttctgaatacagtttcagaacttcaaagtcacatcaagtaactagaatttgaggtagaaaaaagctggatgtaagttgtaaataggaggttgacatggaatatgaacagtttcattagtagaacaaaagggcatggagtaaaaatgctaattttgcataaatttttaaaactctagggtctcagaaaatatagcatggacttaaagtctagatgtgttttgttgacatttaaatatgaatagattgatgatttaatgtattggattttttcttaattatgaagtattatttaggtatactaataacaaaatggagacgtgtgaagaaaaatattaatctttcttctccctcagtaccacctgtgaggaaatcagtgttaacagtgtgtacatttttctttactcatgaatatgtatagggttcattttcatatttttaataaaaattggattatattcttttca

SEQ ID NO: 185453 - DNA, 8133 bp, Homo sapiens
  Payload ID: 16524
  Gene Symbol: SPECC1
  Gene Name: sperm antigen with calponin homology and coiled-coil domains 1
  Uniprot ID: Q5M775
  ENST ID: ENST00000395530
  CDS Start-End: 209-3172
gatgcagatgagggggcggggcccacgggcgcgggagagcagcggctccgccggcagctgctgggaactggaaggcgcccggtcctttctttgactggagcggacccgccggacgcaaccgcctcgccagccggagccagcgcgagctcggcacggtggacacccggtccgaggccggcaagccggctggtgcccgagtcggccaagcatgggcaaccactcaggacggcccgaggatccggaaccaggggcctttacaacaactaaacggacaggcattccagccccacgggaattttcagtaactgtctcaagagagaggtctgtgccacgtggtccctccaaccccaggaaatcagtgtccagtccaacttcttccaacactcccactcctacgaaacacctgaggaccccttccacaaagcccaagcaagagaatgaaggtggagaaaaggctgcgcttgagtcccaagttcgggaacttttggcagaagccaaagcaaaagatagtgaaattaacaggcttcgaagtgaactaaagaaatacaaagagaaaaggactctgaacgctgaggggactgatgctttgggcccaaatgtcgatggaacatcagtctccccaggtgacacggaacctatgataagagctcttgaggagaagaacaagaactttcagaaagagctttccgatctagaggaagaaaaccgggtcctgaaggagaaactgatctatcttgagcactccccaaattcagaaggggcagcaagtcacactggcgacagcagctgcccaacatccataactcaagagtcaagcttcggaagcccaactggaaatcagatgtccagtgacattgatgagtataaaaaaaacatacatggaaatgcattacggacatcaggctcctcaagtagcgatgttaccaaagcttctttgtcgccagatgcttccgactttgagcacattacagcagagacaccctcaaggcccctgtcctccaccagtaacccctttaagagttcaaagtgttctactgctgggagttccccaaacagcgtaagtgaattgtccctggcttccctcacagagaagatacaaaagatggaagaaaaccaccatagcactgcagaagaactacaggctactctacaagaattatcagaccagcaacaaatggtacaggaattgacagctgaaaatgagaagctggtggatgaaaagacgattttagagacatcctttcatcagcatcgagagagggcagagcagctaagtcaagaaaatgagaagctgatgaatcttttacaagagcgagtaaagaatgaagagcccaccactcaggaaggaaaaattattgaactggagcagaagtgcacaggtattcttgaacagggccgctttgaaagagagaagctactcaacattcagcagcagttgacctgtagcttgcggaaggttgaggaagaaaaccaaggagctttagaaatgattaaacgtctgaaggaagaaaatgaaaaactgaatgagtttctagaactggaacggcataataataacatgatggccaaaactttggaagagtgtagagttaccttggaagggctaaaaatggagaatggatctttgaagtctcatttgcagggtgagaagcagaaagccacagaggccagtgctgtggagcagacggcagagagctgcgaagttcaagaaatgttgaaagtagcccgagcagagaaagatctactggaactgtcttgcaatgagctcagacaagaattactaaaggcaaacggtgaaattaaacatgtttccagtctgctggccaaggtggaaaaggattattcatacctgaaggagatatgtgatcaccaagccgaacagctgagcagaaccagcctaaagctgcaagaaaaagcatcagagagtgatgcagagatcaaagacatgaaagaaaccatatttgaattggaagatcaggtggaacagcaccgggctgtcaagttacacaataatcaactcatcagtgagctagaaagtagtgtgatcaagctggaggaacagaagtcagacctggagaggcagctgaagactctgaccaagcagatgaaggaggagaccgaggaatggaggcggttccaggcggatctgcagaccgcagtggtggtggccaatgacatcaagtgtgaggcccagcaggagctgcgcaccgtgaagaggaaactgctggaggaggaggagaagaatgcccggttgcagaaggagctgggggatgtgcagggccacggcagggtggtcaccagcagagccgcccctccacctgtggatgaagagccagagtcctctgaggtcgatgctgctggtcggtggcctggtgtctgtgttagcagaacatctccaacacccccagagtcggcaaccaccgttaagtcacttatcaagtcatttgacttgggacgcccaggtggagctggacagaatatttctgtccataagacccccagaagtcccctaagtgggataccagtgaggactgctccagcagctgctgtctctccaatgcagaggcattcgacttacagcagtgtgcggccagccagcagaggggtgactcaacgcttggaccttcctgaccttcccctctcagatattctaaagggaaggactgagaccctgaagccagacccccacctccgcaagagtccctcactagagtcactgagcagacccccgtctctgggctttggggacacaagactgctgagtgcttccacccgggcatggaaaccacaaagcaaactcagtgtggaaagaaaagaccctctggcagccttggcccgggaatacggtggttccaagcgcaatgctctactgaaatggtgccagaagaagacacaaggttatgcgaacattgacatcaccaatttcagcagcagctggagcgatggcctggccttctgtgctctgctccacacctacctgcctgcccacatcccctaccaggagctgaatagtcaggagaaaaagaggaatctcttgttggcatttgaagcggctgaaagtgtaggcatcaaacccagcctggaactcagcgagatgctgtacacagaccggcccgactggcagagtgtgatgcagtacgtggcccaaatctacaagtactttgagacgtaaccctggagggcctggggcagccaccattgccacctactgcagcttttcctggaagcgcctgattactgtccactgaccctgctctgcccaccacccagctgcctagacttcaaagacaggctcaatccaagtggaccaacacccaaataagaaacagagtgggtcccacgatgtacctgtctgaaatgcaaatgcagctggactgtaaattggggactctttgatctcttgtgggatgcttctaaagagggcagcctccctccttccagaccaagaccccacacccaggcttgttttgctgattatattgggtggctgaacgaacacattatctgcagaaattcagacaaagaacatctccaaatcagtcttttggttgctgttgttaaaaatatcccggctttgcctttatgaaacctttgcccttggctgggtgtggtagctcgtggctgtaatcccagcactttaggaagccaaggcagtaggatcgtttgagcccaggagttcgaggctgcagtgagctatgagcataccactgcactccagcctgtgtgaaagagccagaccctgtctcaaaaaaatgataaaacccaaaactttgcccttgtgaaccctcccttcccccctccccccccaaaaaaaaacaacaaaacacaaaaaataaacatttgttccagggcaacctggaaacgtgcgtgcgcactcagccttttggggaaaaatgggagttctaggtaacaatgttaacacctggaacttgattcacttttagctctcaccatcccttatttgatttattgtagcaaaaggaaagcctgtgagaatgcaagggagcccctggctgctttgctggagtccctgggaggtgccccacacctctgccaccaaagtctgtgtgctcctgagcagctcgcggctttcacagtagggaaaccgcagtcctcgtcacctgcgcctttgtcctcccattcgtttaccctcccgttcacatccacacaggcttgtaccccacagaacttgacaggaggtcacatgtgtgaatggcctgtgtctgctttacagggttgagcaggctgagggtgtgtgcctctggggatgctgggctgacagcaaatcccaacagtatttcggctctggactgatttggcctttagtgcttccccaggcctctttcatcggcatgggaaaagcccttaggggtgggcggtgagggcacatttataactaacaaagaagaatgcagttgccccagcatcctactggtcaccttaagtggcagcagagccctccccagcggtgccccagtccctcagaagtgctcagtccggcccgagtgcccatctggtggctctgccgtgttcttctgggcggatctgtgtgcactacacagcgagtgagggcgtggctcacacagttgtttgagggaaatgggtaatgcccatcccttgctgttttaagtgccaaatagcgtgttagcgcccctccaacaaaggatcatccttccagtgagtcaccgagaatgacagtgactgccattactattcaaagtacatctctgattgctgatctgagccactggttcagagccaggttctagaggctgcaggtccagccccttaccattcctggagaggtaggagctcagtcccttcctccaagccagacctttgcagaggtggcaactgggctgcacgggtcagcagatccctgattctcaagccaccttgagacaagaactccgcccccctgttagtgcatcccagctgcagctctgcatcagaacctacagtggacccttttgaaaacactcttggctgccctagttggttaacttcagaatgtctggaatgggaccagagatgcagttcacatgttttgtaagttctttaggcgactgaagcacagctgcttggagaaccactgaggggtggacaccttcccctggcagccacaaggcaggcagcctgcgggagctcctgagcagctgttgggcgatggtcattacatcacccatgcctttgtatttaaatgaaactcgacacatagaaccaattcaacctgaaagttactacttctgctgattcaggcacttgtttgaagcattttttttttattaaccctgtacttcttctttgcccaccattaaagtgggggaaagtaatatcccaagtagttgagttgagctgttggttgttagatttaagctggaattagtccagggttttatgtggggaggcagttgctgtcttgggatacccggagtgggagtgggtgttttctgtgattggttctgttttttatttttacttatttattttgagatggagtttcatccttattgcccaggctggagggcaatagcaccgtctcagctcactgcaacctccgccgcccgtgtttaagcgattctcctgcctcagcctcccatgtggctgggattacaggtgcccatcaccacacccagctaatgtttttgtatttttagtaaagagggggtttcaccatgttggcccggctggtctcgaactcctgatggcaaggtgatctgcctgcctcagcctcccaaagtgctgggattacaggcatgagccactgagcccggctgtttttttgtgttttttttgttgttgtttgtttgtttttttttttgagacagagtcttgctctgtcgcccaggctggagtgccagtggcgcgatttcagctcactcaggagtgagccaccacacctggcctgtgattggctctattttgagtgattacgtgtaaatcatctagaaccagctctgagcaatggcgttgcggtgtccctccctccccgctggggccataccagcccctctccactgggagcccaagttgccaatgactgtggccaaactcccccatttttgtctgtatcctgctctctttaggttaaaaagaaggaaagaaacatgaaaggccatgtacaatttatttttacaactccaggagtttccccgactaccattttttttttttttatttgccagtggtgtgcatgtagaagaggaatgccatgtcctgtccatagaaatacacatggtggtcaggcatggtggctcatgcctataatcccagcactttgggaggctgaggtgggaggattgcttgagcccaggagtttgagaccagcctgggcaacatggcaagacctctgactctataaaaaaatttttttttttttttttttttgagagagcgtctcacttctctgtcacccaggctagagtagtgtgatcttggcttattacaacttccgcctcccaggttcaagagattctcctgccttagcctcctaagtagctgggattataggcacatgccaccatgcctggcatatttttgtatttttagtagaaacagtttcaccatgttggccaggctggtcttgaactcctgacctcaagtgataagcctgcctcaacctcccaaagtgctgggactacaggggtaagccaccgcgcctggcccaaaattttgttttttaattagctgggtacaatgataggcacctgtaatctcagctgcttgggaggctgaggtgggagcatcacttgagcccaggagtttgaggctgcagtaagctgtgtttgtgccactgcactctggcctgggccaaagagcaagaccctgtcacacacacacacaaaaaaaagaaatacaggtggtgttttggggaagggaaggttctgctggggtcctggaactgtgactgatggcctcaggagtccaggaataggccttctagcacagcagctagtagggctcccccaagccatccgctggcgtgtggaggtgcaggacctgggggaggcagtccccaacccagctaggccaaggggtagggtttttaggtctgtttttaacagagctcagagcaccaggtgaaggtggaaagttggcaggaaaacaaggtcagcatcttattttttctatactcagcagagtgtgccattcccagtttctgtcctgaggatttcaaagaccacaacagccacatttctttccatcttccctcagccagtagtcatttaaaattcttcagttgttctgaagatcctttttttaatgtatcatttttacatgaaagacagctgcaaaatgcaagccccagtagagttggagagtttttcaaggtgagaagtcgctgttctctgcattgaacatggattgaattttccttgtctgatggtaacccatggcccccgccctgcggggataacattctcaggagcttctcttgtcctagccccttctcatttcaaaaatattagtcttttattttcctttttcattcagtttttgttttacagcttttgtagagaccaacccaagtagatgcaggtgggtgttagataaaaacacacatccccaggggacaagccatccagcggtgaggaatctctgccatgttctcttccctgctgcccacaaacgttacggagactcccttagcctccccctcctcttccccactgaggggcagcttgtggagatggaggactcgggcccatagatgcagaccccctaccaaatctagcaatagttctcacccttccaaagctcgagtgccattttgagatgacctaccaatgacatgcagtaaaggacataacctcacagcctttttagaagcatttcgaatatctacagttgcctcaattcacggggcatttcactcctctgatccaggttagaattttgctaaatctgtagcatcctgaatagcacactaatttttttttttagcacactaactttaactacattagttgagtgtagttgatacatctgtggcctcgtgtctataaagagcacactagattgtacccagcacttttggatatgacatgctaattagatgtatttaactattcataggaaagtgtatgataaatgactgtaatatttctaataaatatattttgtttctaatta

SEQ ID NO: 185454 - DNA, 571 bp, Homo sapiens
  Payload ID: 16524
  Gene Symbol: SPECC1
  Gene Name: sperm antigen with calponin homology and coiled-coil domains 1
  ENST ID: ENST00000583528
  CDS Start-End: 338-571
agtgagcgcccggagccgtggccgctgggggttgcggcggcgctgagccagcggggccggcgtagcgtgcctcctgtgattgttgaagagctgtggtgtgctgctgagtggcgtgtgtattccatgtgaggggaagggtccaacagtcctggtcattcagactgcagttccccagagacagagttttgctatgttgctcaggctggtcttgagctcctggcctcaagcaatccacctgccttggcctcccaaagtgctgagattacagatgtgagccaccacacccagtccaagtgtttctatttagttgataatggacagacccacgaagtcaagcatgcggagtgcagccaagccctggaacccagccatcagagcagggggccacggcccagaccgggtgcggcctctgcctgcagcctcttccggcatgaagagttctaagtcttcaacttccttggcttttgagtcccgactcagcaggctcaagagggccagcagtgaggacacgctcaacaagccaggaagtaccgctgcatcgggggtggttcgcctgaagaagaccgccact

SEQ ID NO: 185455 - DNA, 462 bp, Homo sapiens
  Payload ID: 16524
  Gene Symbol: SPECC1
  Gene Name: sperm antigen with calponin homology and coiled-coil domains 1
  ENST ID: ENST00000580934
  CDS Start-End: 242-462
gtgagagtggcagttagaattggttgtcacttgtgggtgttttgtaaagtgcatttctgatgttctttgaaaggacagaacatcatgggtttggtgccctgtgtcacaccctgagtccatggggacaggcggagtcagggttggggctggaagagaaccgagagggcatttaatccagtcctgttatgttattgacagaagaaacagaggctctgagagggacagacccacgaagtcaagcatgcggagtgcagccaagccctggaacccagccatcagagcagggggccacggcccagaccgggtgcggcctctgcctgcagcctcttccggcatgaagagttctaagtcttcaacttccttggcttttgagtcccgactcagcaggctcaagagggccagcagtgaggacacgctcaacaagccaggaagtaccgctgcatcgggggtggttcgcctgaa

SEQ ID NO: 185456 - DNA, 732 bp, Homo sapiens
  Payload ID: 16524
  Gene Symbol: SPECC1
  Gene Name: sperm antigen with calponin homology and coiled-coil domains 1
  ENST ID: ENST00000582226
  CDS Start-End: 1-503
aagccacagaggccagtgctgtggagcagacggcagagagctgcgaagttcaagaaatgttgaaagtagcccgagcagagaaagatctactggaactgtcttgcaatgagctcagacaagaattactaaaggcaaacggtgaaattaaacatgtttccagtctgctggccaaggtggaaaaggattattcatacctgaaggagatatgtgatcaccaagccgaacagctgagcagaaccagcctaaagctgcaagaaaaagcatcagagagtgatgcagagatcaaagacatgaaagaaaccatatttgaattggaagatcaggtggaacagcaccgggctgtcaagttacacaataatcaactcatcagtgagctagaaagtagtgtgatcaagctggaggaacagaagtcagacctggagaggcagctgaagactctgaccaagcagatgaagaaagacagcccagctcttgccatgattgggagccgcagccatctctagatgaaagggggaatgtgtagaggagaaattgcctctttataaagagcccagttgtctccttgtgacattctctgtttctcagagtcattgccgtcgagtctctgctttttgtccacattttgggatcagcttactgcatgatcaaagatgatgtttccctctttttacttttcctcagaagattgagctgtcttttatttggagaataaaatgaagttctgaaaaaaac

SEQ ID NO: 185457 - DNA, 433 bp, Homo sapiens
  Payload ID: 16524
  Gene Symbol: SPECC1
  Gene Name: sperm antigen with calponin homology and coiled-coil domains 1
  ENST ID: ENST00000578321
  CDS Start-End: 377-433
ctccctgttgtgccttgggggtgctgcgtggtgcagaggaccgagaagcccttcgccctcggcgtccgccgcgctcccgccccttcctggccggggtgacaggggaagggctagggctgcgcatcccgggtcagctggggcgccgcggcgcagtgcacctggaaggcccgggggcagcgcgcggtgcccgtgggtttcccggtggtgcggacctgcgggcgtgcggaagtaacgacctccttccccagtgcccatgcaaggaaattagtgttatgtgcttgctttttttttttttttttcctaaggaagtttgactctgaatatcttattttgctggagctccatttgccagcacgacagacccacgaagtcaagcatgcggagtgcagccaagccctggaacccagccatcagagcagggggccacggccca

SEQ ID NO: 185458 - DNA, 2249 bp, Homo sapiens
  Payload ID: 16524
  Gene Symbol: SPECC1
  Gene Name: sperm antigen with calponin homology and coiled-coil domains 1
  ENST ID: ENST00000581399
  CDS Start-End: 1-1604
ggaaggttgaggaagaaaaccaaggagctttagaaatgattaaacgtctgaaggaagaaaatgaaaaactgaatgagtttctagaactggaacggcataataataacatgatggccaaaactttggaagagtgtagagttaccttggaagggctaaaaatggagaatggatctttgaagtctcatttgcagggtgagaagcagaaagccacagaggccagtgctgtggagcagacggcagagagctgcgaagttcaagaaatgttgaaagtagcccgagcagagaaagatctactggaactgtcttgcaatgagctcagacaagaattactaaaggcaaacggtgaaattaaacatgtttccagtctgctggccaaggtggaaaaggattattcatacctgaaggagatatgtgatcaccaagccgaacagctgagcagaaccagcctaaagctgcaagaaaaagcatcagagagtgatgcagagatcaaagacatgaaagaaaccatatttgaattggaagatcaggtggaacagcaccgggctgtcaagttacacaataatcaactcatcagtgagctagaaagtagtgtgatcaagctggaggaacagaagtcagacctggagaggcagctgaagactctgaccaagcagatgaaggaggagaccgaggaatggaggcggttccaggcggatctgcagaccgcagtggtggtggccaatgacatcaagtgtgaggcccagcaggagctgcgcaccgtgaagaggaaactgctggaggaggaggagaagaatgcccggttgcagaaggagctgggggatgtgcagggccacggcagggtggtcaccagcagagccgcccctccacctgtggatgaagagccagagtcctctgaggtcgatgctgctggtcggtggcctggtgtctgtgttagcagaacatctccaacacccccagagtcggcaaccaccgttaagtcacttatcaagtcatttgacttgggacgcccaggtggagctggacagaatatttctgtccataagacccccagaagtcccctaagtgggataccagtgaggactgctccagcagctgctgtctctccaatgcagaggcattcgacttacagcagtgtgcggccagccagcagaggggtgactcaacgcttggaccttcctgaccttcccctctcagatattctaaagggaaggactgagaccctgaagccagacccccacctccgcaagagtccctcactagagtcactgagcagacccccgtctctgggctttggggacacaagactgctgagtgcttccacccgggcatggaaaccacaaagcaaactcagtgtggaaagaaaagaccctctggcagccttggcccgggaatacggtggttccaagcgcaatgctctactgaaatggtgccagaagaagacacaaggttatgcgaagaggaatctcttgttggcatttgaagcggctgaaagtgtaggcatcaaacccagcctggaactcagcgagatgctgtacacagaccggcccgactggcagagtgtgatgcagtacgtggcccaaatctacaagtactttgagacgtaaccctggagggcctggggcagccaccattgccacctactgcagcttttcctggaagcgcctgattactgtccactgaccctgctctgcccaccacccagctgcctagacttcaaagacaggctcaatccaagtggaccaacacccaaataagaaacagagtgggtcccacgatgtacctgtctgaaatgcaaatgcagctggactgtaaattggggactctttgatctcttgtgggatgcttctaaagagggcagcctccctccttccagaccaagaccccacacccaggcttgttttgctgattatattgggtggctgaacgaacacattatctgcagaaattcagacaaagaacatctccaaatcagtcttttggttgctgttgttaaaaatatcccggctttgcctttatgaaacctttgcccttggctgggtgtggtagctcgtggctgtaatcccagcactttaggaagccaaggcagtaggatcgtttgagcccaggagttcgaggctgcagtgagctatgagcataccactgcactccagcctgtgtgaaagagccagaccctgtctcaaaaaaatgataaaacccaaaactttgcccttgtgaaccctcccttcccccctccccccccaaaaaaaaac

SEQ ID NO: 185459 - DNA, 195 bp, Homo sapiens
  Payload ID: 16524
  Gene Symbol: SPECC1
  Gene Name: sperm antigen with calponin homology and coiled-coil domains 1
  ENST ID: ENST00000578153
  CDS Start-End: 1-140
tgcctgcccacatcccctaccaggagctgaatagtcaggagaaaaagaggaatctcttgttggcatttgaagcggctgaaagtgtaggcatcaaacccagcctggtacgtatcctattttgtatccttgtgatactttaattgtatgagaaatgactttatgccatctgataaacagtttctcgtagaacattga

SEQ ID NO: 185460 - DNA, 570 bp, Homo sapiens
  Payload ID: 16524
  Gene Symbol: SPECC1
  Gene Name: sperm antigen with calponin homology and coiled-coil domains 1
  ENST ID: ENST00000583482
  CDS Start-End: 268-570
tcagtgagcgcccggagccgtggccgctgggggttgcggcggcgctgagccagcggggccgatgtagattccaatgatgtcatctcactgaaacctccgcctcccaggttcaagtgatcctcctgcctcagcctcccaagtagctgggactacaggtgcacaccaccacgcccagctgatttttgtatttagtagagacaggatttcaccatgttagccagactggtcttgaactcctgacctaaggacagacccacgaagtcaagcatgcggagtgcagccaagccctggaacccagccatcagagcagggggccacggcccagaccgggtgcggcctctgcctgcagcctcttccggcatgaagagttctaagtcttcaacttccttggcttttgagtcccgactcagcaggctcaagagggccagcagtgaggacacgctcaacaagccaggaagtaccgctgcatcgggggtggttcgcctgaagaagaccgccactgccggagccatctcggagctcacggagagccgcctgaggagcggcacaggggcctttacaacaactaaa

SEQ ID NO: 185461 - DNA, 731 bp, Homo sapiens
  Payload ID: 16524
  Gene Symbol: SPECC1
  Gene Name: sperm antigen with calponin homology and coiled-coil domains 1
  ENST ID: ENST00000467722
  CDS Start-End: 204-281
agatgagggggcggggcccacgggcgcgggagagcagcggctccgccggcagctgctgggaactggaaggcgcccggtcctttctttgactggagcggacccgccggacgcaaccgcctcgccagccggagccagcgcgagctcggcacggtggacacccggtccgaggccggcaagccggctggtgcccgagtcggccaagcatgggcaaccactcaggacggcccgaggatccggaaccaggtggaaaaggattattcatacctgaaggagatatgtgatcaccaagccgaacagctgagcagaaccagcctaaagctgcaagaaaaagcatcagagagtgatgcagagatcaaagacatgaaagaaaccatatttgaattggaagatcaggtggaacagcaccgggctgtcaagttacacaataatcaactcatcagtgagctagaaagtagtgtgatcaagctggaggaacagaagtcagacctggagaggcagctgaagactctgaccaagcagatgaaggaggagaccgaggaatggaggcggttccaggcggatctgcagaccgcagtggtggtggccaatgacatcaagtgtgaggcccagcaggagctgcgcaccgtgaagaggaaactgctggaggaggaggagaagaatgcccggttgcagaaggagctgggggatgtgcagggccacggcagggtggtcaccagcagagccgcccctcc

SEQ ID NO: 185462 - DNA, 940 bp, Homo sapiens
  Payload ID: 16524
  Gene Symbol: SPECC1
  Gene Name: sperm antigen with calponin homology and coiled-coil domains 1
  ENST ID: ENST00000584527
  CDS Start-End: 1-609
atgttgaaagtagcccgagcagagaaagatctactggaactgtcttgcaatgagctcagacaagaattactaaaggcaaacggtgaaattaaacatgtttccagtctgctggccaaggtggaaaaggattattcatacctgaaggagatatgtgatcaccaagccgaacagctgagcagaaccagcctaaagctgcaagaaaaagcatcagagagtgatgcagagatcaaagacatgaaagaaaccatatttgaattggaagatcaggtggaacagcaccgggctgtcaagttacacaataatcaactcatcagtgagctagaaagtagtgtgatcaagctggaggaacagaagtcagacctggagaggcagctgaagactctgaccaagcagatgaaggaggagaccgaggaatggaggcggttccaggcggatctgcagaccgcagtggtggtggccaatgacatcaagtgtgaggcccagcaggagctgcgcaccgtgaagaggaaactgctggaggaggaggagaagaatgcccggttgcagaaggagctgggggatgtgcagggccacggcagggtggtcaccagcagagccgcccctccgtgagtctggtgggcaccagggccgtgcttgcttctcaatcactatctccctgggctctgtcagctagcagagcatttggtggaagaaagacagcccagctcttgccatgattgggagccgcagccatctctagatgaaagggggaatgtgtagaggagaaattgcctctttataaagagcccagttgtctccttgtgacattctctgtttctcagagtcattgccgtcgagtctctgctttttgtccacattttgggatcagcttactgcatgatcaaagatgatgtttccctctttttacttttcctcagaagattgagctgtcttttatttg

SEQ ID NO: 185463 - DNA, 674 bp, Homo sapiens
  Payload ID: 16524
  Gene Symbol: SPECC1
  Gene Name: sperm antigen with calponin homology and coiled-coil domains 1
  ENST ID: ENST00000581973
  CDS Start-End: 368-674
tgtgagagtggcagttagaattggttgtcacttgtgggtgttttgtaaagtgcatttctgatgttctttgaaaggacagaacatcatgggtttggtgccctgtgtcacaccctgagtccatggggacaggcggagtcagggttggggctggaagagaaccgagagggcatttaatccagtcctgttatgttattgacagaagaaacagaggctctgagagggtgagggatggaccaggccgctccttgctcaggaatcacagtgccggtccctgctggccagtctcgggctgccttccacatctctgtgtggattttcccctgatgtcttcagctgtatcttgctggacagacccacgaagtcaagcatgcggagtgcagccaagccctggaacccagccatcagagcagggggccacggcccagaccgggtgcggcctctgcctgcagcctcttccggcatgaagagttctaagtcttcaacttccttggcttttgagtcccgactcagcaggctcaagagggccagcagtgaggacacgctcaacaagccaggaagtaccgctgcatcgggggtggttcgcctgaagaagaccgccactgccggagccatctcggagctcacggagagccgcctgaggagcggcacaggggcctttacaacaactaaacgga

SEQ ID NO: 185464 - DNA, 581 bp, Homo sapiens
  Payload ID: 16524
  Gene Symbol: SPECC1
  Gene Name: sperm antigen with calponin homology and coiled-coil domains 1
  ENST ID: ENST00000583463
  CDS Start-End: 184-581
agccgtggccgctgggggttgcggcggcgctgagccagcggggccggcgtagcgtgcctcctgtgattgttgaagagctgtggtgtgctgctgagtggcgtgtgtattccatgtgaggggaagggtccaacagtcctggtcattcagactgcagttccccaggacagacccacgaagtcaagcatgcggagtgcagccaagccctggaacccagccatcagagcagggggccacggcccagaccgggtgcggcctctgcctgcagcctcttccggcatgaagagttctaagtcttcaacttccttggcttttgagtcccgactcagcaggctcaagagggccagcagtgaggacacgctcaacaagccaggaagtaccgctgcatcgggggtggttcgcctgaagaagaccgccactgccggagccatctcggagctcacggagagccgcctgaggagcggcacaggggcctttacaacaactaaacggacaggcattccagccccacgggaattttcagtaactgtctcaagagagaggtctgtgccacgtggtccctccaaccccaggaaatcagtgtc

SEQ ID NO: 185465 - DNA, 662 bp, Homo sapiens
  Payload ID: 16524
  Gene Symbol: SPECC1
  Gene Name: sperm antigen with calponin homology and coiled-coil domains 1
  ENST ID: ENST00000582604
  CDS Start-End: 599-662
ggtaacgtgctgcggtcgcattccgcgctgctgaaggtttgtccttttgatgtttggaatgcgttcttattactgctcactctttgggtctgcactgtctatatgagctgcaacacacacctcgaaggtctgcagcttcactcctgaagctagcgagaccacgaactcaccaggaggaacgaacaactctagatgcgcccccttaagagctgtaacactcgccgcgaaggtctgcagcttcactcctgagtcagcgagactacgaacccaccagaaggaagaaactccgaacacatccaaacatcagaaggaacaaactccagacacaccgcctttaagaactgttacgctcaccgcgagggtccacggcttcattctccaagtcagaccaagaacccaccaattccggacacaaaaggtgttcccaccattcctgtcctcttacttctctcgccttacaagcgtagcgtgcctcctgtgattgttgaagagctgtggtgtgctgctgagtggcgtgtgtattccatgtgaggggaagggtccaacagtcctggtcattcagactgcagttccccaggacagacccacgaagtcaagcatgcggagtgcagccaagccctggaacccagccatcagagcagggggccacggcccagaccggg

SEQ ID NO: 185466 - DNA, 6756 bp, Homo sapiens
  Payload ID: 16525
  Gene Symbol: SPECC1L
  Gene Name: sperm antigen with calponin homology and coiled-coil domains 1-like
  Uniprot ID: Q69YQ0
  ENST ID: ENST00000314328
  CDS Start-End: 286-3639
ggaggccgggcggcccggcaagcggcgctgcggggtaggctgctttcctgaggccggactcaacgggtctcggctgagccaccgggtgagctcaccgcccagcccaaaccaggagattgcgagggagcgatgcggtgcagcgcgtgttcttggggaagatcccgactaagccattttccagtggcacctcttccatcatgagttcctgaggcagtccgatggggctactttattccagaacaatcacaatttgcttgtaaatgcatcacgaagaggcagcccagaatgaagaaagcaagcaggagtgttggctcagtgcctaaagtgtctgcaataagtaaaacgcaaacagcagaaaaaattaaacctgaaaacagctcttcagcatctacgggaggcaaacttgtaaaacctggaacagcagcatcattgtcaaagaccaagagcagtgatgaccttttagctggaatggccggaggggtaacggtgactaatggtgttaaaggaaagaaaagcacctgcccatctgcagcaccttcagcatctgcccctgccatgaccaccgtggagaacaaatccaagattagcacaggcacagcttcttcaaccaagcggagcacttctacaggtaataaagaatccagttctactagagaaagattacgtgaacgtacccgattaaaccagagcaaaaaactaccttctgcaggtcagggagctaatgacatggcattggccaaacgttcccgcagtcgaactgctacagaatgtgacgttcgtatgagcaagtctaagtcagacaatcagatcagtgacagagctgctttggaggccaaagtgaaggatcttctcacgctggcaaaaaccaaagacgtagaaattttacatttgagaaatgaactgcgagacatgcgtgcccagctgggcattaatgaggatcattctgagggtgatgaaaaatctgagaaggaaactattatggctcaccagccgactgatgtggagtccactttattgcagttgcaggaacagaatactgccatccgtgaagaactcaaccagctgaaaaatgaaaacagaatgttaaaggacaggttgaatgcattgggcttttccctagagcagaggttagacaattctgaaaaactgtttggctatcagtccctgagcccagaaatcacccctggtaaccagagcgatggaggaggaactctgacttcttcagtggaaggctctgcccctggctcagtggaggatctcttgagtcaggatgaaaatacactaatggaccatcagcacagtaactccatggacaatttagacagtgagtgcagtgaggtctaccagcccctcacatcgagcgatgatgcgctggatgcaccatcctcctcagagtcggaaggcatccccagcatagagcgctcccggaaggggagcagcgggaatgccagtgaagtgtccgtggcttgcctgactgaacggatacaccagatggaagagaaccaacacagtacaagtgaggaactccaggcaaccctgcaagagctagctgatttacagcagattacccaggaactgaatagtgaaaacgaaaggcttggagaagagaaggttattctgatggagtctttatgtcagcagagcgataagttggaacactttagtcgacagattgaatacttccgctctcttctagatgagcatcacatttcttatgtcatagatgaagatgtaaaaagtgggcgctatatggaattagagcaacgttacatggacctcgctgagaatgcccgttttgaacgggagcagcttcttggtgtccagcagcatttaagcaatactttgaaaatggcagaacaagacaataaggaagctcaagaaatgataggggcactcaaagaacgcagtcaccatatggagcgaattattgagtctgagcagaaaggaaaagcagccttggcagccacgttagaggaatacaaagccacagtggccagtgaccagatagagatgaatcgcctgaaggctcagctggagaatgaaaagcagaaagtggcagagctgtattctatccataactctggagacaaatctgatattcaggacctcctggagagtgtcaggctggacaaagaaaaagcagagactttggctagtagcttgcaggaagatctggctcatacccgaaatgatgccaatcgattacaggatgccattgctaaggtagaggatgaataccgagccttccaagaagaagctaagaaacaaattgaagatttgaatatgacgttagaaaaattaagatcagacctggatgaaaaagaaacagaaaggagtgacatgaaagaaaccatctttgaacttgaagatgaagtagaacaacatcgtgctgtgaaacttcatgacaacctcattatttctgatctagagaatacagttaaaaaactccaggaccaaaagcacgacatggaaagagaaataaagacactccacagaagacttcgggaagaatctgcggaatggcggcagtttcaggctgatctccagactgcagtagtcattgcaaatgacattaaatctgaagcccaagaggagattggtgatctaaagcgccggttacatgaggctcaagaaaaaaatgagaaactcacaaaagaattggaggaaataaagtcacgcaagcaagaggaggagcgaggccgggtatacaattacatgaatgccgttgagagagatttggcagccttaaggcagggaatgggactgagtagaaggtcctcgacttcctcagagccaactcctacagtaaaaaccctcatcaagtcctttgacagtgcatctcaagtaccaaaccctgctgcagctgcaattcctcgaacgcccctgagcccaagtcctatgaaaacccctcctgcagcagctgtgtcccctatgcagagacattccataagtggaccaatctcaacatccaaacccctgacagccctgtcagataagagaccaaactatggggaaatccctgttcaagagcatctgttaagaacatcttcagccagccggcctgcttccctgccaagagtgcctgcgatggaaagtgccaagaccctctcagtgtctcgacgaagtagtgaagaagtgaaacgggacatttctgcacaggagggagcgtcgccagcctctctgatggctatgggaaccacgtctccacagctttccctgtcctcttctccaacggcatctgtgactcccaccacccgaagccgaataagagaagaaaggaaagaccctctctcagcattggccagagaatatggaggatcaaagaggaacgccttgctgaagtggtgtcagaagaaaacagaaggctatcagaatattgacattacaaacttcagcagcagctggaatgatgggctggccttctgtgccctcctgcatacatatctccctgcccacattccatatcaagaactgaacagccaggataagagaaggaacttcatgctggctttccaggcagctgaaagtgtcggcatcaaatccacactggacattaatgaaatggtacggactgaacgacccgactggcagaacgtgatgctgtatgtgacggcgatctacaagtactttgagacctgagcatgccgggaggagccgccccaatagcgggggtacccctccacagcgaccgagcgacaccgacgccattagctacgcacccctgtaaagcttccagcaactctgggctgccccacagcgtgtgagcctccagctcggggcttccgtattggaagaactcagccgtgtggcccacagctcccaccagggcccctcccacatgacccgtccattcaggtcatgtgggctcagcacacatcctgcaggccggtggctgctggagttttccttctgaagagaatattgaactacactagtgctccagggcaccaaacaaaaagggctcatgcacagctgaatttgggaaaagggattcagttctgtgggaaactcactagggttgatgaaggctcggccgcggcacttcctgactattggctggggtgggttccggtgctggtgagaacccagaaggagagtcagcgcctggcagttcccagcgccctgggcccttcaccgtcctagtttggaggagcatgttcaccacagacgtgggtcagctgccccacacctgacggggctgtcccggccgacacaatccaggcgtgttcagcctgagctaggagagtatctagagggcgtggtgcgggcacgccagggctggggtgctgctgctgcactcacgcggctgggctttctggcgggaagcagttacgggggccccttgcctggactcagcgacctgtcttccagcctggaaggggtttggagtcccagctctggctttagatttcttcatcataaggagtttttctagttaacatttttgttttgttacgagcaatgctggaaaaggtcgctcctgttctgttagtaccaaagttacattgtttcaataagcatagaaatctaaacaacatctgtacattagcatggtgagagcaaggaataaagcaggaaataggagaaaagtaaacaactttagggagcccaggcagtgtcatttaaactcactgagtcactaagacataattctcctaggccagagttaaagaaagtgccttaactcttcttgtgagggcagccactgccctccgtggccaaggcaggacctccaagactcagtggttgagttgtctcctaccaccatgcccgccctccccaggtactgggtccatgccccctgtgcccaccctccccaggtgctgggtccatgctgtttgaaccaaagccttatttaaaggtggtcactggagatgctctcaggccagaactcaacagctatttttgggaatagggatctcccgtgtgcctaacgcagtagctattggtttgaacaatgtccagacaagacctgtacctttgagaatataactgtgtttggcacctgcatagcaccatgaggaagaccagccaccagtggaagcggggtcactgccccacagactggatgcaatgaggggctcacaggaggcccagccagcccgattgtgggctgaggggtctgcattcaagcacgatgttctagaataggagtttaacgtgtctacgtaacctagaatgtggttattaggaaaggggctgtgcatgtgggtgcagctggcggcacacctggtcaccagatggccagaagctgcccatcagccctgcccagatgtcagcctgggagctcaggctgctgccgctggctggatgccctttggtgaaatgcctgttttcagctaagaaaggagaggccaggcaagcaaagtcatgccacaaagcatatcagagacccccgcagactcctggccccgtcccgccccctgtctgagttgtgtttttgttgctgttcctctgttgatggccagctctgctgttggcatgagccactgatgttcatgtgagaattactgtttttaagtgtctctccacttaggtgtcctcagttcccacttttgctctcatttgccttcacagaggccactccacctgtccggatccagctgtctggtcatggtttggtttatttattttgtccttcaggggctgttttgccctaagaatgagggggcttcccctggtctgcagttcccaactttatcccttgctggccatgcgagcccagccctggtgcctcatgggatgggggggtaggggtccccaggatcttctggaggaaggtggccatggatggatgggctgtatctgtgttttccctctgggagtctcatgggtccagcatcaggcctgaggtcagcaacagggaaagagggtgggcacggggagggcttggccccgcctatctagaggcttgcctcgggcccctccttggggaaggtttgcgtgcagagctgcaagggagagggttccagaagcattgccttttgcctcgtctaataggatccttaggacactgtgggctttaggaatgactatagatgctcacacgtgtttaaagtgacatttggagatgctctcagtcctgtggcatctggcacgaagtctccaagaagccactttgcctcttctcccttcaagcacaagctttactgcaaaagggccagtcgcgtttctatttctctcgatcccaggcttctgcggaccgacgatacgtttaaatgttgttctagtaaatattcttgaatgtattaaaatggctgaaacaacaagcttgggcttttctagcttgccctccactccctgccgtccctctgacgtcgcataaaccagaacccagctccctcctgggactggctgtggagagaagggcacctctgagccagcctgtggccctaccccaaggcgcacttcctcatgtgggcagatcctgaccaggagtccagggtggcctcccctgggccacagcacatcaccgtgtggcctggggctgtgggacagtgagccctgtaaccactagggttctgtgacagatgccaagaccccagagaccgtggcagagctacccccaggagagcggaagcccctacacagcccagacacatgccttccctgggggctggggagtgtgtctcgaggggttttgtttgttttgaggcatgtatcatcttggaaataattgtcaggatgtataaaatagagaaaaagaaaaaaggtatcctacccagaggcaaccagataaacttttttgcctgtgca

SEQ ID NO: 185467 - DNA, 6674 bp, Homo sapiens
  Payload ID: 16525
  Gene Symbol: SPECC1L
  Gene Name: sperm antigen with calponin homology and coiled-coil domains 1-like
  Uniprot ID: Q69YQ0
  ENST ID: ENST00000437398
  CDS Start-End: 205-3558
tggccaagggcggggcccgcgagggaggccgggcggcccggcaagcggcgctgcggggtaggctgctttcctgaggccggactcaacgggtctcggctgagccaccgggtgagctcaccgcccagcccaaaccaggagattgcgagggagcgatgcggtgcagcgcgatttgcttgtaaatgcatcacgaagaggcagcccagaatgaagaaagcaagcaggagtgttggctcagtgcctaaagtgtctgcaataagtaaaacgcaaacagcagaaaaaattaaacctgaaaacagctcttcagcatctacgggaggcaaacttgtaaaacctggaacagcagcatcattgtcaaagaccaagagcagtgatgaccttttagctggaatggccggaggggtaacggtgactaatggtgttaaaggaaagaaaagcacctgcccatctgcagcaccttcagcatctgcccctgccatgaccaccgtggagaacaaatccaagattagcacaggcacagcttcttcaaccaagcggagcacttctacaggtaataaagaatccagttctactagagaaagattacgtgaacgtacccgattaaaccagagcaaaaaactaccttctgcaggtcagggagctaatgacatggcattggccaaacgttcccgcagtcgaactgctacagaatgtgacgttcgtatgagcaagtctaagtcagacaatcagatcagtgacagagctgctttggaggccaaagtgaaggatcttctcacgctggcaaaaaccaaagacgtagaaattttacatttgagaaatgaactgcgagacatgcgtgcccagctgggcattaatgaggatcattctgagggtgatgaaaaatctgagaaggaaactattatggctcaccagccgactgatgtggagtccactttattgcagttgcaggaacagaatactgccatccgtgaagaactcaaccagctgaaaaatgaaaacagaatgttaaaggacaggttgaatgcattgggcttttccctagagcagaggttagacaattctgaaaaactgtttggctatcagtccctgagcccagaaatcacccctggtaaccagagcgatggaggaggaactctgacttcttcagtggaaggctctgcccctggctcagtggaggatctcttgagtcaggatgaaaatacactaatggaccatcagcacagtaactccatggacaatttagacagtgagtgcagtgaggtctaccagcccctcacatcgagcgatgatgcgctggatgcaccatcctcctcagagtcggaaggcatccccagcatagagcgctcccggaaggggagcagcgggaatgccagtgaagtgtccgtggcttgcctgactgaacggatacaccagatggaagagaaccaacacagtacaagtgaggaactccaggcaaccctgcaagagctagctgatttacagcagattacccaggaactgaatagtgaaaacgaaaggcttggagaagagaaggttattctgatggagtctttatgtcagcagagcgataagttggaacactttagtcgacagattgaatacttccgctctcttctagatgagcatcacatttcttatgtcatagatgaagatgtaaaaagtgggcgctatatggaattagagcaacgttacatggacctcgctgagaatgcccgttttgaacgggagcagcttcttggtgtccagcagcatttaagcaatactttgaaaatggcagaacaagacaataaggaagctcaagaaatgataggggcactcaaagaacgcagtcaccatatggagcgaattattgagtctgagcagaaaggaaaagcagccttggcagccacgttagaggaatacaaagccacagtggccagtgaccagatagagatgaatcgcctgaaggctcagctggagaatgaaaagcagaaagtggcagagctgtattctatccataactctggagacaaatctgatattcaggacctcctggagagtgtcaggctggacaaagaaaaagcagagactttggctagtagcttgcaggaagatctggctcatacccgaaatgatgccaatcgattacaggatgccattgctaaggtagaggatgaataccgagccttccaagaagaagctaagaaacaaattgaagatttgaatatgacgttagaaaaattaagatcagacctggatgaaaaagaaacagaaaggagtgacatgaaagaaaccatctttgaacttgaagatgaagtagaacaacatcgtgctgtgaaacttcatgacaacctcattatttctgatctagagaatacagttaaaaaactccaggaccaaaagcacgacatggaaagagaaataaagacactccacagaagacttcgggaagaatctgcggaatggcggcagtttcaggctgatctccagactgcagtagtcattgcaaatgacattaaatctgaagcccaagaggagattggtgatctaaagcgccggttacatgaggctcaagaaaaaaatgagaaactcacaaaagaattggaggaaataaagtcacgcaagcaagaggaggagcgaggccgggtatacaattacatgaatgccgttgagagagatttggcagccttaaggcagggaatgggactgagtagaaggtcctcgacttcctcagagccaactcctacagtaaaaaccctcatcaagtcctttgacagtgcatctcaagtaccaaaccctgctgcagctgcaattcctcgaacgcccctgagcccaagtcctatgaaaacccctcctgcagcagctgtgtcccctatgcagagacattccataagtggaccaatctcaacatccaaacccctgacagccctgtcagataagagaccaaactatggggaaatccctgttcaagagcatctgttaagaacatcttcagccagccggcctgcttccctgccaagagtgcctgcgatggaaagtgccaagaccctctcagtgtctcgacgaagtagtgaagaagtgaaacgggacatttctgcacaggagggagcgtcgccagcctctctgatggctatgggaaccacgtctccacagctttccctgtcctcttctccaacggcatctgtgactcccaccacccgaagccgaataagagaagaaaggaaagaccctctctcagcattggccagagaatatggaggatcaaagaggaacgccttgctgaagtggtgtcagaagaaaacagaaggctatcagaatattgacattacaaacttcagcagcagctggaatgatgggctggccttctgtgccctcctgcatacatatctccctgcccacattccatatcaagaactgaacagccaggataagagaaggaacttcatgctggctttccaggcagctgaaagtgtcggcatcaaatccacactggacattaatgaaatggtacggactgaacgacccgactggcagaacgtgatgctgtatgtgacggcgatctacaagtactttgagacctgagcatgccgggaggagccgccccaatagcgggggtacccctccacagcgaccgagcgacaccgacgccattagctacgcacccctgtaaagcttccagcaactctgggctgccccacagcgtgtgagcctccagctcggggcttccgtattggaagaactcagccgtgtggcccacagctcccaccagggcccctcccacatgacccgtccattcaggtcatgtgggctcagcacacatcctgcaggccggtggctgctggagttttccttctgaagagaatattgaactacactagtgctccagggcaccaaacaaaaagggctcatgcacagctgaatttgggaaaagggattcagttctgtgggaaactcactagggttgatgaaggctcggccgcggcacttcctgactattggctggggtgggttccggtgctggtgagaacccagaaggagagtcagcgcctggcagttcccagcgccctgggcccttcaccgtcctagtttggaggagcatgttcaccacagacgtgggtcagctgccccacacctgacggggctgtcccggccgacacaatccaggcgtgttcagcctgagctaggagagtatctagagggcgtggtgcgggcacgccagggctggggtgctgctgctgcactcacgcggctgggctttctggcgggaagcagttacgggggccccttgcctggactcagcgacctgtcttccagcctggaaggggtttggagtcccagctctggctttagatttcttcatcataaggagtttttctagttaacatttttgttttgttacgagcaatgctggaaaaggtcgctcctgttctgttagtaccaaagttacattgtttcaataagcatagaaatctaaacaacatctgtacattagcatggtgagagcaaggaataaagcaggaaataggagaaaagtaaacaactttagggagcccaggcagtgtcatttaaactcactgagtcactaagacataattctcctaggccagagttaaagaaagtgccttaactcttcttgtgagggcagccactgccctccgtggccaaggcaggacctccaagactcagtggttgagttgtctcctaccaccatgcccgccctccccaggtactgggtccatgccccctgtgcccaccctccccaggtgctgggtccatgctgtttgaaccaaagccttatttaaaggtggtcactggagatgctctcaggccagaactcaacagctatttttgggaatagggatctcccgtgtgcctaacgcagtagctattggtttgaacaatgtccagacaagacctgtacctttgagaatataactgtgtttggcacctgcatagcaccatgaggaagaccagccaccagtggaagcggggtcactgccccacagactggatgcaatgaggggctcacaggaggcccagccagcccgattgtgggctgaggggtctgcattcaagcacgatgttctagaataggagtttaacgtgtctacgtaacctagaatgtggttattaggaaaggggctgtgcatgtgggtgcagctggcggcacacctggtcaccagatggccagaagctgcccatcagccctgcccagatgtcagcctgggagctcaggctgctgccgctggctggatgccctttggtgaaatgcctgttttcagctaagaaaggagaggccaggcaagcaaagtcatgccacaaagcatatcagagacccccgcagactcctggccccgtcccgccccctgtctgagttgtgtttttgttgctgttcctctgttgatggccagctctgctgttggcatgagccactgatgttcatgtgagaattactgtttttaagtgtctctccacttaggtgtcctcagttcccacttttgctctcatttgccttcacagaggccactccacctgtccggatccagctgtctggtcatggtttggtttatttattttgtccttcaggggctgttttgccctaagaatgagggggcttcccctggtctgcagttcccaactttatcccttgctggccatgcgagcccagccctggtgcctcatgggatgggggggtaggggtccccaggatcttctggaggaaggtggccatggatggatgggctgtatctgtgttttccctctgggagtctcatgggtccagcatcaggcctgaggtcagcaacagggaaagagggtgggcacggggagggcttggccccgcctatctagaggcttgcctcgggcccctccttggggaaggtttgcgtgcagagctgcaagggagagggttccagaagcattgccttttgcctcgtctaataggatccttaggacactgtgggctttaggaatgactatagatgctcacacgtgtttaaagtgacatttggagatgctctcagtcctgtggcatctggcacgaagtctccaagaagccactttgcctcttctcccttcaagcacaagctttactgcaaaagggccagtcgcgtttctatttctctcgatcccaggcttctgcggaccgacgatacgtttaaatgttgttctagtaaatattcttgaatgtattaaaatggctgaaacaacaagcttgggcttttctagcttgccctccactccctgccgtccctctgacgtcgcataaaccagaacccagctccctcctgggactggctgtggagagaagggcacctctgagccagcctgtggccctaccccaaggcgcacttcctcatgtgggcagatcctgaccaggagtccagggtggcctcccctgggccacagcacatcaccgtgtggcctggggctgtgggacagtgagccctgtaaccactagggttctgtgacagatgccaagaccccagagaccgtggcagagctacccccaggagagcggaagcccctacacagcccagacacatgccttccctgggggctggggagtgtgtctcgaggggttttgtttgttttgaggcatgtatcatcttggaaataattgtcaggatgtataaaatagagaaaaagaaaaaaggtatcctacccagaggcaaccagataaacttttttgcctgtgc

SEQ ID NO: 185468 - DNA, 2565 bp, Homo sapiens
  Payload ID: 16525
  Gene Symbol: SPECC1L
  Gene Name: sperm antigen with calponin homology and coiled-coil domains 1-like
  ENST ID: ENST00000421374
  CDS Start-End: 200-2565
aagggcggggcccgcgagggaggccgggcggcccggcaagcggcgctgcggggtaggctgctttcctgaggccggactcaacgggtctcggctgagccaccgggtgagctcaccgcccagcccaaaccaggagattgcgagggagcgatgcggtgcagcgcgatttgcttgtaaatgcatcacgaagaggcagcccagaatgaagaaagcaagcaggagtgttggctcagtgcctaaagtgtctgcaataagtaaaacgcaaacagcagaaaaaattaaacctgaaaacagctcttcagcatctacgggaggcaaacttgtaaaacctggaacagcagcatcattgtcaaagaccaagagcagtgatgaccttttagctggaatggccggaggggtaacggtgactaatggtgttaaaggaaagaaaagcacctgcccatctgcagcaccttcagcatctgcccctgccatgaccaccgtggagaacaaatccaagattagcacaggcacagcttcttcaaccaagcggagcacttctacaggtaataaagaatccagttctactagagaaagattacgtgaacgtacccgattaaaccagagcaaaaaactaccttctgcaggtcagggagctaatgacatggcattggccaaacgttcccgcagtcgaactgctacagaatgtgacgttcgtatgagcaagtctaagtcagacaatcagatcagtgacagagctgctttggaggccaaagtgaaggatcttctcacgctggcaaaaaccaaagacgtagaaattttacatttgagaaatgaactgcgagacatgcgtgcccagctgggcattaatgaggatcattctgagggtgatgaaaaatctgagaaggaaactattatggctcaccagccgactgatgtggagtccactttattgcagttgcaggaacagaatactgccatccgtgaagaactcaaccagctgaaaaatgaaaacagaatgttaaaggacaggttgaatgcattgggcttttccctagagcagaggttagacaattctgaaaaactgtttggctatcagtccctgagcccagaaatcacccctggtaaccagagcgatggaggaggaactctgacttcttcagtggaaggctctgcccctggctcagtggaggatctcttgagtcaggatgaaaatacactaatggaccatcagcacagtaactccatggacaatttagacagtgagtgcagtgaggtctaccagcccctcacatcgagcgatgatgcgctggatgcaccatcctcctcagagtcggaaggcatccccagcatagagcgctcccggaaggggagcagcgggaatgccagtgaagtgtccgtggcttgcctgactgaacggatacaccagatggaagagaaccaacacagtacaagtgaggaactccaggcaaccctgcaagagctagctgatttacagcagattacccaggaactgaatagtgaaaacgaaaggcttggagaagagaaggttattctgatggagtctttatgtcagcagagcgataagttggaacactttagtcgacagattgaatacttccgctctcttctagatgagcatcacatttcttatgtcatagatgaagatgtaaaaagtgggcgctatatggaattagagcaacgttacatggacctcgctgagaatgcccgttttgaacgggagcagcttcttggtgtccagcagcatttaagcaatactttgaaaatggcagaacaagacaataaggaagctcaagaaatgataggggcactcaaagaacgcagtcaccatatggagcgaattattgagtctgagcagaaaggaaaagcagccttggcagccacgttagaggaatacaaagccacagtggccagtgaccagatagagatgaatcgcctgaaggctcagctggagaatgaaaagcagaaagtggcagagctgtattctatccataactctggagacaaatctgatattcaggacctcctggagagtgtcaggctggacaaagaaaaagcagagactttggctagtagcttgcaggaagatctggctcatacccgaaatgatgccaatcgattacaggatgccattgctaaggtagaggatgaataccgagccttccaagaagaagctaagaaacaaattgaagatttgaatatgacgttagaaaaattaagatcagacctggatgaaaaagaaacagaaaggagtgacatgaaagaaaccatctttgaacttgaagatgaagtagaacaacatcgtgctgtgaaacttcatgacaacctcattatttctgatctagagaatacagttaaaaaactccaggaccaaaagcacgacatggaaagagaaataaagacactccacagaagacttcgggaagaatctgcggaatggcggcagtttcaggctgatctccagactgcagtagtcattgcaaatgacattaaatctgaagcccaagaggagattggtgatctaaagcgccggttacatgaggctcaagaaaaaaatgagaaactcac

SEQ ID NO: 185469 - DNA, 612 bp, Homo sapiens
  Payload ID: 16525
  Gene Symbol: SPECC1L
  Gene Name: sperm antigen with calponin homology and coiled-coil domains 1-like
  ENST ID: ENST00000440893
  CDS Start-End: 88-612
ggacacttcactgctggttggagcttttgtaaatacaaaacactactgctgctcacaaccaagagcagtgatgaccttttagctggaatggccggaggggtaacggtgactaatggtgttaaaggaaagaaaagcacctgcccatctgcagcaccttcagcatctgcccctgccatgaccaccgtggagaacaaatccaagattagcacaggcacagcttcttcaaccaagcggagcacttctacaggtaataaagaatccagttctactagagaaagattacgtgaacgtacccgattaaaccagagcaaaaaactaccttctgcaggtcagggagctaatgacatggcattggccaaacgttcccgcagtcgaactgctacagaatgtgacgttcgtatgagcaagtctaagtcagacaatcagatcagtgacagagctgctttggaggccaaagtgaaggatcttctcacgctggcaaaaaccaaagacgtagaaattttacatttgagaaatgaactgcgagacatgcgtgcccagctgggcattaatgaggatcattctgagggtgatgaaaaatctgagaaggaaactattatggctcaccagccg

SEQ ID NO: 185470 - DNA, 3525 bp, Homo sapiens
  Payload ID: 16525
  Gene Symbol: SPECC1L
  Gene Name: sperm antigen with calponin homology and coiled-coil domains 1-like
  Uniprot ID: Q69YQ0
  ENST ID: ENST00000541492
  CDS Start-End: 139-3375
tttcctgaggccggactcaacgggtctcggctgagccaccgggtgagctcaccgcccagcccaaaccaggagattgcgagggagcgatgcggtgcagcgcgatttgcttgtaaatgcatcacgaagaggcagcccagaatgaagaaagcaagcaggagtgttggctcagtgcctaaagtgtctgcaataagtaaaacgcaaacagcagaaaaaattaaacctgaaaacagctcttcagcatctacgggaggcaaacttgtaaaacctggaacagcagcatcattgtcaaagaccaagagcagtgatgaccttttagctggaatggccggaggggtaacggtgactaatggtgttaaaggaaagaaaagcacctgcccatctgcagcaccttcagcatctgcccctgccatgaccaccgtggagaacaaatccaagattagcacaggcacagcttcttcaaccaagcggagcacttctacaggtaataaagaatccagttctactagagaaagattacgtgaacgtacccgattaaaccagagcaaaaaactaccttctgcaggtcagggagctaatgacatggcattggccaaacgttcccgcagtcgaactgctacagaatgtgacgttcgtatgagcaagtctaagtcagacaatcagatcagtgacagagctgctttggaggccaaagtgaaggatcttctcacgctggcaaaaaccaaagacgtagaaattttacatttgagaaatgaactgcgagacatgcgtgcccagctgggcattaatgaggatcattctgagggtgatgaaaaatctgagaaggaaactattatggctcaccagccgactgatgtggagtccactttattgcagttgcaggaacagaatactgccatccgtgaagaactcaaccagctgaaaaatgaaaacagaatgttaaaggacaggttgaatgcattgggcttttccctagagcagaggttagacaattctgaaaaactgtttggctatcagtccctgagcccagaaatcacccctggtaaccagagcgatggaggaggaactctgacttcttcagtggaaggctctgcccctggctcagtggaggatctcttgagtcaggatgaaaatacactaatggaccatcagcacagtaactccatggacaatttagacagtgagtgcagtgaggtctaccagcccctcacatcgagcgatgatgcgctggatgcaccatcctcctcagagtcggaaggcatccccagcatagagcgctcccggaaggggagcagcgggaatgccagtgaagtgtccgtggcttgcctgactgaacggatacaccagatggaagagaaccaacacagtacaagtgaggaactccaggcaaccctgcaagagctagctgatttacagcagattacccaggaactgaatagtgaaaacgaaaggcttggagaagagaaggttattctgatggagtctttatgtcagcagagcgataagttggaacactttagtcgacagattgaatacttccgctctcttctagatgagcatcacatttcttatgtcatagatgaagatgtaaaaagtgggcgctatatggaattagagcaacgttacatggacctcgctgagaatgcccgttttgaacgggagcagcttcttggtgtccagcagcatttaagcaatactttgaaaatggcagaacaagacaataaggaagctcaagaaatgataggggcactcaaagaacgcagtcaccatatggagcgaattattgagtctgagcagaaaggaaaagcagccttggcagccacgttagaggaatacaaagccacagtggccagtgaccagatagagatgaatcgcctgaaggctcagctggagaatgaaaagcagaaagtggcagagctgtattctatccataactctggagacaaatctgatattcaggacctcctggagagtgtcaggctggacaaagaaaaagcagagactttggctagtagcttgcaggaagatctggctcatacccgaaatgatgccaatcgattacaggatgccattgctaaggtagaggatgaataccgagccttccaagaagaagctaagaaacaaattgaagatttgaatatgacgttagaaaaattaagatcagacctggatgaaaaagaaacagaaaggagtgacatgaaagaaaccatctttgaacttgaagatgaagtagaacaacatcgtgctgtgaaacttcatgacaacctcattatttctgatctagagaatacagttaaaaaactccaggaccaaaagcacgacatggaaagagaaataaagacactccacagaagacttcgggaagaatctgcggaatggcggcagtttcaggctgatctccagactgcagtagtcattgcaaatgacattaaatctgaagcccaagaggagattggtgatctaaagcgccggttacatgaggctcaagaaaaaaatgagaaactcacaaaagaattggaggaaataaagtcacgcaagcaagaggaggagcgaggccgggtatacaattacatgaatgccgttgagagagatttggcagccttaaggcagggaatgggactgagtagaaggtcctcgacttcctcagagccaactcctacagtaaaaaccctcatcaagtcctttgacagtgcatctcaagtaccaaaccctgctgcagctgcaattcctcgaacgcccctgagcccaagtcctatgaaaacccctcctgcagcagctgtgtcccctatgcagagacattccataagtggaccaatctcaacatccaaacccctgacagccctgtcagataagagaccaaactatggggaaatccctgttcaagagcatctgttaagaacatcttcagccagccggcctgcttccctgccaagagtgcctgcgatggaaagtgccaagaccctctcagtgtctcgacgaagtagtgaagaagtgaaacgggacatttctgcacaggagggagcgtcgccagcctctctgatggctatgggaaccacgtctccacagctttccctgtcctcttctccaacggcatctgtgactcccaccacccgaagccgaataagagaagaaaggaaagaccctctctcagcattggccagagaatatggaggatcaaagaggaacgccttgctgaagtggtgtcagaagaaaacagaaggctatcagagaaggaacttcatgctggctttccaggcagctgaaagtgtcggcatcaaatccacactggacattaatgaaatggtacggactgaacgacccgactggcagaacgtgatgctgtatgtgacggcgatctacaagtactttgagacctgagcatgccgggaggagccgccccaatagcgggggtacccctccacagcgaccgagcgacaccgacgccattagctacgcacccctgtaaagcttccagcaactctgggctgccccacagcgtgtgagcctccagctcggggcttccgtatt

SEQ ID NO: 185471 - DNA, 3748 bp, Homo sapiens
  Payload ID: 16526
  Gene Symbol: SPAG1
  Gene Name: sperm associated antigen 1
  Uniprot ID: Q07617
  ENST ID: ENST00000251809
  CDS Start-End: 87-2867
gacgagaccctccctcagcacctgcagtgcagccagagccggtgcggcggccgcgacttccccgacgcggggcgctgagaagcactatgaccaccaaagattatccatcattgtggggctttggaacaacaaaaacattcaaaattcccattgaacatctagatttcaaatacattgaaaaatgttcagatgttaaacatctggaaaaaattctttgcgtgctcagatctggtgaggaaggatattatcctgaacttacagaattttgtgaaaagcatcttcaagccttggcccctgaaagcagagctttgaggaaagataaaccagcagcaacagcagccagttttacagctgaagaatgggaaaaaattgatggtgatataaagagttgggtatcagaaattaaaaaagaagaagataaaatgcactttcatgaaactgagacatttccagcaatgaaagataatttgcctccagttcgtggttcaaacagctgtcttcatgtaggcaaggaaaaatattctaaaagaccaactaaaaagaaaactccaagggattacgcggaatgggataaatttgacgtggagaaggaatgtttaaaaattgatgaagattacaaagaaaagacggtaatagacaagtcacacttgtctaaaattgagacaagaatagatacagcaggtctaactgagaaagaaaaggattttcttgccactcgtgaaaaggagaaaggaaatgaagctttcaactcaggagattatgaagaagcagtgatgtattataccaggagcatatcagcgcttcccactgtagttgcctataacaatcgagctcaagcagaaatcaaattacagaactggaatagtgcttttcaggattgtgaaaaggtcttggagttagaacctggaaacgtaaaggctcttctgcgtcgtgctactacatataaacatcaaaacaagctccgggaagctacagaagatttgagtaaagtactagatgttgagcctgataatgatttggccaagaaaaccttgtcagaggttgaaagagatctgaaaaattctgaagctgcatctgagactcaaaccaaagggaaaaggatggttattcaggaaatagaaaactccgaagatgaagaaggaaaaagcggaagaaaacatgaagatggcggtggagataagaagcccgcggagccggcgggagccgcgcgcgccgcccagccgtgcgtcatgggcaacatccagaagaagctgactggcaaagccgaaggcggcaagcggccggcaaggggcgcgccgcagcggggccagaccccggaggccggcgcggacaagcggagcccacggcgggcctctgcggcggcggcggcgggcggcggcgccaccgggcatccgggcggcgggcagggcgcggagaaccctgccggcctgaagagccagggcaacgagctgttccgaagcgggcagttcgccgaggcggccggcaagtactcggcggcaatcgcgctcctggagccagcaggaagtgaaattgcagatgatctaagtatcttatattcaaatagagcagcatgttacctaaaagaaggaaactgcagtggctgcattcaagattgtaacagggctctggaacttcatccattctctatgaaacctcttctgaggcgggcgatggcctatgaaactctagagcagtatgggaaagcttatgtggattataaaacagtgttgcagatagactgtggactccagctagcaaatgacagtgttaacaggctatcaagaattttaatggagctggatggaccaaattggcgggagaagctgtcacctattcctgctgtgcctgcttctgtgccactgcaagcttggcatccggcaaaagagatgatctcaaaacaagcaggagactccagcagccatcgccagcagggcatcacagatgaaaaaacatttaaagcccttaaggaagaaggaaatcaatgtgtaaatgacaaaaactataaagacgccctcagtaaatacagcgaatgcttaaagattaacaataaggaatgtgccatatatacaaacagagctctctgttacttgaagctgtgccagtttgaagaagcaaagcaggactgtgatcaggcacttcagctagctgatgggaacgtgaaagccttctatagacgagctctggctcataaaggactcaagaattatcagaaaagcttaattgatctcaataaagttatcctactagatccaagtattattgaggcaaagatggaactggaagaggtaactagactccttaatcttaaggataagacagcaccattcaacaaagaaaaggagagaaggaaaattgagattcaagaggtgaatgaaggcaaggaggagcctggaagacctgcaggggaggtctccatgggatgccttgcttctgagaagggaggcaaaagcagcaggtcaccagaagaccctgagaaacttccgatagccaagcctaataatgcctatgaatttggtcagattataaatgctctcagtaccaggaaggataaagaagcctgtgcacatcttttagccatcactgcaccaaaagatttgccgatgtttttaagtaacaaacttgaaggggatacattccttctcctcattcagtctctgaaaaataatcttattgaaaaagatccctcattggtgtatcagcatcttttatacctgagtaaagcagaaaggtttaagatgatgttgacactaattagcaagggccaaaaggagctaattgaacagctgtttgaggacctttcggacacaccaaacaaccattttactttagaagatatacaggccctaaaaaggcagtatgagctttaaatcaagataattgttagatttcttccatgcatgtatgtgttccaggaatgttaatgagatggtattgtaaaagagttgcatggataaaacttggcctagaaaagtttggtctgcactataaaacattttacttattttcctacatagaacatgtatattctacaatctgctttttattagttgtaaatattttcttatgtaccagaaccaaataagtatatttagaacttgttaaaaatacattttaatttatgatatacatattattttaattacttgttaaaattttgagttaagttgcatttctttgggctatgaaggagtcctcttaagtttgatagaaatgaatttcttgtaacattcttttttaaaagtggaagtcattaacagtgattattatatcacttatatcctgctaagatacacataaatcccattttgtactagtacctgtggattacagtcagttaaaatgaaatgcaacactgaagtctataacatgaaatgattattaaattgtttattaatttagagctataagaggaacttattttttctaatacggaagcattgcctaataattaagaacaaaaattgccaaaaatttctaccactttttactagattttaaaaagctactttcttttatattgcctatataagcaaaaaaccaaccactgtattaaagcaaactaagcctgcatttatatctgaattattacctccatattttaccaaacatttgaatgtcccccttcccccttttttgttttctgcttttatgactgtatttattcctttactgtaaaagaatatgaagaactcatacatgttgaaagctcctttgttgactgggtcaaagtgaaggaatttcaatctcc

SEQ ID NO: 185472 - DNA, 3852 bp, Homo sapiens
  Payload ID: 16526
  Gene Symbol: SPAG1
  Gene Name: sperm associated antigen 1
  Uniprot ID: Q07617
  ENST ID: ENST00000388798
  CDS Start-End: 192-2972
ggggctccccagtcccggcaggtcctggcgccgctgtacatagaaaccgttgccacggcgggaggatgccgtttcttttcggtctccgactgcagggggcggtcggccctgtggatgcaggaaagagggtgcctcggtgggagagacccagcttttcgcgttagtaggcccgagcagtttgaactggagctatgaccaccaaagattatccatcattgtggggctttggaacaacaaaaacattcaaaattcccattgaacatctagatttcaaatacattgaaaaatgttcagatgttaaacatctggaaaaaattctttgcgtgctcagatctggtgaggaaggatattatcctgaacttacagaattttgtgaaaagcatcttcaagccttggcccctgaaagcagagctttgaggaaagataaaccagcagcaacagcagccagttttacagctgaagaatgggaaaaaattgatggtgatataaagagttgggtatcagaaattaaaaaagaagaagataaaatgcactttcatgaaactgagacatttccagcaatgaaagataatttgcctccagttcgtggttcaaacagctgtcttcatgtaggcaaggaaaaatattctaaaagaccaactaaaaagaaaactccaagggattacgcggaatgggataaatttgacgtggagaaggaatgtttaaaaattgatgaagattacaaagaaaagacggtaatagacaagtcacacttgtctaaaattgagacaagaatagatacagcaggtctaactgagaaagaaaaggattttcttgccactcgtgaaaaggagaaaggaaatgaagctttcaactcaggagattatgaagaagcagtgatgtattataccaggagcatatcagcgcttcccactgtagttgcctataacaatcgagctcaagcagaaatcaaattacagaactggaatagtgcttttcaggattgtgaaaaggtcttggagttagaacctggaaacgtaaaggctcttctgcgtcgtgctactacatataaacatcaaaacaagctccgggaagctacagaagatttgagtaaagtactagatgttgagcctgataatgatttggccaagaaaaccttgtcagaggttgaaagagatctgaaaaattctgaagctgcatctgagactcaaaccaaagggaaaaggatggttattcaggaaatagaaaactccgaagatgaagaaggaaaaagcggaagaaaacatgaagatggcggtggagataagaagcccgcggagccggcgggagccgcgcgcgccgcccagccgtgcgtcatgggcaacatccagaagaagctgactggcaaagccgaaggcggcaagcggccggcaaggggcgcgccgcagcggggccagaccccggaggccggcgcggacaagcggagcccacggcgggcctctgcggcggcggcggcgggcggcggcgccaccgggcatccgggcggcgggcagggcgcggagaaccctgccggcctgaagagccagggcaacgagctgttccgaagcgggcagttcgccgaggcggccggcaagtactcggcggcaatcgcgctcctggagccagcaggaagtgaaattgcagatgatctaagtatcttatattcaaatagagcagcatgttacctaaaagaaggaaactgcagtggctgcattcaagattgtaacagggctctggaacttcatccattctctatgaaacctcttctgaggcgggcgatggcctatgaaactctagagcagtatgggaaagcttatgtggattataaaacagtgttgcagatagactgtggactccagctagcaaatgacagtgttaacaggctatcaagaattttaatggagctggatggaccaaattggcgggagaagctgtcacctattcctgctgtgcctgcttctgtgccactgcaagcttggcatccggcaaaagagatgatctcaaaacaagcaggagactccagcagccatcgccagcagggcatcacagatgaaaaaacatttaaagcccttaaggaagaaggaaatcaatgtgtaaatgacaaaaactataaagacgccctcagtaaatacagcgaatgcttaaagattaacaataaggaatgtgccatatatacaaacagagctctctgttacttgaagctgtgccagtttgaagaagcaaagcaggactgtgatcaggcacttcagctagctgatgggaacgtgaaagccttctatagacgagctctggctcataaaggactcaagaattatcagaaaagcttaattgatctcaataaagttatcctactagatccaagtattattgaggcaaagatggaactggaagaggtaactagactccttaatcttaaggataagacagcaccattcaacaaagaaaaggagagaaggaaaattgagattcaagaggtgaatgaaggcaaggaggagcctggaagacctgcaggggaggtctccatgggatgccttgcttctgagaagggaggcaaaagcagcaggtcaccagaagaccctgagaaacttccgatagccaagcctaataatgcctatgaatttggtcagattataaatgctctcagtaccaggaaggataaagaagcctgtgcacatcttttagccatcactgcaccaaaagatttgccgatgtttttaagtaacaaacttgaaggggatacattccttctcctcattcagtctctgaaaaataatcttattgaaaaagatccctcattggtgtatcagcatcttttatacctgagtaaagcagaaaggtttaagatgatgttgacactaattagcaagggccaaaaggagctaattgaacagctgtttgaggacctttcggacacaccaaacaaccattttactttagaagatatacaggccctaaaaaggcagtatgagctttaaatcaagataattgttagatttcttccatgcatgtatgtgttccaggaatgttaatgagatggtattgtaaaagagttgcatggataaaacttggcctagaaaagtttggtctgcactataaaacattttacttattttcctacatagaacatgtatattctacaatctgctttttattagttgtaaatattttcttatgtaccagaaccaaataagtatatttagaacttgttaaaaatacattttaatttatgatatacatattattttaattacttgttaaaattttgagttaagttgcatttctttgggctatgaaggagtcctcttaagtttgatagaaatgaatttcttgtaacattcttttttaaaagtggaagtcattaacagtgattattatatcacttatatcctgctaagatacacataaatcccattttgtactagtacctgtggattacagtcagttaaaatgaaatgcaacactgaagtctataacatgaaatgattattaaattgtttattaatttagagctataagaggaacttattttttctaatacggaagcattgcctaataattaagaacaaaaattgccaaaaatttctaccactttttactagattttaaaaagctactttcttttatattgcctatataagcaaaaaaccaaccactgtattaaagcaaactaagcctgcatttatatctgaattattacctccatattttaccaaacatttgaatgtcccccttcccccttttttgttttctgcttttatgactgtatttattcctttactgtaaaagaatatgaagaactcatacatgttgaaagctcctttgttgactgggtcaaagtgaaggaatttcaatctc

SEQ ID NO: 185473 - DNA, 1723 bp, Homo sapiens
  Payload ID: 16526
  Gene Symbol: SPAG1
  Gene Name: sperm associated antigen 1
  Uniprot ID: Q07617
  ENST ID: ENST00000520643
  CDS Start-End: 216-1466
gtgaaggcggggaaggtgaacctgtggccgtcggcagatctgcagatctgccggactgcgggtcggggcgtggcaggggcctagtccccgccccggccgtcagcctgtcgcctctggctcgggccgggcgacgagaccctccctcagcacctgcagtgcagccagagccggtgcggcggccgcgacttccccgacgcggggcgctgagaagcactatgaccaccaaagattatccatcattgtggggctttggaacaacaaaaacattcaaaattcccattgaacatctagatttcaaatacattgaaaaatgttcagatgttaaacatctggaaaaaattctttgcgtgctcagatctggtgaggaaggatattatcctgaacttacagaattttgtgaaaagcatcttcaagccttggcccctgaaagcagagctttgaggaaagataaaccagcagcaacagcagccagttttacagctgaagaatgggaaaaaattgatggtgatataaagagttgggtatcagaaattaaaaaagaagaagataaaatgcactttcatgaaactgagacatttccagcaatgaaagataatttgcctccagttcgtggttcaaacagctgtcttcatgtaggcaaggaaaaatattctaaaagaccaactaaaaagaaaactccaagggattacgcggaatgggataaatttgacgtggagaaggaatgtttaaaaattgatgaagattacaaagaaaagacggtaatagacaagtcacacttgtctaaaattgagacaagaatagatacagcaggtctaactgagaaagaaaaggattttcttgccactcgtgaaaaggagaaaggaaatgaagctttcaactcaggagattatgaagaagcagtgatgtattataccaggagcatatcagcgcttcccactgtagttgcctataacaatcgagctcaagcagaaatcaaattacagaactggaatagtgcttttcaggattgtgaaaaggtcttggagttagaacctggaaacgtaaaggctcttctgcgtcgtgctactacatataaacatcaaaacaagctccgggaagctacagaagatttgagtaaagtactagatgttgagcctgataatgatttggccaagaaaaccttgtcagaggttgaaagagatctgaaaaattctgaagctgcatctgagactcaaaccaaagggaaaaggatggttattcaggaaatagaaaactccgaagatgaagaaggaaaaagcggaagaaaacatgaagatggcggtggagataagagtaaaatattttttctatttaggttatgtaaaaagctgccttttaatatgatgagctggctcaatttttctattcgtacagaaattcgtaatctatcagtttttctagctttgccttgtaaattcacaagccagtttcgctcatctttttcttaatacagcttggtagaatctctcaaacccattttccttcttaacctgtcacctttttctagtgctcagtttaattcctggtcatcacctttaaatgtaaatggctgtgtttatttgacacagaccatttgccagttaactttaaatatctctctttgataattgttttgtatatatctacttgattgcaaacaaatgtgttggtttcaaaacaggtatgggtagccccatttatatgccaaaaatgaacgtattactag

SEQ ID NO: 185474 - DNA, 1796 bp, Homo sapiens
  Payload ID: 16526
  Gene Symbol: SPAG1
  Gene Name: sperm associated antigen 1
  Uniprot ID: Q07617
  ENST ID: ENST00000520508
  CDS Start-End: 285-1535
aacgctggagttcccgggtccaccggcgcggtcagccctggtgacccaagccaggggctggggagcaatctgagaccattgcggctgggctgtggggctccccagtcccggcaggtcctggcgccgctgtacatagaaaccgttgccacggcgggaggatgccgtttcttttcggtctccgactgcagggggcggtcggccctgtggatgcaggaaagagggtgcctcggtgggagagacccagcttttcgcgttagtaggcccgagcagtttgaactggagctatgaccaccaaagattatccatcattgtggggctttggaacaacaaaaacattcaaaattcccattgaacatctagatttcaaatacattgaaaaatgttcagatgttaaacatctggaaaaaattctttgcgtgctcagatctggtgaggaaggatattatcctgaacttacagaattttgtgaaaagcatcttcaagccttggcccctgaaagcagagctttgaggaaagataaaccagcagcaacagcagccagttttacagctgaagaatgggaaaaaattgatggtgatataaagagttgggtatcagaaattaaaaaagaagaagataaaatgcactttcatgaaactgagacatttccagcaatgaaagataatttgcctccagttcgtggttcaaacagctgtcttcatgtaggcaaggaaaaatattctaaaagaccaactaaaaagaaaactccaagggattacgcggaatgggataaatttgacgtggagaaggaatgtttaaaaattgatgaagattacaaagaaaagacggtaatagacaagtcacacttgtctaaaattgagacaagaatagatacagcaggtctaactgagaaagaaaaggattttcttgccactcgtgaaaaggagaaaggaaatgaagctttcaactcaggagattatgaagaagcagtgatgtattataccaggagcatatcagcgcttcccactgtagttgcctataacaatcgagctcaagcagaaatcaaattacagaactggaatagtgcttttcaggattgtgaaaaggtcttggagttagaacctggaaacgtaaaggctcttctgcgtcgtgctactacatataaacatcaaaacaagctccgggaagctacagaagatttgagtaaagtactagatgttgagcctgataatgatttggccaagaaaaccttgtcagaggttgaaagagatctgaaaaattctgaagctgcatctgagactcaaaccaaagggaaaaggatggttattcaggaaatagaaaactccgaagatgaagaaggaaaaagcggaagaaaacatgaagatggcggtggagataagagtaaaatattttttctatttaggttatgtaaaaagctgccttttaatatgatgagctggctcaatttttctattcgtacagaaattcgtaatctatcagtttttctagctttgccttgtaaattcacaagccagtttcgctcatctttttcttaatacagcttggtagaatctctcaaacccattttccttcttaacctgtcacctttttctagtgctcagtttaattcctggtcatcacctttaaatgtaaatggctgtgtttatttgacacagaccatttgccagttaactttaaatatctctctttgataattgttttgtatatatctacttgattgcaaacaaatgtgttggtttcaaaacaggtatgggtagccccatttatatgccaaaaatgaacgtattactagaaaa

SEQ ID NO: 185475 - DNA, 534 bp, Homo sapiens
  Payload ID: 16527
  Gene Symbol: SPAG11A
  Gene Name: sperm associated antigen 11A
  Uniprot ID: Q6PDA7
  ENST ID: ENST00000351436
  CDS Start-End: 24-272
ggcttgcagtgctcttggcagacatgaggcaacgattgctcccgtccgtcaccagccttctccttgtggccctgctgtttccaggatcgtctcaagccagacatgtgaaccactcagccactgaggctctcggagaactcagggaaagagcccctgggcaaggcacaaacgggtttcagctgctacgccacgcagtgaaacgggacctcttaccaccgcgcaccccaccttaccaagggacaggccagcagcacagacaacgctgtggataaggagagtagagacttcctcttcctgcctcctgtcttctggagttgtgaccgcagggtggcccaggtggatcggcttcagaggccaggaggcagctctctgcagccgaagagcaggagcctcacccacggtctgtggctctgactaagcctggactgcctctcggctgtgctccgtggactggctccccagggatccatgtgagagaccggagtatgatcctcagtgcgaggacaaataaaagtagtgattatgtccacccca

SEQ ID NO: 185476 - DNA, 612 bp, Homo sapiens
  Payload ID: 16527
  Gene Symbol: SPAG11A
  Gene Name: sperm associated antigen 11A
  ENST ID: ENST00000326558
  CDS Start-End: 24-350
ggcttgcagtgctcttggcagacatgaggcaacgattgctcccgtccgtcaccagccttctccttgtggccctgctgtttccaggatcgtctcaagccagacatgtgaaccactcagccactgaggctctcggagaactcagggaaagagcccctgggcaaggcacaaacgggtttcagctgctacgccacgcagtgaaacgggacctcttaccaccgcgcaccccaccttaccaaggggatgttccactgggaattagaaataccatctgccgtatgcagcaagggatctgcagactttttttctgccattctgggacaggccagcagcacagacaacgctgtggataaggagagtagagacttcctcttcctgcctcctgtcttctggagttgtgaccgcagggtggcccaggtggatcggcttcagaggccaggaggcagctctctgcagccgaagagcaggagcctcacccacggtctgtggctctgactaagcctggactgcctctcggctgtgctccgtggactggctccccagggatccatgtgagagaccggagtatgatcctcagtgcgaggacaaataaaagtagtgattatgtccacccca

SEQ ID NO: 185477 - DNA, 445 bp, Homo sapiens
  Payload ID: 16527
  Gene Symbol: SPAG11A
  Gene Name: sperm associated antigen 11A
  ENST ID: ENST00000326625
  CDS Start-End: 54-296
tcatatttgtgctccttcacgggagggcagggaggttcaacggaccttaaaacatgaaggtcttttttctgtttgctgttctcttttgtttggtccaaacaaactcaggggatgttccactgggaattagaaataccatctgccgtatgcagcaagggatctgcagactttttttctgccattctggtgagaaaaagcgtgacattagctctgatccctggaataggtgttgcgtatcaaatacagatgaagaaggaaaagagaaaccagagatggatggcagatctgggatctaaaatataagctcccggaaggcagggatgttgaagtatcccaagggcttaaaggaatgtgtggcttatagtaggtgttcaataaatatttgttgaatgaatttagcaccaaaggtgaagagctgataaaagacatttttttaacttcctta

SEQ ID NO: 185478 - DNA, 806 bp, Homo sapiens
  Payload ID: 16527
  Gene Symbol: SPAG11A
  Gene Name: sperm associated antigen 11A
  ENST ID: ENST00000400125
  CDS Start-End: 172-513
agcagtgggatagtagcgtgtccacattgtcctttgagaatgagaagtcatcctggagcacagctcttcccacgctccgggcccacacacccagcctcactccatcaaaggagccccgctgcctgcccacccaccctgggtgctttctggcttgcagtgctcttggcagacatgaggcaacgattgctcccgtccgtcaccagccttctccttgtggccctgctgtttccaggatcgtctcaagccagacatgtgaaccactcagccactgaggctctcggagaactcagggaaagagcccctgggcaaggcacaaacgggtttcagctgctacgccacgcagtgaaacgggacctcttaccaccgcgcaccccaccttaccaagaacctgcatcagatttaaaagttgttgactgcaggagaagtgaaggcttctgccaagaatactgtaattatatggaaacacaagtaggctactgctctaaaaagaaagacgcctgctgtttacattaaaactgatgttgctgatatagaaacaaagctctgccacttacctgttctccggggccacgttgtccaatcaggtgcaggttttttgcggaagtgtctgagcagcagggagcggagatattgccacttgtgccagacagttcaaatattttattgtggcaagataaatgacaaaaatgctacctgtgatcttacagaagatgacttagcttgacatgaacagaattttcaaaatcacacaatttgtgctagtaaatgtggatatcataaacttttattagaaagaattaaaataa

SEQ ID NO: 185479 - DNA, 521 bp, Homo sapiens
  Payload ID: 16527
  Gene Symbol: SPAG11A
  Gene Name: sperm associated antigen 11A
  ENST ID: ENST00000454911
  CDS Start-End: 54-206
tcatatttgtgctccttcacgggagggcagggaggttcaacggaccttaaaacatgaaggtcttttttctgtttgctgttctcttttgtttggtccaaacaaactcagtgcacatctctcaccaggaggctcgaggaccctcatttaagatctgcgtgggctttttagggcctagatgggccaggggatgttccactgggaattagaaataccatctgccgtatgcagcaagggatctgcagactttttttctgccattctggtgagaaaaagcgtgacattagctctgatccctggaataggtgttgcgtatcaaatacagatgaagaaggaaaagagaaaccagagatggatggcagatctgggatctaaaatataagctcccggaaggcagggatgttgaagtatcccaagggcttaaaggaatgtgtggcttatagtaggtgttcaataaatatttgttgaatgaatttagcaccaaaggtgaagagctgataaaagacatttttttaacttcctta

SEQ ID NO: 185480 - DNA, 777 bp, Homo sapiens
  Payload ID: 16527
  Gene Symbol: SPAG11A
  Gene Name: sperm associated antigen 11A
  ENST ID: ENST00000434307
  CDS Start-End: 168-479
gtgggatagtagcgtgtccacattgtcctttgagaatgagaagtcatcctggagcacagctcttcccacgctccgggcccacacacccagcctcactccatcaaaggagccccgctgcctgcccacccaccctgggtgctttctggcttgcagtgctcttggcagacatgaggcaacgattgctcccgtccgtcaccagccttctccttgtggccctgctgtttccaggatcgtctcaagccagacatgtgaaccactcagccactgaggctctcggagaactcagggaaagagcccctgggcaaggcacaaacgggtttcagctgctacgccacgcagtgaaacgggacctcttaccaccgcgcaccccaccttaccaagtgcacatctctcaccaggaggctcgaggaccctcatttaagatctgcgtgggctttttagggcctagatgggccaggggatgttccactgggaattagaaataccatctgccgtatgcagcaagggatctgcagactttttttctgccattctggtgagaaaaagcgtgacattagctctgatccctggaataggtgttgcgtatcaaatacagatgaagaaggaaaagagaaaccagagatggatggcagatctgggatctaaaatataagctcccggaaggcagggatgttgaagtatcccaagggcttaaaggaatgtgtggcttatagtaggtgttcaataaatatttgttgaatgaatttagcaccaaaggtgaagagctgataaaagaca

SEQ ID NO: 185481 - DNA, 552 bp, Homo sapiens
  Payload ID: 16527
  Gene Symbol: SPAG11A
  Gene Name: sperm associated antigen 11A
  ENST ID: ENST00000525884
  CDS Start-End: 1-162
tcgtctcaagccagacatgtgaaccactcagccactgaggctctcggagaactcagggaaagagcccctgggcaaggcacaaacgggtttcagctgctacgccacgcagtgaaacgggacctcttaccaccgcgcaccccaccttaccaagaaatgaaatgaaggaggtgggctcgatctcagactccatcagagcacagcagcctgggggtgtggaagcagagcctcacccaaggaccaaggggtctccaccagggacaggccagcagcacagacaacgctgtggataaggagagtagagacttcctcttcctgcctcctgtcttctggagttgtgaccgcagggtggcccaggtggatcggcttcagaggccaggaggcagctctctgcagccgaagagcaggagcctcacccacggtctgtggctctgactaagcctggactgcctctcggctgtgctccgtggactggctccccagggatccatgtgagagaccggagtatgatcctcagtgcgaggacaaataaaagtagtgattatgtccacccca

SEQ ID NO: 185482 - DNA, 407 bp, Homo sapiens
  Payload ID: 16527
  Gene Symbol: SPAG11A
  Gene Name: sperm associated antigen 11A
  ENST ID: ENST00000528033
  CDS Start-End: 1-320
tgtttccaggatcgtctcaagccagacatgtgaaccactcagccactgaggctctcggagaactcagggaaagagcccctgggcaaggcacaaacgggtttcagctgctacgccacgcagtgaaacgggacctcttaccaccgcgcaccccaccttaccaagggactcactctgttgctcaggctggagtgcagtggcactgttaccgcttattgcagcctctacctcctgggctcaagtgctcctcccaccttagcctcccaaatacctgggaccaccggcatgcaccattgcacactgctagtttttttaggtgttgagccaccacttccagccccaagcttgcagctctgactacactttctccgggaagctgacactcaggcccgaatgtggctggctgccgc

SEQ ID NO: 185483 - DNA, 795 bp, Homo sapiens
  Payload ID: 16528
  Gene Symbol: SPAG11B
  Gene Name: sperm associated antigen 11B
  Uniprot ID: Q08648
  ENST ID: ENST00000297498
  CDS Start-End: 168-479
gtgggatagtagcgtgtccacattgtcctttgagaatgagaagtcatcctggagcacagctcttcccacgctccgggcccacacacccagcctcactccatcaaaggagccccgctgcctgcccacccaccctgggtgctttctggcttgcagtgctcttggcagacatgaggcaacgattgctcccgtccgtcaccagccttctccttgtggccctgctgtttccaggatcgtctcaagccagacatgtgaaccactcagccactgaggctctcggagaactcagggaaagagcccctgggcaaggcacaaacgggtttcagctgctacgccacgcagtgaaacgggacctcttaccaccgcgcaccccaccttaccaagtgcacatctctcaccgggaggctcgaggaccctcatttaggatctgtgtggactttttagggcctagatgggccaggggatgttccaccgggaattagaaataccatctgccatatgcagcaagggatctgcagactttttttctgccattctggtgagaaaaagcgtgacatttgctctgatccctggaataggtgttgcgtatcaaatacagatgaagaaggaaaagagaaaccagagatggatggcagatctgggatctaaaatataagctcccggaaggcagggatgttgaagtatcccaagggcttaaaggaatgtgtggcttatagtaggtgttcaataaatatttgttgaatgaatttagcaccaaaggtgaagagctgataaaagacatttttttaacttccttac

SEQ ID NO: 185484 - DNA, 806 bp, Homo sapiens; identical to SEQ ID NO: 185478
  Payload ID: 16528
  Gene Symbol: SPAG11B
  Gene Name: sperm associated antigen 11B
  Uniprot ID: Q08648
  ENST ID: ENST00000317900
  CDS Start-End: 172-513

SEQ ID NO: 185485 - DNA, 612 bp, Homo sapiens
  Payload ID: 16528
  Gene Symbol: SPAG11B
  Gene Name: sperm associated antigen 11B
  ENST ID: ENST00000359758
  CDS Start-End: 24-350
ggcttgcagtgctcttggcagacatgaggcaacgattgctcccgtccgtcaccagccttctccttgtggccctgctgtttccaggatcgtctcaagccagacatgtgaaccactcagccactgaggctctcggagaactcagggaaagagcccctgggcaaggcacaaacgggtttcagctgctacgccacgcagtgaaacgggacctcttaccaccgcgcaccccaccttaccaaggggatgttccaccgggaattagaaataccatctgccatatgcagcaagggatctgcagactttttttctgccattctgggacaggccagcagcacagacaacgctgtggataaggagagtagagacttcctcttcctgcctcctgtcttctggagttgtgacctcagggtggcccaggtggatcggcttcagaggccaggaggcagctctctgcagccgaagagcaggagcctcacccagggtctgtggctctgactaagcctggactgcctctcggctgtgctccatggactggctccccagggatccatgtgagagaccggagtatgatcctcagtgcgaggacaaataaaagtagtgattatgtccacccca

SEQ ID NO: 185486 - DNA, 534 bp, Homo sapiens
  Payload ID: 16528
  Gene Symbol: SPAG11B
  Gene Name: sperm associated antigen 11B
  ENST ID: ENST00000361111
  CDS Start-End: 24-272
ggcttgcagtgctcttggcagacatgaggcaacgattgctcccgtccgtcaccagccttctccttgtggccctgctgtttccaggatcgtctcaagccagacatgtgaaccactcagccactgaggctctcggagaactcagggaaagagcccctgggcaaggcacaaacgggtttcagctgctacgccacgcagtgaaacgggacctcttaccaccgcgcaccccaccttaccaagggacaggccagcagcacagacaacgctgtggataaggagagtagagacttcctcttcctgcctcctgtcttctggagttgtgacctcagggtggcccaggtggatcggcttcagaggccaggaggcagctctctgcagccgaagagcaggagcctcacccagggtctgtggctctgactaagcctggactgcctctcggctgtgctccatggactggctccccagggatccatgtgagagaccggagtatgatcctcagtgcgaggacaaataaaagtagtgattatgtccacccca

SEQ ID NO: 185487 - DNA, 655 bp, Homo sapiens
  Payload ID: 16528
  Gene Symbol: SPAG11B
  Gene Name: sperm associated antigen 11B
  ENST ID: ENST00000398462
  CDS Start-End: 152-553
tccacattgtcctttgagaatgagaagtcatcctggagcacagctcttcccacgctccgggcccacacacccagcctcactccatcaaaggagccccgctgcctgcccacccaccctgggtgctttctggcttgcagtgctcttggcagacatgaggcaacgattgctcccgtccgtcaccagccttctccttgtggccctgctgtttccaggatcgtctcaagccagacatgtgaaccactcagccactgaggctctcggagaactcagggaaagagcccctgggcaaggcacaaacgggtttcagctgctacgccacgcagtgaaacgggacctcttaccaccgcgcaccccaccttaccaaggggatgttccaccgggaattagaaataccatctgccatatgcagcaagggatctgcagactttttttctgccattctggtgagaaaaagcgtgacatttgctctgatccctggaataggtgttgcgtatcaaatacagatgaagaaggaaaagagaaaccagagatggatggcagatctgggatctaaaatataagctcccggaaggcagggatgttgaagtatcccaagggcttaaaggaatgtgtggcttatagtaggtgttcaataaatatttgttgaatgaattta

SEQ ID NO: 185488 - DNA, 444 bp, Homo sapiens
  Payload ID: 16528
  Gene Symbol: SPAG11B
  Gene Name: sperm associated antigen 11B
  Uniprot ID: Q08648
  ENST ID: ENST00000458665
  CDS Start-End: 53-295
catatttgtgctccttcacgggagggcagggaggttcaacggaccttaaaacatgaaggtcttttttctgtttgctgttctcttttgtttggtccaaacaaactcaggggatgttccaccgggaattagaaataccatctgccatatgcagcaagggatctgcagactttttttctgccattctggtgagaaaaagcgtgacatttgctctgatccctggaataggtgttgcgtatcaaatacagatgaagaaggaaaagagaaaccagagatggatggcagatctgggatctaaaatataagctcccggaaggcagggatgttgaagtatcccaagggcttaaaggaatgtgtggcttatagtaggtgttcaataaatatttgttgaatgaatttagcaccaaaggtgaagagctgataaaagacatttttttaacttcctta

SEQ ID NO: 185489 - DNA, 481 bp, Homo sapiens
  Payload ID: 16528
  Gene Symbol: SPAG11B
  Gene Name: sperm associated antigen 11B
  Uniprot ID: Q08648
  ENST ID: ENST00000528168
  CDS Start-End: 53-205
catatttgtgctccttcacgggagggcagggaggttcaacggaccttaaaacatgaaggtcttttttctgtttgctgttctcttttgtttggtccaaacaaactcagtgcacatctctcaccgggaggctcgaggaccctcatttaggatctgtgtggactttttagggcctagatgggccaggggatgttccaccgggaattagaaataccatctgccatatgcagcaagggatctgcagactttttttctgccattctggtgagaaaaagcgtgacatttgctctgatccctggaataggtgttgcgtatcaaatacagatgaagaaggaaaagagaaaccagagatggatggcagatctgggatctaaaatataagctcccggaaggcagggatgttgaagtatcccaagggcttaaaggaatgtgtggcttatagtaggtgttcaataaatatttgttgaatgaatttagcaccaaa

SEQ ID NO: 185490 - DNA, 552 bp, Homo sapiens
  Payload ID: 16528
  Gene Symbol: SPAG11B
  Gene Name: sperm associated antigen 11B
  ENST ID: ENST00000528767
  CDS Start-End: 1-162
tcgtctcaagccagacatgtgaaccactcagccactgaggctctcggagaactcagggaaagagcccctgggcaaggcacaaacgggtttcagctgctacgccacgcagtgaaacgggacctcttaccaccgcgcaccccaccttaccaagaaatgaaatgaaggaggtgggctcgatctcagactccatcagagcacagcagcctgggggtgtggaagcagagcctcacccaaggaccaaggggtctccaccagggacaggccagcagcacagacaacgctgtggataaggagagtagagacttcctcttcctgcctcctgtcttctggagttgtgacctcagggtggcccaggtggatcggcttcagaggccaggaggcagctctctgcagccgaagagcaggagcctcacccagggtctgtggctctgactaagcctggactgcctctcggctgtgctccatggactggctccccagggatccatgtgagagaccggagtatgatcctcagtgcgaggacaaataaaagtagtgattatgtccacccca

SEQ ID NO: 185491 - DNA, 408 bp, Homo sapiens
  Payload ID: 16528
  Gene Symbol: SPAG11B
  Gene Name: sperm associated antigen 11B
  ENST ID: ENST00000528943
  CDS Start-End: 1-321
ctgtttccaggatcgtctcaagccagacatgtgaaccactcagccactgaggctctcggagaactcagggaaagagcccctgggcaaggcacaaacgggtttcagctgctacgccacgcagtgaaacgggacctcttaccaccgcgcaccccaccttaccaagggactcactctgttgctcaggctggagtgcagtggcactgttaccgcttattgcagcctctacctcctgggctcaagtgctcctcccaccttagcctcccaaatacctgggaccaccggcatgcaccattgcacactgctagtttttttaggtgttgagccaccacttccagccccaagcttgcagctctgactacactttctccgggaagctgacactcaggcccgaatgtggctggctgccgc

SEQ ID NO: 185492 - DNA, 806 bp, Homo sapiens
  Payload ID: 16528
  Gene Symbol: SPAG11B
  Gene Name: sperm associated antigen 11B
  ENST ID: ENST00000617378
  CDS Start-End: 172-513
agcagtgggatagtagcgtgtccacattgtcctttgagaatgagaagtcatcctggagcacagctcttcccacgctccgggcccacacacccagcctcactccatcaaaggagccccgctgcctgcccacccaccctgggtgctttctggcttgcagtgctcttggcagacatgaggcaacgattgctcccgtccgtcaccagccttctccttgtggccctgctgtttccaggatcgtctcaagccagacatgtgaaccactcagccactgaggctctcggagaactcagggaaagagcccctgggcaaggcacaaacgggtttcagctgctacgccacgcagtgaaacgggacctcttacaaccgcgcaccccaccttaccaagaacctgcatcagatttaaaagttgttgactgcaggagaagtgaaggcttctgccaagaatactgtaattatatggaaacacaagtaggctactgctctaaaaagaaagacgcctgctgtttacattaaaactgatgttgctgatatagaaacaaagctctgccacttacctgttctccggggccacgttgtccaatcaggtgcaggttttttgcggaagtgtctgagcagcagggagcggagatattgccacttgtgccagacagttcaaatattttattgtggcaagataaatgacaaaaatgctacctgtgatcttacagaagatgacttagcttgacatgaacagaattttcaaaatcacacaatttgtgctagtaaatgtggatatcataaacttttattagaaagaattaaaataa

SEQ ID NO: 185493 - DNA, 655 bp, Homo sapiens
  Payload ID: 16528
  Gene Symbol: SPAG11B
  Gene Name: sperm associated antigen 11B
  ENST ID: ENST00000617162
  CDS Start-End: 152-553
tccacattgtcctttgagaatgagaagtcatcctggagcacagctcttcccacgctccgggcccacacacccagcctcactccatcaaaggagccccgctgcctgcccacccaccctgggtgctttctggcttgcagtgctcttggcagacatgaggcaacgattgctcccgtccgtcaccagccttctccttgtggccctgctgtttccaggatcgtctcaagccagacatgtgaaccactcagccactgaggctctcggagaactcagggaaagagcccctgggcaaggcacaaacgggtttcagctgctacgccacgcagtgaaacgggacctcttacaaccgcgcaccccaccttaccaaggggatgttccaccgggaattagaaataccatctgccatatgcagcaagggatctgcagactttttttctgccattctggtgagaaaaagcgtgacatttgctctgatccctggaataggtgttgcgtatcaaatacagatgaagaaggaaaagagaaaccagagatggatggcagatctgggatctaaaatataagctcccggaaggcagggatgttgaagtatcccaagggcttaaaggaatgtgtggcttatagtaggtgttcaataaatatttgttgaatgaattta

SEQ ID NO: 185494 - DNA, 795 bp, Homo sapiens
  Payload ID: 16528
  Gene Symbol: SPAG11B
  Gene Name: sperm associated antigen 11B
  ENST ID: ENST00000613163
  CDS Start-End: 168-479
gtgggatagtagcgtgtccacattgtcctttgagaatgagaagtcatcctggagcacagctcttcccacgctccgggcccacacacccagcctcactccatcaaaggagccccgctgcctgcccacccaccctgggtgctttctggcttgcagtgctcttggcagacatgaggcaacgattgctcccgtccgtcaccagccttctccttgtggccctgctgtttccaggatcgtctcaagccagacatgtgaaccactcagccactgaggctctcggagaactcagggaaagagcccctgggcaaggcacaaacgggtttcagctgctacgccacgcagtgaaacgggacctcttacaaccgcgcaccccaccttaccaagtgcacatctctcaccgggaggctcgaggaccctcatttaggatctgtgtggactttttagggcctagatgggccaggggatgttccaccgggaattagaaataccatctgccatatgcagcaagggatctgcagactttttttctgccattctggtgagaaaaagcgtgacatttgctctgatccctggaataggtgttgcgtatcaaatacagatgaagaaggaaaagagaaaccagagatggatggcagatctgggatctaaaatataagctcccggaaggcagggatgttgaagtatcccaagggcttaaaggaatgtgtggcttatagtaggtgttcaataaatatttgttgaatgaatttagcaccaaaggtgaagagctgataaaagacatttttttaacttccttac

SEQ ID NO: 185495 - DNA, 481 bp, Homo sapiens
  Payload ID: 16528
  Gene Symbol: SPAG11B
  Gene Name: sperm associated antigen 11B
  Uniprot ID: Q08648
  ENST ID: ENST00000622314
  CDS Start-End: 53-205
catatttgctctccttcacgggagggcagggaggttcaacggaccttaaaacatgaaggtcttttttctgtttgctgttctcttttgtttggtccaaacaaactcagtgcacatctctcaccgggaggctcgaggaccctcatttaggatctgtgtggactttttagggcctagatgggccaggggatgttccaccgggaattagaaataccatctgccatatgcagcaagggatctgcagactttttttctgccattctggtgagaaaaagcgtgacatttgctctgatccctggaataggtgttgcgtatcaaatacagatgaagaaggaaaagagaaaccagagatggatggcagatctgggatctaaaatataagctcccggaaggcagggatgttgaagtatcccaagggcttaaaggaatgtgtggcttatagtaggtgttcaataaatatttgttgaatgaatttagcaccaaa

SEQ ID NO: 185496 - DNA, 612 bp, Homo sapiens
  Payload ID: 16528
  Gene Symbol: SPAG11B
  Gene Name: sperm associated antigen 11B
  ENST ID: ENST00000615672
  CDS Start-End: 24-350
ggcttgcagtgctcttggcagacatgaggcaacgattgctcccgtccgtcaccagccttctccttgtggccctgctgtttccaggatcgtctcaagccagacatgtgaaccactcagccactgaggctctcggagaactcagggaaagagcccctgggcaaggcacaaacgggtttcagctgctacgccacgcagtgaaacgggacctcttacaaccgcgcaccccaccttaccaaggggatgttccaccgggaattagaaataccatctgccatatgcagcaagggatctgcagactttttttctgccattctgggacaggccagcagcacagacaacgctgtggataaggagagtagagacttcctcttcctgcctcctgtcttctggagttgtgaccgcagggtggcccaggtggatcggcttcagaggccaggaggcagctctctgcagccgaagagcaggagcctcacccagggtctgtggctctgactaagcctggactgcctctcggctgtgctccgtggactggctcctcagggatccatgtgagagaccggagtatgatcctcagtgcgaggacaaataaaagtagtgattatgtccacccca

SEQ ID NO: 185497 - DNA, 444 bp, Homo sapiens
  Payload ID: 16528
  Gene Symbol: SPAG11B
  Gene Name: sperm associated antigen 11B
  Uniprot ID: Q08648
  ENST ID: ENST00000619134
  CDS Start-End: 53-295
catatttgctctccttcacgggagggcagggaggttcaacggaccttaaaacatgaaggtcttttttctgtttgctgttctcttttgtttggtccaaacaaactcaggggatgttccaccgggaattagaaataccatctgccatatgcagcaagggatctgcagactttttttctgccattctggtgagaaaaagcgtgacatttgctctgatccctggaataggtgttgcgtatcaaatacagatgaagaaggaaaagagaaaccagagatggatggcagatctgggatctaaaatataagctcccggaaggcagggatgttgaagtatcccaagggcttaaaggaatgtgtggcttatagtaggtgttcaataaatatttgttgaatgaatttagcaccaaaggtgaagagctgataaaagacatttttttaacttcctta

SEQ ID NO: 185498 - DNA, 534 bp, Homo sapiens
  Payload ID: 16528
  Gene Symbol: SPAG11B
  Gene Name: sperm associated antigen 11B
  ENST ID: ENST00000620054
  CDS Start-End: 24-272
ggcttgcagtgctcttggcagacatgaggcaacgattgctcccgtccgtcaccagccttctccttgtggccctgctgtttccaggatcgtctcaagccagacatgtgaaccactcagccactgaggctctcggagaactcagggaaagagcccctgggcaaggcacaaacgggtttcagctgctacgccacgcagtgaaacgggacctcttacaaccgcgcaccccaccttaccaagggacaggccagcagcacagacaacgctgtggataaggagagtagagacttcctcttcctgcctcctgtcttctggagttgtgaccgcagggtggcccaggtggatcggcttcagaggccaggaggcagctctctgcagccgaagagcaggagcctcacccagggtctgtggctctgactaagcctggactgcctctcggctgtgctccgtggactggctcctcagggatccatgtgagagaccggagtatgatcctcagtgcgaggacaaataaaagtagtgattatgtccacccca

SEQ ID NO: 185499 - DNA, 552 bp, Homo sapiens
  Payload ID: 16528
  Gene Symbol: SPAG11B
  Gene Name: sperm associated antigen 11B
  ENST ID: ENST00000628628
  CDS Start-End: 1-162
tcgtctcaagccagacatgtgaaccactcagccactgaggctctcggagaactcagggaaagagcccctgggcaaggcacaaacgggtttcagctgctacgccacgcagtgaaacgggacctcttacaaccgcgcaccccaccttaccaagaaatgaaatgaaggaggtgggctcgatctcagactccatcagagcacagcagcctgggggtgtggaagcagagcctcacccaaggaccaaggggtctccaccagggacaggccagcagcacagacaacgctgtggataaggagagtagagacttcctcttcctgcctcctgtcttctggagttgtgaccgcagggtggcccaggtggatcggcttcagaggccaggaggcagctctctgcagccgaagagcaggagcctcacccagggtctgtggctctgactaagcctggactgcctctcggctgtgctccgtggactggctcctcagggatccatgtgagagaccggagtatgatcctcagtgcgaggacaaataaaagtagtgattatgtccacccca

SEQ ID NO: 185500 - DNA, 398 bp, Homo sapiens
  Payload ID: 16528
  Gene Symbol: SPAG11B
  Gene Name: sperm associated antigen 11B
  ENST ID: ENST00000629756
  CDS Start-End: 1-311
gatcgtctcaagccagacatgtgaaccactcagccactgaggctctcggagaactcagggaaagagcccctgggcaaggcacaaacgggtttcagctgctacgccacgcagtgaaacgggacctcttacaaccgcgcaccccaccttaccaagggactcactctgttgctcaggctggagtgcagtggcactgttaccgcttattgcagcctctacctcctgggctcaagtgctcctcccaccttagcctcccaaatacctgggaccaccggcatgcaccattgcacactgctagtttttttaggtgttgagccaccacttccagccccaagcttgcagctctgactacactttctccgggaagctgacactcaggcccgaatgtggctggctgccgc

SEQ ID NO: 185501 - DNA, 1059 bp, Homo sapiens
  Payload ID: 16529
  Gene Symbol: SPAG16
  Gene Name: sperm associated antigen 16
  ENST ID: ENST00000272898
  CDS Start-End: 106-1059
gccggaatctcgcgagagctcccgggggccgttgggtagcgtcttcgctgttgcccttagggacggctgtgggcctgctgggggtgggggcccgaagcgccagagatggctgctcagcgagggatgcccagctccgccgtgagggtcctggaagaggcgttgggcatgggtttgacggcagccggggacgcgagggacacggcggacgcggtggcggctgagggcgcctactacctggaacaggtcaccataactgaagcatctgaagatgactatgaatatgaagagataccagatgacaattttagcatcccagaaggtgaagaagatctggcaaaagcaattcagatggcccaagaacaggctacagatactgaaattttggaacggaaaacagttcttccttcaaagcatgcagtacctgaagtaatagaagactttctctgcaatttcttgatcaaaatgggaatgaccagaactcttgattgctttcagtctgaatggtatgagttaatacagaaaggagtgactgaacttagaactgttgggaatgttccagatgtctacacccagattatgcttttggaaaatgagaacaaaaatttaaagaaagatttgaagcactacaaacaagcagctgacaaagctagagaagatttgctgaaaattcagaaagaacgtgattttcatcgaatgcatcataagcgaatagtccaggaaaaaaacaaattaattaatgacctcaaagggttgaagttacattatgcatcttatgaaccgactataagggtgttacatgagaaacaccacactttactgaaggagaaaatgctgacctccttggaaagagacaaagtagttgggcagatttctggacttcaagaaacattgaagaaactgcaaagaggacatagttaccatggtcctcaaattaaagttgatcatagtcgtgaaaaagaaaatgcaccagaaggtcctactcagaaaggtcttcgtgaagccagggaacaaaacaaatgtaaaacaaagatgaaaggcaatacaaaggaaaaggaattt

SEQ ID NO: 185502 - DNA, 2177 bp, Homo sapiens
  Payload ID: 16529
  Gene Symbol: SPAG16
  Gene Name: sperm associated antigen 16
  Uniprot ID: Q8N0X2
  ENST ID: ENST00000331683
  CDS Start-End: 96-1991
cgcgagagctcccgggggccgttgggtagcgtcttcgctgttgcccttagggacggctgtgggcctgctgggggtgggggcccgaagcgccagagatggctgctcagcgagggatgcccagctccgccgtgagggtcctggaagaggcgttgggcatgggtttgacggcagccggggacgcgagggacacggcggacgcggtggcggctgagggcgcctactacctggaacaggtcaccataactgaagcatctgaagatgactatgaatatgaagagataccagatgacaattttagcatcccagaaggtgaagaagatctggcaaaagcaattcagatggcccaagaacaggctacagatactgaaattttggaacggaaaacagttcttccttcaaagcatgcagtacctgaagtaatagaagactttctctgcaatttcttgatcaaaatgggaatgaccagaactcttgattgctttcagtctgaatggtatgagttaatacagaaaggagtgactgaacttagaactgttgggaatgttccagatgtctacacccagattatgcttttggaaaatgagaacaaaaatttaaagaaagatttgaagcactacaaacaagcagctgacaaagctagagaagatttgctgaaaattcagaaagaacgtgattttcatcgaatgcatcataagcgaatagtccaggaaaaaaacaaattaattaatgacctcaaagggttgaagttacattatgcatcttatgaaccgactataagggtgttacatgagaaacaccacactttactgaaggagaaaatgctgacctccttggaaagagacaaagtagttgggcagatttctggacttcaagaaacattgaagaaactgcaaagaggacatagttaccatggtcctcaaattaaagttgatcatagtcgtgaaaaagaaaatgcaccagaaggtcctactcagaaaggtcttcgtgaagccagggaacaaaacaaatgtaaaacaaagatgaaaggcaatacaaaggattcagaatttcccatagatatgcaaccaaatccaaacctgaatgtttctaaagaaagtctttctccagcaaaatttgactacaagctgaaaaacatttttagactccatgaacttccagtgagctgtgtctccatgcaaccccacaaagacatcctagtctcctgtggcgaggaccgactctggaaggtgttgggccttccaaaatgcaatgtgcttctcacgggatttggccacactgactggctttcagactgctgcttccatcccagtggcgacaaattggctacttcaagtggtgacactacagttaaattatgggatctatgtaaaggcgattgcattttgacctttgaaggacacagccgcgcagtgtggtcctgcacatggcactcctgcggcaattttgtggcttcctcctcactggataaaactagcaaaatttgggatgttaatagtgaaagatgcagatgtactttgtatggacatacagattctgtgaacagcattgagttttttcctttctccaatactcttctcacaagctctgcagacaagaccctgtctatatgggatgcaagaacaggtatatgtgagcagtcactttatggtcacatgcattctatcaatgatgccatttttgatcccaggggtcacatgatagcatcctgtgatgcctgtggggttacaaagctgtgggactttcggaagctgttaccaattgtgtccatcgatataggtccaagtcctggcaatgaggtgaattttgattcatcaggtcgagttttagctcaggcaagtggcaatggtgttatccatttgctagatcttaaatctggggagattcacaaattgatgggccacgaaaacgaggcacacacggttgtgttttctcacgacggggagattctcttttctggaggctctgacggcacagttcgaacgtggtcttgaccgtcagcacatcccgctgcagagggcattccctttaaggcttgaaaatgcctcctgtagtcccaaaccagcaaagaactggttaaatgtgccagcaggtaacatttacagtctgctttaaaacatgctttggacatatattttagtgctcatactgttactaataaaaaaataactttatgctca

SEQ ID NO: 185503 - DNA, 2352 bp, Homo sapiens
  Payload ID: 16529
  Gene Symbol: SPAG16
  Gene Name: sperm associated antigen 16
  ENST ID: ENST00000406979
  CDS Start-End: 96-269
cgcgagagctcccgggggccgttgggtagcgtcttcgctgttgcccttagggacggctgtgggcctgctgggggtgggggcccgaagcgccagagatggctgctcagcgagggatgcccagctccgccgtgagggtcctggaagaggcgttgggcatgggtttgacggcagccggggacgcgagggacacggcggacgcggtggcggctgagggcgcctactacctggaaccttatctatatccagtgcccttgctactgaatgattaaaacttgacaagatattcagaggtcaccataactgaagcatctgaagatgactatgaatatgaagagataaaagcagttgcccacaaactaatcctgaatttattagaagtgacgtttattgacatttacaaggaagtcagaagaaagcagttattcatttttcatggatcttcagaatgacatgataccagatgacaattttagcatcccagaaggtgaagaagatctggcaaaagcaattcagatggcccaagaacaggctacagatactgaaattttggaacggaaaacagttcttccttcaaagcatgcagtacctgaagtaatagaagactttctctgcaatttcttgatcaaaatgggaatgaccagaactcttgattgctttcagtctgaatggtatgagttaatacagaaaggagtgactgaacttagaactgttgggaatgttccagatgtctacacccagattatgcttttggaaaatgagaacaaaaatttaaagaaagatttgaagcactacaaacaagcagctgacaaagctagagaagatttgctgaaaattcagaaagaacgtgattttcatcgaatgcatcataagcgaatagtccaggaaaaaaacaaattaattaatgacctcaaagggttgaagttacattatgcatcttatgaaccgactataagggtgttacatgagaaacaccacactttactgaaggagaaaatgctgacctccttggaaagagacaaagtagttgggcagatttctggacttcaagaaacattgaagaaactgcaaagaggacatagttaccatggtcctcaaattaaagttgatcatagtcgtgaaaaagaaaatgcaccagaaggtcctactcagaaaggtcttcgtgaagccagggaacaaaacaaatgtaaaacaaagatgaaaggcaatacaaaggattcagaatttcccatagatatgcaaccaaatccaaacctgaatgtttctaaagaaagtctttctccagcaaaatttgactacaagctgaaaaacatttttagactccatgaacttccagtgagctgtgtctccatgcaaccccacaaagacatcctagtctcctgtggcgaggaccgactctggaaggtgttgggccttccaaaatgcaatgtgcttctcacgggatttggccacactgactggctttcagactgctgcttccatcccagtggcgacaaattggctacttcaagtggtgacactacagttaaattatgggatctatgtaaaggcgattgcattttgacctttgaaggacacagccgcgcagtgtggtcctgcacatggcactcctgcggcaattttgtggcttcctcctcactggataaaactagcaaaatttgggatgttaatagtgaaagatgcagatgtactttgtatggacatacagattctgtgaacagcattgagttttttcctttctccaatactcttctcacaagctctgcagacaagaccctgtctatatgggatgcaagaacaggtatatgtgagcagtcactttatggtcacatgcattctatcaatgatgccatttttgatcccaggggtcacatgatagcatcctgtgatgcctgtggggttacaaagctgtgggactttcggaagctgttaccaattgtgtccatcgatataggtccaagtcctggcaatgaggtgaattttgattcatcaggtcgagttttagctcaggcaagtggcaatggtgttatccatttgctagatcttaaatctggggagattcacaaattgatgggccacgaaaacgaggcacacacggttgtgttttctcacgacggggagattctcttttctggaggctctgacggcacagttcgaacgtggtcttgaccgtcagcacatcccgctgcagagggcattccctttaaggcttgaaaatgcctcctgtagtcccaaaccagcaaagaactggttaaatgtgccagcaggtaacatttacagtctgctttaaaacatgctttggacatatattttagtgctcatactgttactaataaaaaaataactttatgctca

SEQ ID NO: 185504 - DNA, 2258 bp, Homo sapiens
  Payload ID: 16529
  Gene Symbol: SPAG16
  Gene Name: sperm associated antigen 16
  ENST ID: ENST00000413312
  CDS Start-End: 247-1002
agcgtcttcgctgttgcccttagggacggctgtgggcctgctgggggtgggggcccgaagcgccagagatggctgctcagcgagggatgcccagctccgccgtgagggtcctggaagaggcgttgggcatgggtttgacggcagccggggacgcgagggacacggcggacgcggtggcggctgagggcgcctactacctggaacgtatccttcccgtggaggcgcggcccgctgcgctggcgggtaatgggtgttgggacgaaggcgagggcctcccactggcggcgccttttgagccttggggccactccggaggagcctctgttggacttcaagataccagatgacaattttagcatcccagaaggtgaagaagatctggcaaaagcaattcagatggcccaagaacaggctacagatactgaaattttggaacggaaaacagttcttccttcaaagcatgcagtacctgaagtaatagaagactttctctgcaatttcttgatcaaaatgggaatgaccagaactcttgattgctttcagtctgaatggtatgagttaatacagaaaggagtgactgaacttagaactgttgggaatgttccagatgtctacacccagattatgcttttggaaaatgagaacaaaaatttaaagaaagatttgaagcactacaaacaagcagctgacaaagctagagaagatttgctgaaaattcagaaagaacgtgattttcatcgaatgcatcataagcgaatagtccaggaaaaaaacaaattaattaatgacctcaaagggttgaagttacattatgcatcttatgaaccgactataagggtgttacatgagaaacaccacactttactgaaggagaaaatgctgacctccttggaaagagacaaagtagttgggcagatttctggacttcaagaaacattgaagaaactgcaaagaggacatagttaccatggtcctcaaattaaaggtaaatgtaaaatgtgatgaagctctcatttaatatagtttggtgatttctcaaccttatcagtgattaatattctagagatatttaaaggtgagtaagtggtggctatttcacaaattaaaattttaataaaaagattaagaagaaatatagatatcatactgtatggattaattatagagaaaaacaagtcaactataatggaaggacttctgcttctggtcattatacctggtaccagactagccttctctgtgtaaataactctaaagctaagctgtaagatcagacaactacttttaggcagtagaaaacagacagctcaagtaacagaaggcaattgacagaaggaaaatttataaggtgagctctgccatcaccatggctttgggtctgtggaaagttccaaactgagctttgtggagatggaagccaataagagcatgacaatcctgataattggaaatgtcagagaccctagttcacagcttttgaagccactggaatctgtagggaaagacaccagagaagagagctgcaatgaggagtggctcagtttgtgagggagtttactatgagtccttagctgaggctgcaatactatacataacaacactacctgacacttacaagagagatacaattatataggatcaagaggaggccagagattgtagaagttaagtagtgatgcgaaacattgcaaatctggccatgcctgggtggaaagacctctttcacaccttgttaacaacacagtaacattcagcatcccatatccgccttataaaaccaggaacaaagcttacacagcattcttagagaggacacagaatttggagtttgagtcttgccaagttatagggccttgagaaacatttagggctttccatggatccaccctaacgaagcataaaattaagcctaggattttagggtcatcagccaaaaatggaactgccttctagaacaaaaaatgacatccttttgaggaagacagtcatccagagtctttacaatcttttacccacattgcctagtacataattaaacatttctagatatgaataggaacaggaaaatgtgacccataatcaagacaacaagcaataaatggaaacctacccttaagtagctaaactgttgcatttagcagatagaaagtgctaaagtagatactttgattatgttcaaggacttaatggaaaatactaataagtgaacagatggggaatttaagcaaagaaatgagaacaagcatacattccaaagc

SEQ ID NO: 185505 - DNA, 4751 bp, Homo sapiens
  Payload ID: 16529
  Gene Symbol: SPAG16
  Gene Name: sperm associated antigen 16
  ENST ID: ENST00000452556
  CDS Start-End: 30-224
gctgggggtgggggcccgaagcgccagagatggctgctcagcgagggatgcccagctccgccgtgagggtcctggaagaggcgttgggcatgggtttgacggcagccggggacgcgagggacacggcggacgcggtggcggctgagggcgcctactacctggaacaggtcaccataactgaagcatctgaagatgactatgaatatgaagaggtaacatgttaattttagataccagatgacaattttagcatcccagaaggtgaagaagatctggcaaaagcaattcagatggcccaagaacaggctacagatactgaaattttgcaaagctagagaagatttgctgaaaattcagaaagaacgtgattttcatcgaatgcatcataagcgaatagtccaggaaaaaaacaaattaattaatgacctcaaagggttgaagttacattatgcatcttatgaaccgactataagggtgttacatgagaaacaccacactttactgaaggagaaaatgctgacctccttggaaagagacaaagtagttgggcagatttctggacttcaagaaacattgaagaaactgcaaagaggacatagttaccatggtcctcaaattaaagttgatcatagtcgtgaaaaagaaaatgcaccagaaggtcctactcagaaaggtcttcgtgaagccagggaacaaaacaaatgtaaaacaaagatgaaaggcaatacaaaggattcagaatttcccatagatatgcaaccaaatccaaacctgaatgtttctaaagaaagtctttctccagcaaaatttgactacaagctgaaaaacatttttagactccatgaacttccagtgagctgtgtctccatgcaaccccacaaagacatcctagtctcctgtggcgaggaccgactctggaaggtgttgggccttccaaaatgcaatgtgcttctcacgggatttggccacactgactggctttcagactgctgcttccatcccagtggcgacaaattggctacttcaagtggtgacactacagttaaattatgggatctatgtaaaggcgattgcattttgacctttgaaggacacagccgcgcagtgtggtcctgcacatggcactcctgcggcaattttgtggcttcctcctcactggataaaactagcaaaatttgggatgttaatagtgaaagatgcagatgtactttgtatggacatacagattctgtgaacagcattgagttttttcctttctccaatactcttctcacaagctctgcagacaagaccctgtctatatgggatgcaagaacaggtatatgtgagcagtcactttatggtcacatgcattctatcaatgatgccatttttgatcccaggggtcacatgatagcatcctgtgatgcctgtggggttacaaagctgtgggactttcggaagctgttaccaattgtgtccatcgatataggtccaagtcctggcaatgaggtgaattttgattcatcagaaaataccacgtatctttatagactaggagctcagatatattatttccagctttcttgatgttacctcaaattgaagttgccaatggtaggactgcacaatctgaatacatatgatgagatattttatgcctcgttttccatctgcttgagttagcaccctttcaccattggccatttcatactacccaatttccatgtaatttgtctctctaatcttgtcagccccttgaaatgaaggtgcactttattcagggattattttcatgctcaagatcattttgtgaattattttatatcattataaataatcctactgttaccttttcaatacaagaatttgatttcccagcattaatgggttcattcaatagtagtgccaagttcatacagcaacactgtaattgcattttaatcagaaactagtaatatatgctgaagatactttgttaaattaacattattgctgtgattaacaaagcacactgttaagtgaatattgcatgaattaaattacatactagatcacttacatagtttaggatttcatgtgctatctagctacctcttcccacaaaatctacatccttatctgttttactcataaaaatgtaattcttgaagctcataagcatagctacttaaatgattcctttgcttaatagaaacatctttgttcactacaacaagcttatctgcactacattttttaggaataaaggatatgtgatatgtattatttgaaaactggcattcaattgccacacttggctgttcaccataaaactcctatttgaaatctaactttgaggacttctttgaggatactagagttatagttctgaaatagttacttgcagaaatgctatctattaatttaaattttggtttaaaaaactcataatatttttttttgagacaaggattcactctgttgcccaggctggagtgcaatagcacagtcagagcatattgcagccccaaacttgtggcctcaagtaattctcctcctttagcctccagaatagctaagactacaggcaagcaccaccatgcctggctaaatttttttttgaatgttgtagaaatggagtgccactatgttgcccaggctggtcacaaattcctgtcctcaagcaatcctcccaaagtgctaggattactggcatgagccactgcacccagccttaatcatttttagtgcacagtttagtggtattaattatagtcatgttgttgtaccacagatctctagaactttttcattttgcaaaactgacactctgtacccattaaacaataaatcctcattttcaaaatgagatagcttctctagatttagtaaagctctcttctttttcattattttgcttttctgtgaaaggggacttcaaatttattttgaggaaacaaatgtaaacactcatcttaaagtatgtatattaagactattttaataatcagagcaaactttcatttatttagctattttcagtttgcagcctaccatgccaaacattactttattgctgttccctgcagtccttttgacaaggatggagcactgtcagagctgcactggagctggagacagggatagaggacactcaggatgacagcccccacccagaatcctggagaggaaagttgctattgttgaaaacataatggatctggttgttattaaagtacctgaagtcagctgcataaattgggaagcatatgcacgcttctgctttactgtggcaatttaaaacaatataaatttcataaaattctcattgaaaaaaaatgaccaagaaaagccctaaaaatagtaggaaatgttacccatcattacatcctccaccatcaaggccaagtagtcaatacccacgccagataagcactgtgtgcctatgtgaggtggtcattaaagaatgatgaggaaaggaccacagaaatcaactggtgtcttcccaaagtcctggggacgctgaggaacacacatgggtctcataatgtccatgtccttcccttatacctcaatgctctttccaccttgccctggtggaaagtcttgtccatatcacctctaatccagcattctcaaagcagcacaaaactgtcttcagaagactgaatgtttctacattccttcatattaattccaggaaaagaattcccaagtcaaataattcaaatgctaagtgtattttttaaaattgtttttaggcactttctcttaggaatgtaaactctttgagggcagggtctatgtcctttcatcattgtgttcatcaggctttatcattgtctagcatatggtggatggataaacaaccatctccgtaaagatatctgatttctattccaactacacaagctccttttctagtatacacagccaccaaaataatgcttaaaacatatgtctcagaatgacaatcaagatagaagtcttaaagcaagaaagatgttttccttgtttgttcttctataaattctctaaagattcataaaatttagctatacaatctacttcagataatggcttctagatgctatgtagaaattggcccattatgcaagataaaaatcatctaagattataatgcaaatcagtcatcataaaaaatataaagatctagaatttatagaaattctactgagcatttattttatgtgaaagaaaaatacatccacagtacatacataattaaatgtaaatgtatgctgaaaaagttcataatcatgaaaaatacatatcttgatggactacttttatttggcaacctttaccttccaatatctgtcataatattagagtagattagaaattatatctacagtctcaactcattttatgaaatatgagtaacggtaggtatagataatttattttccctcagctgtacataaagatggataattacatctttctaaaaaaatgaagctgaccaggcgcggtggctcacgcctgtaatcctagcactttgggaggccgaggtgggtggattgcttgagctcaggagttcaaaaccagcatgggcaacacagtgaaactctgtctctactaaaaatacaaaaaaaaattagccgggtgtggcgatgtgcgactgtagttcccagttattcgaaaagctgaggcaggagaattgcttgaacctgagaggcggagcttgcagtgagcggagatcacgccactgcactccagcctgggcgacagagcaagactccgttgccaaaaaaaaaaaaaaaaaa

SEQ ID NO: 185506 - DNA, 1330 bp, Homo sapiens
  Payload ID: 16529
  Gene Symbol: SPAG16
  Gene Name: sperm associated antigen 16
  ENST ID: ENST00000447990
  CDS Start-End: 4-1128
gagatggctgctcagcgagggatgcccagctccgccgtgagggtcctggaagaggcgttgggcatgggtttgacggcagccggggacgcgagggacacggcggacgcggtggcggctgagggcgcctactacctggaacaggtcaccataactgaagcatctgaagatgactatgaatatgaagagataccagatgacaattttagcatcccagaaggtgaagaagatctggcaaaagcaattcagatggcccaagaacaggctacagatactgaaattttggaacggaaaacagttcttccttcaaagcatgcagtacctgaagtaatagaagactttctctgcaatttcttgatcaaaatgggaatgaccagaactcttgattgctttcagtctgaatggtatgagttaatacagaaaggagtgactgaacttagaactgttgggaatgttccagatgtctacacccagattatgcttttggaaaatgagaacaaaaatttaaagaaagatttgaagcactacaaacaagcagctgacaaagctagagaagatttgctgaaaattcagaaagaacgtgattttcatcgaatgcatcataagcgaatagtccaggaaaaaaacaaattaattaatgacctcaaagggttgaagttacattatgcatcttatgaaccgactataagggtgttacatgagaaacaccacactttactgaaggagaaaatgctgacctccttggaaagagacaaagtagttgggcagatttctggacttcaagaaacattgaagaaactgcaaagaggacatagttaccatggtcctcaaattaaagttgatcatagtcgtgaaaaagaaaatgcaccagaaggtcctactcagaaaggtcttcgtgaagccagggaacaaaacaaatgtaaaacaaagatgaaaggcaatacaaaggtgatgagaaggagagaagagctgtggcccttcagggagcccagacctagaagctccacgagccagtgctgtgacaccctctttggggctgtgcagtttcagatgtttccaagcatccagacgccactgaattctcatccagatttgggtgcccacagcagaagttgcttggagtgcatctgatccagctccaggcttacacagatccagtgcctgtgccagtgcctggagctgcctgccccactgcagcagctggcatgcctggctgtgcacagtggctggacctggttctcacttgctcacacacccctcacctctctgctcctggcttgcctttggctggtgtggaatctgggctgtagcaagagctgagcacagcctacca

SEQ ID NO: 185507 - DNA, 805 bp, Homo sapiens
  Payload ID: 16529
  Gene Symbol: SPAG16
  Gene Name: sperm associated antigen 16
  ENST ID: ENST00000440779
  CDS Start-End: 48-332
agggacggctgtgggcctgctgggggtgggggcccgaagcgccagagatggctgctcagcgagggatgcccagctccgccgtgagggtcctggaagaggcgttgggcatgggtttgacggcagccggggacgcgagggacacggcggacgcggtggcggctgagggcgcctactacctggaacaggtcaccataactgaagcatctgaagatgactatgaatatgaagagataccagatgacaattttagcatcccagaaggtgaagaagatctggcaaaagcaattcagatggcccaagaacaggctacagatactgaaattttggtatgagttaatacagaaaggagtgactgaacttagaactgttgggaatgttccagatgtctacacccagattatgcttttggaaaatgagaacaaaaatttaaagaaagatttgaagcactacaaacaagcagctgacaaagctagagaagatttgctgaaaattcagaaagaacgtgattttcatcgaatgcatcataagcgaatagtccaggaaaaaaacaaattaattaatgacctcaaagggttgaagttacattatgcatcttatgaaccgactataagggtgttacatgagaaacaccacactttactgaaggagaaaatgctgacctccttggaaagagacaaagtagttgggcagatttctggacttcaagaaacattgaagaaactgcaaagaggacatagttaccatggtcctcaaattaaagttgatcatagtcgtgaaaaagaaaatgcaccagaaggtcctactc

SEQ ID NO: 185508 - DNA, 514 bp, Homo sapiens
  Payload ID: 16529
  Gene Symbol: SPAG16
  Gene Name: sperm associated antigen 16
  ENST ID: ENST00000420497
  CDS Start-End: 48-344
agggacggctgtgggcctgctgggggtgggggcccgaagcgccagagatggctgctcagcgagggatgcccagctccgccgtgagggtcctggaagaggcgttgggcatgggtttgacggcagccggggacgcgagggacacggcggacgcggtggcggctgagggcgcctactacctggaacaggtcaccataactgaagcatctgaagatgactatgaatatgaagagataaaagcagttgcccacaaactaatcctgaatttattagaagtgacgtttattgacatttacaaggaagtcagaagaaagcagttattcatttttcatggatcttcagaatgacatgataccagatgacaattttagcatcccagaaggtgaagaagatctggcaaaagcaattcagatggcccaagaacaggctacagatactgaaattttgcacctttcatggtacctggtacatgggagatgttcaccaattatatgttgaataaatatcctacgtaaag

SEQ ID NO: 185509 - DNA, 1250 bp, Homo sapiens
  Payload ID: 16529
  Gene Symbol: SPAG16
  Gene Name: sperm associated antigen 16
  Uniprot ID: Q8N0X2
  ENST ID: ENST00000432529
  CDS Start-End: 93-644
gagagctcccgggggccgttgggtagcgtcttcgctgttgcccttagggacggctgtgggcctgctgggggtgggggcccgaagcgccagagatggctgctcagcgagggatgcccagctccgccgtgagggtcctggaagaggcgttgggcatgggtttgacggcagccggggacgcgagggacacggcggacgcggtggcggctgagggcgcctactacctggaacaggtcaccataactgaagcatctgaagatgactatgaatatgaagagataccagatgacaattttagcatcccagaaggtgaagaagatctggcaaaagcaattcagatggcccaagaacaggctacagatactgaaattttggaacggaaaacagttcttccttcaaagcatgcagtacctgaagtaatagaagactttctctgcaatttcttgatcaaaatgggaatgaccagaactcttgattgctttcagtctgaatggtatgagttaatacagaaaggagtgactgaacttagaactgttgggaatgttccagatgtctacacccagattatgcttttggaaaatgagaacaaaaatttaaagaaagatttgaagcactacaaacaagcagctgagtatgttattttttaaatgacattttcttctttttcttttggactaaataaaagagttgagtgaagctgatatatgtaatataccagagccttaatttttgaaaactgaatttttctagttgtaaagaatgtgagaggcttcattagcaaattaattaaacagatgatcagaactatcacaattataacttaccaacaagaagggaatgcaggtagttgtttaggagatggtacattttttatataacattcacttccttgtgtatttgatagtcttttcatggtttataacattttctcctgtaaagataggctaatttctgaaataataattaaatttatagaaagccgagaggaaattgctagtttattcctggtagaggaatttctgtatttgaaaattctccagaaggaataatataaactgtggactttgggtgataatgatatgtaggttcgtcagttgttaacaaatgtatccctctgttgggggctattgataatggggaaggctgtgcatgtgtgggagtaggaggtgtatgggacatctctgtaccttctaatcaattttgctatgaacttaaaactgctctaaaaataaagtttattaaaaaaaagttaa

SEQ ID NO: 185510 - DNA, 771 bp, Homo sapiens
  Payload ID: 16529
  Gene Symbol: SPAG16
  Gene Name: sperm associated antigen 16
  ENST ID: ENST00000451561
  CDS Start-End: 1-768
gattcagaatttcccatagatatgcaaccaaatccaaacctgaatgtttctaaagaaagtctttctccagcaaaatttgactacaagctgaaaaacatttttagactccatgaacttccagtgagctgtgtctccatgcaaccccacaaagacatcctagtctcctgtggcgaggaccgactctggaaggtgttgggccttccaaaatgcaatgtgcttctcacgggatttggccacactgactggctttcagactgctgcttccatcccagtgaaagatgcagatgtactttgtatggacatacagattctgtgaacagcattgagttttttcctttctccaatactcttctcacaagctctgcagacaagaccctgtctatatgggatgcaagaacaggtatatgtgagcagtcactttatggtcacatgcattctatcaatgatgccatttttgatcccaggggtcacatgatagcatcctgtgatgcctgtggggttacaaagctgtgggactttcggaagctgttaccaattgtgtccatcgatataggtccaagtcctggcaatgaggtgaattttgattcatcaggtcgagttttagctcaggcaagtggcaatggtgttatccatttgctagatcttaaatctggggagattcacaaattgatgggccacgaaaacgaggcacacacggttgtgttttctcacgacggggagattctcttttctggaggctctgacggcacagttcgaacgtggtcttgaccg

SEQ ID NO: 185511 - DNA, 6924 bp, Homo sapiens
  Payload ID: 16530
  Gene Symbol: SPAG17
  Gene Name: sperm associated antigen 17
  Uniprot ID: Q6Q759
  ENST ID: ENST00000336338
  CDS Start-End: 67-6738
ggtagcggggacgcttaggcagggcctgcgcccagtttagaggccaatgcttctcccgtcctttgcatggcacccaagaaggagaaaggaggaactgtgaacaccagttctaagatatgggaaccctcgctcatagctgcacagttcaatcagaacgattggcaggcctccattgcttttgtggttgggaaccagattgaagatgatcttctcatccaagcccttaccgtggctgtccaggtccctcagcgtaaactcttcagtatggtgtcgtggcaagacattctccagcagattaatgaaataaatacacttgttggatctgcttcatctaaaaaggcaaaaaaacctgtaggtggtaatgctcctttatattatgaggtgttaacggcagcaaaagcaattatggatagtggagagaaattaaccttaccactgatagggaaactcttgaaatttcaacttctccagattaaatttaaggaccaacagcgacgggaaaatgaaaagaaggtaatagaagacaaacctaagttagaaaaggataaagggaaagcaaaatctcccaaggagaaaaaggctccaagtgccaagcctgccaaaggaaagggaaaggatcagcctgaggcaaatgcaccagtgaaaaagaccacccagttaaagcggagaggagaagacgaccacaccaatcgttacattgacgatgagccagatgatggtgcccaacattacattatagttgtgggctttaacaatcctcagctattagcaattatggctgagcttggcattcctataaccagcgtgattaaaatatcttcagagaattatgaacctctgcagacacacctggcagcagttaaccagcagcaggaagttcttcttcagtcagaagatctagaagcagaaaaattgaagaaagaaaatgccataaaagagcttaaaactttctggaagtacttggaaccagtcctgaataatgagaaacctgaaacaaatctctttgatgttgctcgacttgagtacatggtcaaagcagctgattttccttctgactggtcagatggtgagatgatgctgaaattgggcactgatatttttgaaaatattgcctgcttgatgtatgacatcctggattggaaaaggcagcaccagcactatttggaaagcatgcagcttattaatgttccacaagtggttaatgagaaacctgtattagaagccatgccaacttcagaggctccacaacctgctgtaccagctcctggaaagaagaaagcacagtatgaagaaccgcaagctccaccaccagtgacttcagtcatcacaactgaagtagacatgagatattacaattatttgctgaatccaattcgagaggaattcatttctgtgcccctgatactgcattgtatgctggaacaggttgttgcaactgaagaagatctcgtcccacccagtctgcgggagccatcccccagagcagacgggctagaccacagaatcgcagctcacattgtgtcccttctgccctcactctgtctctcagagagggagaaaaagaatcttcatgacatatttttatctgaagaagaaaatgaaagcaaagcagtgcccaaaggccccctcctactgaactatcatgatgcacacgcccacaagaagtacgcactacaggaccaaaagaattttgatccagttcaaattgagcaggagatgcagtccaagttgccactgtgggaatttcttcaattccctctacccccaccatggaacaacactaaacgtctagctacaattcatgagcttatgcacttttgtacgagtgatgtcttgagctggaatgaagtagaacgagccttcaaggtgtttacttttgagagcctgaagctctctgaggttgatgaaaaagggaaactgaaaccttctgggatgatgtgtgggtcagattctgaaatgttcaacataccgtgggacaaccctgccagatttgctaaacagataaggcagcaatatgtcatgaaaatgaatactcaagaggccaagcagaaagcagatattaaaatcaaagacagaacactatttgtggatcagaatttgtcaatgtctgtgcaagataatgaaagcaaccgagaaccttcagatcctagtcagtgtgatgctaacaatatgaagcattctgacttgaataatctcaaactctcagtccctgataatagacagctgttagagcaggagagcatcatgaaggctcagccccaacatgagtctctggagcagaccacaaacaatgagatcaaagatgatgcagtcacaaaggctgattctcatgaaaagaaacccaagaagatgatggtggaagcagatttagaggacataaagaaaacacagcagcgcagtctaatggactggagttttactgaacattttaaaccgaaagtactgcttcaggtccttcaagaagcccataagcaatataggtgtgttgattcttactaccacacccaagacaactctttacttttagtctttcacaatccaatgaatagacaacgtttgcattgtgaatattggaacattgctctccactccaatgttggattcaggaattatttggaacttgttgcaaaatctattcaagattggattacaaaagaagaagctatatatcaggaatctaaaatgaatgagaaaatcatcaggaccagagctgagctggaattgaaatcttctgctaatgccaaacttacttctgctagcaaaattttttccattaaagaatctaaaagtaacaaaggaatcagcaaaacagagatatcagatcaagaaaaagaaaaagagaaggaaaagattcctttcattttagaaggctctctcaaggcatggaaagaagagcaacatcgattagcagaagaggagcgcttaagggaagaaaagaaagcagagaagaagggtaaagaagctggtaaaaagaaaggcaaggataacgcagagaaagaggatagtaggtctttgaagaaaaaatcaccttacaaggagaaatctaaagaagaacaagtcaagatccaagaagtaacagaagagtccccccaccaaccagaacctaagataacttacccgtttcacggatacaatatgggaaatatacccactcaaatctcagggtcaaattactacctgtatccttctgatggggggcagattgaagtggaaaagacaatgtttgaaaaaggcccaacttttatcaaagtgagagtggtaaaggacaaccacaattttatgattcatttaaatgaccctaaggaaattgtgaaaaaggaagagaaaggggattattatttagaagaggaagaagaaggagatgaggaacaaagtcttgaaacggaagtatcagatgcaaagaataaagctttcagcaagtttggatctttttctgccaccttagaaaatggaatctgcctctcgataagttactatggatcaaatggaatggcaccagaagataaggatcctgatttagaaacaatattgaatatcccttcagcactcactccaacagtggttcctgttatagtgaccgttcctcaaagcaaagctaaagggaaaataaaaggcaaagaaaaacccaaagaatcccttaaagaagaagaacacccaaaagaagaagagaaaaaggaagaagaagtagaaccagaacctgttttacaagagactttggatgttcccaccttccagagcctaaatgtgtcttgccccagtgggctcctgttgactttcattggacaagaatctacaggtcaatatgttatagatgaggaacccacctgggacatcatggtccgtcagagctacccccagagggtgaagcactatgagttctataaaacggtgatgccacccgcagagcaggaggcttcaagggttatcaccagtcaaggcactgttgtcaaatatatgttggatggatccacacagattctctttgcagatggtgctgtgagcaggagtcccaattcaggtcttatttgtcctccttctgaaatgccagcaacgcctcacagtggagatttgatggactctatttctcagcagaaatcagaaacgataccatctgagattaccaacacaaagaaaggaaaaagtcacaaaagtcagtcatcaatggcccataagggtgaaatccatgaccctcctccagaggcagttcaaactgtaactcctgtggaggttcacataggcacctggtttacaaccacacctgaaggaaatcggatcggcaccaaaggattagaaagaatagcagacttgaccccattgttatcctttcaggccacagatcctgtcaatggaacggttatgacaactcgagaagacaaagttgtcatagttgaaaggaaagatggtactcggatagtggatcatgctgatggtaccagaatcacaaccttttatcaagtttatgaagatcaaattattctgccagatgatcaagaaacaaccgagggtcctcggactgtcaccaggcaggtgaagtgtatgcgggtagaaagctcacgctatgccactgttatcgccaactgtgaggacagtagctgctgtgccacctttggagatggaacaactattattgcaaagccacagggaacataccaggtgttacctccaaacacaggctctctttatattgacaaggattgttcagctgtgtactgccatgagtcaagcagtaatatatactatccttttcaaaagcgtgagcagctgcgagctggcaggtacatcatgaggcatacttcagaggttatctgtgaggttctggatcctgagggaaacacttttcaggtcatggctgatggtagcatatcaactatattacctgaaaaaaaattggaagatgatttaaatgagaaaactgagggctatgatagtctgtcctctatgcaccttgaaaagaatcatcagcaaatctatggtgaacatgtccccaggttttttgttatgtatgctgatggatcaggaatggaacttcttcgagacagtgacatagaagaatatctatctttggcatataaagaatcaaatactgttgttctccaagagccagtgcaggaacagccaggcaccctaaccatcacagtccttcgccctttccatgaagcatcaccatggcaagtaaaaaaggaagatacaattgtccctcctaatctccggtcaaggtcatgggaaacatttccctcagttgagaaaaaaactccaggacctccgtttggtactcagatttggaaaggcctttgcattgagtccaaacagctagtgagtgccccgggtgccatactcaagagccccagtgtgctacagatgcgccaattcattcagcatgaggtcataaagaatgaggtgaaactgaggctgcaggtttcccttaaggattacataaactatattctaaagaaagaagatgagctgcaggaaatgatggttaaagattccagaactgaggaggagagaggcaatgctgctgatctcctcaagctggttatgtctttccctaaaatggaggaaactacaaaaagtcatgttactgaagttgcagctcacctaactgatttattcaagcagtctttggctacgcctccaaaatgcccaccagacacatttggtaaagatttctttgaaaagacatggagacacacagcatcctcaaaacgctggaaagaaaagatagacaaaacgaggaaggaaattgagacaacacagaattacctaatggatattaagaaccgcataataccacccttttttaaatctgaattgaaccagttatatcagtctcagtataatcacctggacagtctttccaaaaaactgccttcttttacaaagaaaaatgaagatgcaaacgaaacagctgttcaagatacatctgatcttaatctagatttcaagccacataaggtttcagaacagaaatcctcaagtgtgcctagtcttccaaaaccagagatttctgcagataagaaggatttcactgctcagaaccaaactgaaaatttaacaaaatctcctgaagaagcagaatcttatgagcccgtgaaaattccaacccagtccttgctgcaggatgttgcgggacaaacaagaaaagaaaaagtgaagttgcctcattatttgctgagttccaagcctaagtctcaacctcttgcaaaggtgcaagattctgttggaggaaaagtgaacacatcctctgttgcatctgctgccattaataatgcaaagtcatccctttttgggttccatcttctcccatcatcagtcaagtttggagtgcttaaggaaggacatacctatgccacagttgtaaagctcaagaatgttggagtggacttctgcaggtttaaagtaaagcagcccccacccagcacaggactgaaagtgacttacaaacctggacctgtggcagctggtatgcagacagaactgaatatagagttatttgccacagctgttggagaggatggggccaagggatcagcacacatctctcacaatatcgagattatgacagagcatgaggttctgttcctacctgtggaagcaactgttttaacaagcagcaattatgataaacgaccaaaagactttccccagggaaaagaaaatccaatggtccagagaacttctacaatttattcctccacacttggagtcttcatgtctcgtaaagtttctccacattagtttcttctcggtacaactcaatagcctccataatcctctcagcctacagaggatgagaaaggaaagaagtcatcacaacatactccatcatcccaggacactgaaactggaagaactgaccagaaatttgccaaatgaaatagcttcaatctgtttaataaagacgtgcgaatagagtgccaaaaa

SEQ ID NO: 185512 - DNA, 3484 bp, Homo sapiens
  Payload ID: 16530
  Gene Symbol: SPAG17
  Gene Name: sperm associated antigen 17
  ENST ID: ENST00000437255
  CDS Start-End: 1-1983
attgcaaagccacagggaacataccaggtgttacctccaaacacaggctctctttatattgacaaggattgttcagctgtgtactgccatgagtcaagcagtaatatatactatccttttcaaaagcgtgagcagctgcgagctggcaggtacatcatgaggcatacttcagaggttatctgtgaggttctggatcctgagggaaacacttttcaggtcatggctgatggtagcatatcaactatattacctgaaaaaaaattggaagatgatttaaatgagaaaactgagggctatgatagtctgtcctctatgcaccttgaaaagaatcatcagcaaatctatggtgaacatgtccccaggttttttgttatgtatgctgatggatcaggaatggaacttcttcgagacagtgacatagaagaatatctatctttggcatataaagaatcaaatactgttgttctccaagagccagtgcaggaacagccaggcaccctaaccatcacagtccttcgccctttccatgaagcatcaccatggcaagtaaaaaaggaagatacaattgtccctcctaatctccggtcaaggtcatgggaaacatttccctcagttgagaaaaaaactccaggacctccgtttggtactcagatttggaaaggcctttgcattgagtccaaacagctagtgagtgccccgggtgccatactcaagagccccagtgtgctacagatgcgccaattcattcagcatgaggtcataaagaatgaggtgaaactgaggctgcaggtttcccttaaggattacataaactatattctaaagaaagaagatgagctgcaggaaatgatggttaaagattccagaactgaggaggagagaggcaatgctgctgatctcctcaagctggttatgtctttccctaaaatggaggaaactacaaaaagtcatgttactgaagttgcagctcacctaactgatttattcaagcagtctttggctacgcctccaaaatgcccaccagacacatttggtaaagatttctttgaaaagacatggagacacacagcatcctcaaaacgctggaaagaaaagatagacaaaacgaggaaggaaattgagacaacacagaattacctaatggatattaagaaccgcataataccacccttttttaaatctgaattgaaccagttatatcagtctcagtataatcacctggacagtctttccaaaaaactgccttcttttacaaagaaaaatgaagatgcaaacgaaacagctgttcaagatacatctgatcttaatctagatttcaagccacataaggtttcagaacagaaatcctcaagtgtgcctagtcttccaaaaccagagatttctgcagataagaaggatttcactgctcagaaccaaactgaaaatttaacaaaatctcctgaagaagcagaatcttatgagcccgtgaaaattccaacccagtccttgctgcaggatgttgcgggacaaacaagaaaagaaaaagtgaagttgcctcattatttgctgagttccaagcctaagtctcaacctcttgcaaaggtgcaagattctgttggaggaaaagtgaacacatcctctgttgcatctgctgccattaataatgcaaagtcatccctttttgggttccatcttctcccatcatcagtcaagtttggagtgcttaaggaaggacatacctatgccacagttgtaaagctcaagaatgttggagtggacttctgcaggtttaaagtaaagcagcccccacccagcacaggactgaaagtgacttacaaacctggacctgtggcagctggtatgcagacagaactgaatatagagttatttgccacagctgttggagaggatggggccaagggatcagcacacatctctcacaatatcgagattatgacagagcatgaggttctgttcctacctgtggaagcaaatatcctttaaagttcaacttgagtaatcatatatagtgcagaaattacacgagtgaggaaaacatggaagtcaaaatgcatctctactttattaattctatcttcaaaatcagagttaaatttattaagacaaagagcatcttcattcatctttgaaagcacctagccaaatctaaaaaaatacctgacacatagtatatgtgcagtaacttcagattgaataaatgtaaatgttattggctatctacggaatatcagacagaataataaaacagcaagtatctatcacaaaaaaattataattttatggaaggataggaaataccttattattataaaggttgggtattcactgaattatgcatgcattcctccttatcagtgtcttcagccaaacagatattagatagatatcaagaacctattacctccaaggtactgtataaaatagtttatcatatataaaaatggataattggactctgtcttaaaaggtattatataatttgtagcagaaataaagtcttcacattttatttctattttgtactttctccagtggcatgaattgtgtgctgcttgtgttacagttctctatttatttgatttttgagctggatcttatagaatgtgaaaacttgattgacgggaactttaagtaaaaataatgaacaaaaccatggcaacaggaaagctccaggtgtttgggatgattggcagggagttcaacttgccaaaagcttgagtattaggaatatagtgggaaagtaggttggagtcaagttatgaaagatcttaaatccttggcttgaattttattatttaagcagcagtgaaccactgcagattcctgaccctgtgggtgacatgatcagcatatctttattaagatgaatccagggttattgtgcaggacatgtcaaaggggaacaactggatgtgtaaaagtaccattagaagtctacctgaatgggccatgtgtgaggacaagaactgggagtgggggaacagtcaacataaaagagggacatgaatgaaagacatggtgggggaaggaaactgcaaaatctgaggtagaagccattgatggatggaagaaagaggacatcgagttcaacttcaaagttttgggctgaggtaatgaatcatgtatatgtaatattagatctcaactgagaagtcagaattggagatataataattttaagcatcgtttacacagaggtgatggctgaatgtatgggcaaggaacagaaatctggagtcggtttagggagcaggaggaagaagagccagtggagacaaaagcagcaattagaaaatggtgaaatacttcaaaagccttaggaagaatttcaaggaaaagacggacacaattgacggatgctattgagatgtcaaagaaaattcagatttaaagtgttaaatttggttgggataaaaactaaattgcaaaaggtaaagaatgactgtattaagaaagcagaaacattagttatggatattctttc

SEQ ID NO: 185513 - DNA, 1453 bp, Homo sapiens
  Payload ID: 16531
  Gene Symbol: SPAG4
  Gene Name: sperm associated antigen 4
  Uniprot ID: Q9NPE6
  ENST ID: ENST00000374273
  CDS Start-End: 113-1426
tcacgcagggtccgtggggtccccgcggcgcgcagcggctgaaggaggccccagggccttggcgaccgcagcggcggctttagcgtcagtgactaggcagcagggggtcaggatgcggcgaagctcccgcccgggctcggcctcgtcctcgcgcaagcacacgcccaactttttcagcgagaacagctcaatgagcatcacctcggaggacagcaaagggctccggtcagcggagcccgggcctggggagcccgagggcagaagagcccggggcccgagctgcggtgagcccgccttgagcgcgggagtgcccggaggaaccacatgggcaggaagctctcagcagaagccagcgcctcggagccacaactggcagacagcctgtggcgcggcaaccgtgaggggcggggcctcggaaccgactgggtctccagtagtctctgaggagccgctcgaccttctcccgaccctggatctgaggcaggagatgcctcccccgcgggtgttcaagagctttctgagcctgctcttccaggggctgagcgtgttgttatccctggcaggagacgtgctggtcagcatgtacagggaggtctgttccatccgcttcctgttcacggctgtgtcgctgctgagcctctttctgtcagcattctggctggggcttctgtacctggtctctcctttggagaatgaacctaaggagatgctgactctaagtgagtaccacgagcgcgtgcgctcccaggggcagcagctgcagcagctccaggccgagctggataaactccacaaggaggtgtccactgttcgggcagccaacagcgagagagtggccaagctcgtgttccagaggctgaatgaggattttgtgcggaagcccgactatgctttgagctctgtgggagcctccatcgacctgcagaagacatcccacgattacgcagacaggaacactgcctacttctggaatcgcttcagcttctggaactacgcacggccgcccacggttatcctggagccccacgtgttccctgggaattgctgggcttttgaaggcgaccaaggccaggtggtgatccaactgccgggccgagtgcagctgagcgacatcactctgcagcatccaccgcccagcgtggagcacaccggaggagccaacagcgccccccgcgatttcgcggtctttggcctccaggtttatgatgaaactgaagtttccttggggaaattcaccttcgatgttgagaaatcggagattcagactttccacctgcagaatgaccccccagctgcctttcccaaggtgaagatccagattctaagcaactggggccacccccgtttcacgtgcttgtatcgagtccgtgcccacggtgtgcgaacctcagagggggcagagggcagtgcacaggggccccattaaacatgctgatttttggagtagaattga

SEQ ID NO: 185514 - DNA, 827 bp, Homo sapiens
  Payload ID: 16531
  Gene Symbol: SPAG4
  Gene Name: sperm associated antigen 4
  ENST ID: ENST00000454819
  CDS Start-End: 184-827
gagagacttcccagctgtctggcttgtggactgagcaatctgcggcccggtctcgaggggaaaataggtctgtggtccgcaaggccccagtggagcccttgggttcccgcagaaccgactgggtctccagtagtctctgaggagccgctcgaccttctcccgaccctggatctgaggcaggagatgcctcccccgcgggtgttcaagagctttctgagcctgctcttccaggggctgagcgtgttgttatccctggcaggagacgtgctggtcagcatgtacagggaggtctgttccatccgcttcctgttcacggctgtgtcgctgctgagcctctttctgtcagcattctggctggggcttctgtacctggtctctcctttggagaatgaacctaaggagatgctgactctaagtgagtaccacgagcgcgtgcgctcccaggggcagcagctgcagcagctccaggccgagctggataaactccacaaggaggtgtccactgttcgggcagccaacagcgagagagtggccaagctcgtgttccagaggctgaatgaggattttgtgcggaagcccgactatgctttgagctctgtgggagcctccatcgacctgcagaagacatcccacgattacgcagacaggaacactgcctacttctggaatcgcttcagcttctggaactacgcacggccgcccacggttatcctggagccccacgtgttccctgggaattgctgggcttttgaaggcgaccaaggccaggtggtgatccaactgccgggccgagtgcagctgagcgacatcactctgcagcatccacc

SEQ ID NO: 185515 - DNA, 453 bp, Homo sapiens
  Payload ID: 16531
  Gene Symbol: SPAG4
  Gene Name: sperm associated antigen 4
  ENST ID: ENST00000430878
  CDS Start-End: 1-426
gtgttccctgggaattgctgggcttttgaaggcgaccaaggccaggtggtgatccaactgccgggccgagtgcagctgagcgacatcactctgcagcatccaccgcccagcgtggagcacaccggaggagccaacagcgccccccgcgatttcgcggtctttttcctcctttcattcttcacccaccagggcctccaggtttatgatgaaactgaagtttccttggggaaattcaccttcgatgttgagaaatcggagattcagactttccacctgcagaatgaccccccagctgcctttcccaaggtgaagatccagattctaagcaactggggccacccccgtttcacgtgcttgtatcgagtccgtgcccacggtgtgcgaacctcagagggggcagagggcagtgcacaggggccccattaaacatgctgatttttggagtagaattga

SEQ ID NO: 185516 - DNA, 4040 bp, Homo sapiens
  Payload ID: 16532
  Gene Symbol: SPAG5
  Gene Name: sperm associated antigen 5
  Uniprot ID: Q96R06
  ENST ID: ENST00000321765
  CDS Start-End: 334-3915
caggagggatggactcctggactctccagctacctgcgtggtcctccccggtgtgaggacagaagaccggtcctgggccgggcccgcatccagccctaccgccggtgtctgaggtgagggctccgtcagcggaaaacgctcgacaacggaggggcaggcagggccgggggcgtggtcaacgcgggccccgccccccgggctctacccccgagcgtacgcgcgcgcctgaagcagccaaccaggaagcgcagagcaggttcaaacacagacggcgggtgaacatggcgtcctcgacttggtctgagacgtgataggcctgccttctggttgaagatgtggcgagtgaaaaaactgagcctcagcctgtcgccttcgccccagacgggaaaaccatctatgagaactcctctccgtgaacttaccctgcagcccggtgccctcaccaactctggaaaaagatcccccgcttgctcctcgctgaccccatcactgtgcaagctggggctgcaggaaggcagcaacaactcatctccagtggattttgtaaataacaagaggacagacttatcttcagaacatttcagtcattcctcaaagtggctagaaacttgtcagcatgaatcagatgagcagcctctagatccaattccccaaattagctctactcctaaaacgtctgaggaagcagtagacccactgggcaattatatggttaaaaccatcgtccttgtaccatctccactggggcagcaacaagacatgatatttgaggcccgtttagataccatggcagagacaaacagcatatctttaaatggacctttgagaacagacgatctggtgagagaggaggtggcaccctgcatgggagacaggttttcagaagttgctgctgtatctgagaaacctatctttcaggaatctccgtcccatctcttagaggagtctccaccaaatccctgttctgaacaactacattgctccaaggaaagcctgagcagtagaactgaggctgtgcgtgaggacttagtaccttctgaaagtaacgccttcttgccttcctctgttctctggctttccccttcaactgccttggcagcagatttccgtgtcaatcatgtggacccagaggaggaaattgtagagcatggagctatggaggaaagagaaatgaggtttcccacacatcctaaggagtctgaaacagaagatcaagcacttgtctcaagtgtggaagatattctgtccacatgcctgacaccaaatctagtagaaatggaatcccaagaagctccaggcccagcagtagaagatgttggtaggattcttggctctgatacagagtcttggatgtccccactggcctggctggaaaaaggtgtaaatacctccgtcatgctggaaaatctccgccaaagcttatcccttccctcgatgcttcgggatgctgcaattggcactacccctttctctacttgctcggtggggacttggtttactccttcagcaccacaggaaaagagtacaaacacatcccagacaggcctggttggcaccaagcacagtacttctgagacagagcagctcctgtgtggccggcctccagatctgactgccttgtctcgacatgacttggaagataacctgctgagctctcttgtcattctggaggttctctcccgccagcttcgggactggaagagccagctggctgtccctcacccagaaacccaggacagtagcacacagactgacacatctcacagtgggataactaataaacttcagcatcttaaggagagccatgagatgggacaggccctacagcaggccagaaatgtcatgcaatcatgggtgcttatctctaaagagctgatatccttgcttcacctatccctgttgcatttagaagaagataagactactgtgagtcaggagtctcggcgtgcagaaacattggtctgttgctgttttgatttgctgaagaaattgagggcaaagctccagagcctcaaagcagaaagggaggaggcaaggcacagagaggaaatggctctcagaggcaaggatgcggcagagatagtgttggaggctttctgtgcacacgccagccagcgcatcagccagctggaacaggacctagcatccatgcgggaattcagaggccttctgaaggatgcccagacccaactggtagggcttcatgccaagcaagaagagctggttcagcagacagtgagtcttacttctaccttgcaacaagactggaggtccatgcaactggattatacaacatggacagctttgctgagtcggtcccgacaactcacagagaaactcacagtcaagagccagcaagccctgcaggaacgtgatgtggcaattgaggaaaagcaggaggtttctagggtgctggaacaagtctctgcccagttagaggagtgcaaaggccaaacagaacaactggagttggaaaacagtcgtctagcaacagatctccgggctcagttgcagattctggccaacatggacagccagctaaaagagctacagagtcagcatacccattgtgcccaggacctggctatgaaggatgagttactctgccagcttacccagagcaatgaggagcaggctgctcaatggcaaaaggaagagatggcactaaaacacatgcaggcagaactgcagcagcaacaagctgtcctggccaaagaggtgcgggacctgaaagagaccttggagtttgcagaccaggagaatcaggttgctcacctggagctgggtcaggttgagtgtcaattgaaaaccacactggaagtgctccgggagcgcagcttgcagtgtgagaacctcaaggacactgtagagaacctaacggctaaactggccagcaccatagcagataaccaggagcaagatctggagaaaacacggcagtactctcaaaagctagggctgctgactgagcaactacagagcctgactctctttctacagacaaaactaaaggagaagactgaacaagagacccttctgctgagtacagcctgtcctcccacccaggaacaccctctgcctaatgacaggaccttcctgggaagcatcttgacagcagtggcagatgaagagccagaatcaactcctgtgcccttgcttggaagtgacaagagtgctttcacccgagtagcatcaatggtttcccttcagcccgcagagaccccaggcatggaggagagcctggcagaaatgagtattatgactactgagcttcagagtctttgttccctgctacaagagtctaaagaagaagccatcaggactctgcagcgaaaaatttgtgagctgcaagctaggctgcaggcccaggaagaacagcatcaggaagtccagaaggcaaaagaagcagacatagagaagctgaaccaggccttgtgcttgcgctacaagaatgaaaaggagctccaggaagtgatacagcagcagaatgagaagatcctagaacagatagacaagagtggcgagctcataagccttagagaggaggtgacccaccttacccgctcacttcggcgtgcggagacagagaccaaagtgctccaggaggccctggcaggccagctggactccaactgccagcctatggccaccaattggatccaggagaaagtgtggctctctcaggaggtggacaaactgagagtgatgttcctggagatgaaaaatgagaaggaaaaactcatgatcaagttccagagccatagaaatatcctagaggagaaccttcggcgctctgacaaggagttagaaaaactagatgacattgttcagcatatttataagaccctgctctctattccagaggtggtgaggggatgcaaagaactacagggattgctggaatttctgagctaagaaactgaaagccagaatctgcttcacctctttttacctgcaatacccccttaccccaataccaagaccaactggcatagagccaactgagataaatgctatttaaataaagtgtatttaatgaa

SEQ ID NO: 185517 - DNA, 870 bp, Homo sapiens
  Payload ID: 16532
  Gene Symbol: SPAG5
  Gene Name: sperm associated antigen 5
  ENST ID: ENST00000536674
  CDS Start-End: 54-870
catggcgtcctcgacttggtctgagacgtgataggcctgccttctggttgaagatgtggcgagtgaaaaaactgagcctcagcctgtcgccttcgccccagacgggaaaaccatctatgagaactcctctccgtgaacttaccctgcagcccggtgccctcaccaactctggaaaaagatcccccgcttgctcctcgctgaccccatcactgtgcaagctggggctgcaggtgagattcgcctggacagcttctcgactgggctgtttgcccagggaaggcagcaacaactcatctccagtggattttgtaaataacaagaggacagacttatcttcagaacatttcagtcattcctcaaagtggctagaaacttgtcagcatgaatcagatgagcagcctctagatccaattccccaaattagctctactcctaaaacgtctgaggaagcagtagacccactgggcaattatatggttaaaaccatcgtccttgtaccatctccactggggcagcaacaagacatgatatttgaggcccgtttagataccatggcagagacaaacagcatatctttaaatggacctttgagaacagacgatctggtgagagaggaggtggcaccctgcatgggagacaggttttcagaagttgctgctgtatctgagaaacctatctttcaggaatctccgtcccatctcttagaggagtctccaccaaatccctgttctgaacaactacattgctccaaggaaagcctgagcagtagaactgaggctgtgcgtgaggacttagtaccttctgaaagtaacgccttcttgccttcctctgttctctggctttccccttcaactgccttggcagcagatt

SEQ ID NO: 185518 - DNA, 904 bp, Homo sapiens
  Payload ID: 16532
  Gene Symbol: SPAG5
  Gene Name: sperm associated antigen 5
  ENST ID: ENST00000578479
  CDS Start-End: 60-278
ggtgaacatggcgtcctcgacttggtctgagacgtgataggcctgccttctggttgaagatgtggcgagtgaaaaaactgagcctcagcctgtcgccttcgccccagacgggaaaaccatctatgagaactcctctccgtgaacttaccctgcagcccggtgccctcaccaactctggaaaaagatcccccgcttgctcctcgctgaccccatcactgtgcaagctggggctgcagatttccgtgtcaatcatgtggacccagaggaggaaattgtagagcatggagctatggaggaaagagaaatgaggtttcccacacatcctaaggagtctgaaacagaagatcaagcacttgtctcaagtgtggaagatattctgtccacatgcctgacaccaaatctagtagaaatggaatcccaagaagctccaggcccagcagtagaagatgttggtaggattcttggctctgatacagagtcttggatgtccccactggcctggctggaaaaaggtgtaaatacctccgtcatgctggaaaatctccgccaaagcttatcccttccctcgatgcttcgggatgctgcaattggcactacccctttctctacttgctcggtggggacttggtttactccttcagcaccacaggaaaagagtacaaacacatcccagacaggcctggttggcaccaagcacagtacttctgagacagagcagctcctgtgtggccggcctccagatctgactgccttgtctcgacatgacttggaagataacctgctgagctctcttgtcattctggaggttctctcccgccagcttcgggactggaagagccagctggctgtccctcacccagaaacccaggacagtagcacacagactgacacatctcacagtggg

SEQ ID NO: 185519 - DNA, 715 bp, Homo sapiens
  Payload ID: 16532
  Gene Symbol: SPAG5
  Gene Name: sperm associated antigen 5
  ENST ID: ENST00000584206
  CDS Start-End: 1-715
tccctcacccagaaacccaggacagtagcacacagactgacacatctcacagtgggataactaataaacttcagcatcttaaggagagccatgagatgggacaggccctacagcaggccagaaatgtcatgcaatcatgggtgcttatctctaaagagctgatatccttgcttcacctatccctgttgcatttagaagaagataagactactgtgagtcaggagtctcggcgtgcagaaacattggtctgttgctgttttgatttgctgaagaaattgagggcaaagctccagagcctcaaagcagaaagggaggaggcaaggcacagagaggaaatggctctcagaggcaaggatgcggtagggcttcatgccaagcaagaagagctggttcagcagacagtgagtcttacttctaccttgcaacaagactggaggtccatgcaactggattatacaacatggacagctttgctgagtcggtcccgacaactcacagagaaactcacagtcaagagccagcaagccctgcaggaacgtgatgtggcaattgaggaaaagcaggaggtttctagggtgctggaacaagtctctgcccagttagaggagtgcaaaggccaaacagaacaactggagttggaaaacagtcgtctagcaacagatctccgggctcagttgcagattctggccaacatggacagccagctaaaagagct

SEQ ID NO: 185520 - DNA, 335 bp, Homo sapiens
  Payload ID: 16532
  Gene Symbol: SPAG5
  Gene Name: sperm associated antigen 5
  ENST ID: ENST00000578230
  CDS Start-End: 1-174
caggagcaagatctggagaaaacacggcagtactctcaaaagctagggctgctgactgagcaactacagagcctgactctctttctacagacaaaactaaaggagaagactatgtttcaagaaagcagaaatatagccttctttggcctccctgcagtgtgcactaaacaataaatggttgacatcattcagaatacaaagactgaacaagagacccttctgctgagtacagcctgtcctcccacccaggaacaccctctgcctaatgacaggaccttcctgggaagcatcttgacagcagtggcagatgaagagccagaatcaactcctgtgcc

SEQ ID NO: 185521 - DNA, 899 bp, Homo sapiens
  Payload ID: 16532
  Gene Symbol: SPAG5
  Gene Name: sperm associated antigen 5
  ENST ID: ENST00000580567
  CDS Start-End: 52-273
tggcgtcctcgacttggtctgagacgtgataggcctgccttctggttgaagatgtggcgagtgaaaaaactgagcctcagcctgtcgccttcgccccagacgggaaaaccatctatgagaactcctctccgtgaacttaccctgcagcccggtgccctcaccaactctggaaaaagatcccccgcttgctcctcgctgaccccatcactgtgcaagctggggctgcagcagatttccgtgtcaatcatgtggacccagaggaggaaattgtagagcatggagctatggaggaaagagaaatgaggtttcccacacatcctaaggagtctgaaacagaagatcaagcacttgtctcaagtgtggaagatattctgtccacatgcctgacaccaaatctagtagaaatggaatcccaagaagctccaggcccagcagtagaagatgttggtaggattcttggctctgatacagagtcttggatgtccccactggcctggctggaaaaaggtgtaaatacctccgtcatgctggaaaatctccgccaaagcttatcccttccctcgatgcttcgggatgctgcaattggcactacccctttctctacttgctcggtggggacttggtttactccttcagcaccacaggaaaagagtacaaacacatcccagacaggcctggttggcaccaagcacagtacttctgagacagagcagctcctgtgtggccggcctccagatctgactgccttgtctcgacatgacttggaagataacctgctgagctctcttgtcattctggaggttctctcccgccagcttcgggactggaagagccagctggctgtccctcacccagaaacccaggacagtagcacacagactgacacatctcacagtggg

SEQ ID NO: 185522 - DNA, 978 bp, Homo sapiens
  Payload ID: 16532
  Gene Symbol: SPAG5
  Gene Name: sperm associated antigen 5
  ENST ID: ENST00000580083
  CDS Start-End: 1-390
tctcggcgtgcagaaacattggtctgttgctgttttgatttgctgaagaaattgagggcaaagctccagagcctcaaagcagaaagggaggaggcaaggcacagagaggaaatggctctcagaggcaaggatgcggtagggcttcatgccaagcaagaagagctggttcagcagacagtgagtcttacttctaccttgcaacaagactggaggtccatgcaactggattatacaacatggacagctttgctgagtcggtcccgacaactcacagagaaactcacagtcaagagccagcaagccctgcaggaacgtgatgtggcaattgaggaaaagcaggagatctccgggctcagttgcagattctggccaacatggacagccagctaaaagagctacagagtcagcatacccattgtgcccaggacctggctatgaaggatgagttactctgccagcttacccagagcaatgaggagcaggctgctcaatggcaaaaggaagagatggcactaaaacacatgcaggcagaactgcagcagcaacaagctgtcctggccaaagaggtgcgggacctgaaagagaccttggagtttgcagaccaggagaatcaggttgctcacctggagctgggtcaggttgagtgtcaattgaaaaccacactggaagtgctccgggagcgcagcttgcagtgtgagaacctcaaggacactgtagagaacctaacggctaaactggccagcaccatagcagataaccaggagcaagatctggagaaaacacggcagtactctcaaaagctagggctgctgactgagcaactacagagcctgactctctttctacagacaaaactaaaggagaagactgaacaagagacccttctgctgagtacagcctgtcctcccacccaggaacaccctctgcctaatgacaggaccttcctgggaagcatcttgacagcagtggcagatgaag

SEQ ID NO: 185523 - DNA, 755 bp, Homo sapiens
  Payload ID: 16532
  Gene Symbol: SPAG5
  Gene Name: sperm associated antigen 5
  ENST ID: ENST00000378976
  CDS Start-End: 1-559
tctagcaacagatctccgggctcagttgcagattctggccaacatggacagccagctaaaagagctacagagtcagcatacccattgtgcccaggacctggctatgaaggatgagttactctgccagcttacccagagcaatgaggagcaggctgctcaatggcaaaaggaagagatggcactaaaacacatgcaggcagaactgcagcagcaacaagctgtcctggccaaagaggtgcgggacctgaaagagaccttggagtttgcagaccaggagaatcaggttgctcacctggagctgggtcaggttgagtgtcaattgaaaaccacactggaagtgctccgggagcgcagcttgcagtgtgagaacctcaaggacactgtagagaacctaacggctaaactggccagcaccatagcagataaccaggagcaagatctggagaaaacacggcagtactctcaaaagctagggctgctgactgagcaactacagagcctgactctctttctacagacaaaactaaaggagaagctattttttcttctttgcccttagactgaacaagagacccttctgctgagtacagcctgtcctcccacccaggaacaccctctgcctaatgacaggaccttcctgggaagcatcttgacagcagtggcagatgaagagccagaatcaactcctgtgcccttgcttggaagtgacaagagtgctttcacccgagtagcatcaatggtttcccttcagcccg

SEQ ID NO: 185524 - DNA, 719 bp, Homo sapiens
  Payload ID: 16532
  Gene Symbol: SPAG5
  Gene Name: sperm associated antigen 5
  ENST ID: ENST00000582076
  CDS Start-End: 1-556
agagtctaaagaagaagccatcaggactctgcagcgaaaaatttgtgagctgcaagctaggctgcaggcccaggaagaacagcatcaggaagtccagaaggcaaaagaagcagacatagagaagctgaaccaggccttgtgcttgcgctacaagaatgaaaaggagctccaggaagtgatacagcagcagaatgagaagatcctagaacagatagacaagagtggcgagctcataagccttagagaggaggtgacccaccttacccgctcacttcggcgtgcggagacagagaccaaagtgctccaggaggccctggcaggccagctggactccaactgccagcctatggccaccaattggatccaggagaaagtgtggctctctcaggaggtggacaaactgagagtgatgttcctggagatgaaaaatgagaaggaaaaactcatgatcaagttccagagccatagaaatatcctagaggagaaccttcggcgctctgacaaggagttagaaaaactagatgacattgttcagcatatttataagaggtggtgaggggatgcaaagaactacagggattgctggaatttctgagctaagaaactgaaagccagaatctgcttcacctctttttacctgcaatacccccttaccccaataccaagaccaactggcatagagccaactgagataaatgctatttaaataaagtgtattt

SEQ ID NO: 185525 - DNA, 2421 bp, Homo sapiens
  Payload ID: 16533
  Gene Symbol: SPAG6
  Gene Name: sperm associated antigen 6
  Uniprot ID: O75602
  ENST ID: ENST00000313311
  CDS Start-End: 116-1492
gagaagcggctcccgtcggaggccgagtcgtcgccacgatcgcccccttggtggactcgcaggccgagcggcttccccgcagagctcgaggagggcagacggcggcgggggcgccatgagtcagaggcaggtgctgcaagtgttcgagcaataccagaaggccaggacccagttcgtgcagatggtggcggagctggcgactagaccccaaaacatcgagacgctgcagaacgcgggtgtaatgtctttgctgagaactcttcttctggacgtggtcccaacaattcaacagactgctgctttggctcttgggagactggccaattataatgatgacctagcagaagctgttgtgaagtgcgacattcttccacagcttgtttattcattggcagaacagaatcgcttctacaagaaagcagctgcctttgtgttacgagcagttggtaaacattctccccagctagctcaggcaatagtcgattgtggagcactggatacgctggtcatatgcttggaagattttgaccctggagtcaaggaggctgcagcctgggcacttagatatattgcaagacataatgcagaactgtcacaagctgtggtggatgcaggagctgttcctcttttagtactctgtatccaggagccagaaattgctttgaaaaggattgctgcttcggccctcagtgatattgcaaagcattctccagagttagcacagacagtagtggatgcaggagctgttgctcatttagcccagatgatcctgaaccctgatgctaaattgaagcatcagatcctttcagctctcagtcaggtttcaaaacattccgtggatctggcagaaatggttgttgaagcagagatttttccagttgtacttacctgtctgaaggacaaggatgaatacgtgaagaaaaatgcttctactttaattagagagattgcaaaacatacacccgagctttcacagctggtagttaacgcaggaggggttgctgccgtgattgactgcattgggtcctgcaaagggaacacacggctgcctggcatcatgatgcttggttatgtagcagctcattctgagaacctagcaatggcagtcatcatttctaagggtgtaccccagttgtcagtctgcttgtcagaagaaccggaagatcatattaaggctgcagctgcttgggccttaggacagattggaagacacactcctgaacacgcacgggctgttgcagtcacaaatactttgccagttctgctttctttgtacatgtcaacagaaagttctgaggatctccaagtaaaaagtaaaaaagccataaagaatatcctgcaaaaatgtacctacttaccagcccttgaaccatttctatatgatgctcctcccaatattctgaaacatgtggttggacagttcagtaaggtattattcccctggatattcagatacacttctgcagagggtggacagctatcaaccacttaataactgagcaaagttatattgtgatactcaaattcacagcagagtagttttgagtaacagtaattaaatccttctaaatatttgaactaagtatattctagatttatttaatgggaaatacctttagataatattttctaaatttatgtaatactttaaacattcgtagcttgaatatgtgaggaactattcatggtcattcgcatgcataggatttgttctacaggtagattttaaaaacacgttaaagggccttaaggcattttgttattctgttaaaaaccacacacactcgtacatgcagacacctccaatgagatatagttaagagatggcattcaaaaaccctaaattattctagccaatttgtcataggcataggcaaggaaagctggccttgctaactatatagtagtatacacaagagaaatctttgaaggaggaaactgatgacagatatacagggcacttgaaggagactctgatgctagttatataagtgcattaacttaagacacggactctgtgggtaacctgttaggttttactaagaatttaggaaaaatttactcctctttatcacaagttttccaaacctccttccccaccctatctaaagtgttccttacctttcatgggcccagcgagggtagaattcagaatagagagttatactcctgcatacatgctctccctctcattgaaaggtttcttagtctagctctgctcatgaatgaacaaagaagcaggcatgtaaaatggatccttgtcctaacgtcactttcccaagtttcaaaagtcacattttcaggtatttaaggaatagtttgaagctaataccatcaggctcagagtttacatgcatttttacttaggaagtggtaaacgggtgaaagagggtttcaataaaattttaaataaaaacagca

SEQ ID NO: 185526 - DNA, 2770 bp, Homo sapiens
  Payload ID: 16533
  Gene Symbol: SPAG6
  Gene Name: sperm associated antigen 6
  ENST ID: ENST00000376603
  CDS Start-End: 320-1774
aagacggccgcgttccggttccggtaggttgcccgggagacgcgggtacacagagaagcggctcccgtcggaggccgagtcgtcgccacgatcgcccccttggtggactcgcaggccgagcggcttccccgcagagctcgaggagggcagacggcggcgggggcgccatgagtcagaggcaggtgctgcaaggtagggccgaggcgggcaggtgccctaactagctggcgccgaggagacccgggtgcggtgggctccaccgactctctctcccgcagtgttcgagcaataccagaaggccaggacccagttcgtgcagatggtggcggagctggcgactagaccccaaaacatcgagacgctgcagaacgcgggtgtaatgtctttgctgagaactcttcttctggacgtggtcccaacaattcaacagactgctgctttggctcttgggagactggccaattataatgatgacctagcagaagctgttgtgaagtgcgacattcttccacagcttgtttattcattggcagaacagaatcgcttctacaagaaagcagctgcctttgtgttacgagcagttggtaaacattctccccagctagctcaggcaatagtcgattgtggagcactggatacgctggtcatatgcttggaagattttgaccctggagtcaaggaggctgcagcctgggcacttagatatattgcaagacataatgcagaactgtcacaagctgtggtggatgcaggagctgttcctcttttagtactctgtatccaggagccagaaattgctttgaaaaggattgctgcttcggccctcagtgatattgcaaagcattctccagagttagcacagacagtagtggatgcaggagctgttgctcatttagcccagatgatcctgaaccctgatgctaaattgaagcatcagatcctttcagctctcagtcaggtttcaaaacattccgtggatctggcagaaatggttgttgaagcagagatttttccagttgtacttacctgtctgaaggacaaggatgaatacgtgaagaaaaatgcttctactttaattagagagattgcaaaacatacacccgagctttcacagctggtagttaacgcaggaggggttgctgccgtgattgactgcattgggtcctgcaaagggaacacacggctgcctggcatcatgatgcttggttatgtagcagctcattctgagaacctagcaatggcagtcatcatttctaagggtgtaccccagttgtcagtctgcttgtcagaagaaccggaagatcatattaaggctgcagctgcttgggccttaggacagattggaagacacactcctgaacacgcacgggctgttgcagtcacaaatactttgccagttctgctttctttgtacatgtcaacagaaagttctgaggatctccaagtaaaaagtaaaaaagccataaagaatatcctgcaaaaatgtacctacttaccagcccttgaaccatttctatatgatgctcctcccaatattctgaaacatgtggttggacagttcagtaaggtgctgccgcatgatagcaaagctcgacgactttttgtaacaagtggtggccttaaaaaagttcaagagataaaagcagaacctggttctctccttcaagaatacatcaacagtattaacagttgttaccccgaggaaatagtgagtaaattctttccagagttgcaagtttgtgcactttttaggaagtttatgagaactccttgaccaaaagagttccaataggtattattcccctggatattcagatacacttctgcagagggtggacagctatcaaccacttaataactgagcaaagttatattgtgatactcaaattcacagcagagtagttttgagtaacagtaattaaatccttctaaatatttgaactaagtatattctagatttatttaatgggaaatacctttagataatattttctaaatttatgtaatactttaaacattcgtagcttgaatatgtgaggaactattcatggtcattcgcatgcataggatttgttctacaggtagattttaaaaacacgttaaagggccttaaggcattttgttattctgttaaaaaccacacacactcgtacatgcagacacctccaatgagatatagttaagagatggcattcaaaaaccctaaattattctagccaatttgtcataggcataggcaaggaaagctggccttgctaactatatagtagtatacacaagagaaatctttgaaggaggaaactgatgacagatatacagggcacttgaaggagactctgatgctagttatataagtgcattaacttaagacacggactctgtgggtaacctgttaggttttactaagaatttaggaaaaatttactcctctttatcacaagttttccaaacctccttccccaccctatctaaagtgttccttacctttcatgggcccagcgagggtagaattcagaatagagagttatactcctgcatacatgctctccctctcattgaaaggtttcttagtctagctctgctcatgaatgaacaaagaagcaggcatgtaaaatggatccttgtcctaacgtcactttcccaagtttcaaaagtcacattttcaggtatttaaggaatagtttgaagctaataccatcaggctcagagtttacatgcatttttacttaggaagtggtaaacgggtgaaagagggtttcaataaaatttt

SEQ ID NO: 185527 - DNA, 2605 bp, Homo sapiens
  Payload ID: 16533
  Gene Symbol: SPAG6
  Gene Name: sperm associated antigen 6
  Uniprot ID: O75602
  ENST ID: ENST00000376624
  CDS Start-End: 143-1672
aggttgcccgggagacgcgggtacacagagaagcggctcccgtcggaggccgagtcgtcgccacgatcgcccccttggtggactcgcaggccgagcggcttccccgcagagctcgaggagggcagacggcggcgggggcgccatgagtcagaggcaggtgctgcaagtgttcgagcaataccagaaggccaggacccagttcgtgcagatggtggcggagctggcgactagaccccaaaacatcgagacgctgcagaacgcgggtgtaatgtctttgctgagaactcttcttctggacgtggtcccaacaattcaacagactgctgctttggctcttgggagactggccaattataatgatgacctagcagaagctgttgtgaagtgcgacattcttccacagcttgtttattcattggcagaacagaatcgcttctacaagaaagcagctgcctttgtgttacgagcagttggtaaacattctccccagctagctcaggcaatagtcgattgtggagcactggatacgctggtcatatgcttggaagattttgaccctggagtcaaggaggctgcagcctgggcacttagatatattgcaagacataatgcagaactgtcacaagctgtggtggatgcaggagctgttcctcttttagtactctgtatccaggagccagaaattgctttgaaaaggattgctgcttcggccctcagtgatattgcaaagcattctccagagttagcacagacagtagtggatgcaggagctgttgctcatttagcccagatgatcctgaaccctgatgctaaattgaagcatcagatcctttcagctctcagtcaggtttcaaaacattccgtggatctggcagaaatggttgttgaagcagagatttttccagttgtacttacctgtctgaaggacaaggatgaatacgtgaagaaaaatgcttctactttaattagagagattgcaaaacatacacccgagctttcacagctggtagttaacgcaggaggggttgctgccgtgattgactgcattgggtcctgcaaagggaacacacggctgcctggcatcatgatgcttggttatgtagcagctcattctgagaacctagcaatggcagtcatcatttctaagggtgtaccccagttgtcagtctgcttgtcagaagaaccggaagatcatattaaggctgcagctgcttgggccttaggacagattggaagacacactcctgaacacgcacgggctgttgcagtcacaaatactttgccagttctgctttctttgtacatgtcaacagaaagttctgaggatctccaagtaaaaagtaaaaaagccataaagaatatcctgcaaaaatgtacctacttaccagcccttgaaccatttctatatgatgctcctcccaatattctgaaacatgtggttggacagttcagtaaggtgctgccgcatgatagcaaagctcgacgactttttgtaacaagtggtggccttaaaaaagttcaagagataaaagcagaacctggttctctccttcaagaatacatcaacagtattaacagttgttaccccgaggaaatagtgaggtattattcccctggatattcagatacacttctgcagagggtggacagctatcaaccacttaataactgagcaaagttatattgtgatactcaaattcacagcagagtagttttgagtaacagtaattaaatccttctaaatatttgaactaagtatattctagatttatttaatgggaaatacctttagataatattttctaaatttatgtaatactttaaacattcgtagcttgaatatgtgaggaactattcatggtcattcgcatgcataggatttgttctacaggtagattttaaaaacacgttaaagggccttaaggcattttgttattctgttaaaaaccacacacactcgtacatgcagacacctccaatgagatatagttaagagatggcattcaaaaaccctaaattattctagccaatttgtcataggcataggcaaggaaagctggccttgctaactatatagtagtatacacaagagaaatctttgaaggaggaaactgatgacagatatacagggcacttgaaggagactctgatgctagttatataagtgcattaacttaagacacggactctgtgggtaacctgttaggttttactaagaatttaggaaaaatttactcctctttatcacaagttttccaaacctccttccccaccctatctaaagtgttccttacctttcatgggcccagcgagggtagaattcagaatagagagttatactcctgcatacatgctctccctctcattgaaaggtttcttagtctagctctgctcatgaatgaacaaagaagcaggcatgtaaaatggatccttgtcctaacgtcactttcccaagtttcaaaagtcacattttcaggtatttaaggaatagtttgaagctaataccatcaggctcagagtttacatgcatttttacttaggaagtggtaaacgggtgaaagagggtttcaataaaattttaaataaaaacagcattagaattgtc

SEQ ID NO: 185528 - DNA, 853 bp, Homo sapiens
  Payload ID: 16533
  Gene Symbol: SPAG6
  Gene Name: sperm associated antigen 6
  ENST ID: ENST00000435326
  CDS Start-End: 115-853
agaagcggctcccgtcggaggccgagtcgtcgccacgatcgcccccttggtggactcgcaggccgagcggcttccccgcagagctcgaggagggcagacggcggcgggggcgccatgagtcagaggcaggtgctgcaagtgttcgagcaataccagaaggccaggacccagttcgtgcagatggtggcggagctggcgactagaccccaaaacatcgagacgctgcagaacgcgggtgagcccggagcccgaacccccgtcgccccccgcgcactgagtccccgacgcctccgccccgctgccctgcccgtggagctcttggggagccgcagtgtggggaccggagttcgcaaaagcatccattcttttcagcgggtctttgggggtcaggccgagagggtgaagcttccagatggttgtgggaggtgcgcgttgtccctgtttccatcttcattgcacacaggtgtaatgtctttgctgagaactcttcttctggacgtggtcccaacaattcaacagactgctgctttggctcttgggagactggccaattataatgatgacctagcagaagctgttgtgaagtgcgacattcttccacagcttgtttattcattggcagaacagaatcgcttctacaagaaagcagctgcctttgtgttacgagcagttggtaaacattctccccagctagctcaggcaatagtcgattgtggagcactggatacgctggtcatatgcttggaagattttgaccctggagtcaaggaggctgcagcctgggcacttagatatattgcaagacataatgcagaactgtcacaagctgtggtggatgcaggagctgttcctc

SEQ ID NO: 185529 - DNA, 700 bp, Homo sapiens
  Payload ID: 16533
  Gene Symbol: SPAG6
  Gene Name: sperm associated antigen 6
  ENST ID: ENST00000456231
  CDS Start-End: 126-700
cgggtacacagagaagcggctcccgtcggaggccgagtcgtcgccacgatcgcccccttggtggactcgcaggccgagcggcttccccgcagagctcgaggagggcagacggcggcgggggcgccatgagtcagaggcaggtgctgcaagtgttcgagcaataccagaaggccaggacccagttcgtgcagatggtggcggagctggcgactagaccccaaaacatcgagacgctgcagaacgcgggtgtaatgtctttgctgagaactcttcttctggacgtggtcccaacaattcaacagactgctgctttggctcttgggagactggccaattataatgatgacctagcagaagctgttgtgaagtgcgacattcttccacagcttgtttattcattggcagaacagaatggtgtaccccagttgtcagtctgcttgtcagaagaaccggaagatcatattaaggctgcagctgcttgggccttaggacagattggaagacacactcctgaacacgcacgggctgttgcagtcacaaatactttgccagttctgctttctttgtacatgtcaacagaaagttctgaggatctccaagtaaaaagtaaaaaagccataaagaatatcctgcaaaaatgtacctacttaccagcccttgaaccatttctatatgatgctcctcccaatattctgaaaca

SEQ ID NO: 185530 - DNA, 2376 bp, Homo sapiens
  Payload ID: 16533
  Gene Symbol: SPAG6
  Gene Name: sperm associated antigen 6
  Uniprot ID: O75602
  ENST ID: ENST00000538630
  CDS Start-End: 1-1455
atgcattcactcaccatggatctctggatacctaatggacaggcaggtgtaatgtctttgctgagaactcttcttctggacgtggtcccaacaattcaacagactgctgctttggctcttgggagactggccaattataatgatgacctagcagaagctgttgtgaagtgcgacattcttccacagcttgtttattcattggcagaacagaatcgcttctacaagaaagcagctgcctttgtgttacgagcagttggtaaacattctccccagctagctcaggcaatagtcgattgtggagcactggatacgctggtcatatgcttggaagattttgaccctggagtcaaggaggctgcagcctgggcacttagatatattgcaagacataatgcagaactgtcacaagctgtggtggatgcaggagctgttcctcttttagtactctgtatccaggagccagaaattgctttgaaaaggattgctgcttcggccctcagtgatattgcaaagcattctccagagttagcacagacagtagtggatgcaggagctgttgctcatttagcccagatgatcctgaaccctgatgctaaattgaagcatcagatcctttcagctctcagtcaggtttcaaaacattccgtggatctggcagaaatggttgttgaagcagagatttttccagttgtacttacctgtctgaaggacaaggatgaatacgtgaagaaaaatgcttctactttaattagagagattgcaaaacatacacccgagctttcacagctggtagttaacgcaggaggggttgctgccgtgattgactgcattgggtcctgcaaagggaacacacggctgcctggcatcatgatgcttggttatgtagcagctcattctgagaacctagcaatggcagtcatcatttctaagggtgtaccccagttgtcagtctgcttgtcagaagaaccggaagatcatattaaggctgcagctgcttgggccttaggacagattggaagacacactcctgaacacgcacgggctgttgcagtcacaaatactttgccagttctgctttctttgtacatgtcaacagaaagttctgaggatctccaagtaaaaagtaaaaaagccataaagaatatcctgcaaaaatgtacctacttaccagcccttgaaccatttctatatgatgctcctcccaatattctgaaacatgtggttggacagttcagtaaggtgctgccgcatgatagcaaagctcgacgactttttgtaacaagtggtggccttaaaaaagttcaagagataaaagcagaacctggttctctccttcaagaatacatcaacagtattaacagttgttaccccgaggaaatagtgaggtattattcccctggatattcagatacacttctgcagagggtggacagctatcaaccacttaataactgagcaaagttatattgtgatactcaaattcacagcagagtagttttgagtaacagtaattaaatccttctaaatatttgaactaagtatattctagatttatttaatgggaaatacctttagataatattttctaaatttatgtaatactttaaacattcgtagcttgaatatgtgaggaactattcatggtcattcgcatgcataggatttgttctacaggtagattttaaaaacacgttaaagggccttaaggcattttgttattctgttaaaaaccacacacactcgtacatgcagacacctccaatgagatatagttaagagatggcattcaaaaaccctaaattattctagccaatttgtcataggcataggcaaggaaagctggccttgctaactatatagtagtatacacaagagaaatctttgaaggaggaaactgatgacagatatacagggcacttgaaggagactctgatgctagttatataagtgcattaacttaagacacggactctgtgggtaacctgttaggttttactaagaatttaggaaaaatttactcctctttatcacaagttttccaaacctccttccccaccctatctaaagtgttccttacctttcatgggcccagcgagggtagaattcagaatagagagttatactcctgcatacatgctctccctctcattgaaaggtttcttagtctagctctgctcatgaatgaacaaagaagcaggcatgtaaaatggatccttgtcctaacgtcactttcccaagtttcaaaagtcacattttcaggtatttaaggaatagtttgaagctaataccatcaggctcagagtttacatgcatttttacttaggaagtggtaaacgggtgaaagagggtttcaataaaattttaaataaaaacagc

SEQ ID NO: 185531 - DNA, 1058 bp, Homo sapiens
  Payload ID: 16534
  Gene Symbol: SPAG7
  Gene Name: sperm associated antigen 7
  Uniprot ID: O75391
  ENST ID: ENST00000206020
  CDS Start-End: 69-752
gtttccggccttaaaggcattccgcccttccctttaagacgcaccgccccctctcagtcactcccaagatggcggacctactgggctccatcctgagctccatggagaagccacccagcctcggtgaccaggagactcggcgcaaggcccgagaacaggccgcccgcctgaagaaactacaagagcaagagaaacaacagaaagtggagtttcgtaaaaggatggagaaggaggtgtcagatttcattcaagacagtgggcagatcaagaaaaagtttcagccaatgaacaagatcgagaggagcatactacatgatgtggtggaagtggctggcctgacatccttctcctttggggaagatgatgactgtcgctatgtcatgatcttcaaaaaggagtttgcaccctcagatgaagagctagactcttaccgtcgtggagaggaatgggacccccagaaggctgaggagaagcggaagctgaaggagctggcccagaggcaagaggaggaggcagcccagcaggggcctgtggtggtgagccctgccagcgactacaaggacaagtacagccacctcatcggcaagggagcagccaaagacgcagcccacatgctacaggccaataagacctacggctgtgtgcccgtggccaataagagggacacacgctccattgaagaggctatgaatgagatcagagccaagaagcgtctgcggcagagtggggaagagttgccgccaacctcctaggcgccccgcccagctccctttgacccctggggcagggcagggggcagggagagacaaggctgctgctattagagcccatcctggagccccacctctgaaccacctcctaccagctgtccctcaggctgggggaaaacaggtgtttgatttgtcaccgttggagcttggatatgtgcgtggcatgtgtgtgtgtgtgtgagagtgtgaatgcacaggtgggtatttaatctgtattattccccgttcttggaattttcttccccatggggctggggtactttacattcaataaatactgtttaaccc

SEQ ID NO: 185532 - DNA, 694 bp, Homo sapiens
  Payload ID: 16534
  Gene Symbol: SPAG7
  Gene Name: sperm associated antigen 7
  ENST ID: ENST00000575784
  CDS Start-End: 19-282
ggctccatcctgagctccatggagaagccacccagcctcggtgaccaggagactcggcgcaaggcccgagaacaggccgcccgcctgaagaaactacaagagcaagagaaacaacagaaagtggagtttcgtaaaaggatggagaaggaggtgtcagatttcattcaagacagtgggcagatcaagaaaaagtttcagccaatgaacaagatcgagaggagcatactccttatcccccctccccgaccaaggaatgaaatgaaacatttgtatggactctgaccccatcattctgctcttcttcaggagtttgcaccctcagatgaagagctagactcttaccgtcgtggagaggaatgggacccccagaaggctgaggagaagcggaagctgaaggagctggcccagaggcaagaggaggaggcagcccagcaggggcctgtggtggtgagccctgccagcgactacaaggacaagtacagccacctcatcggcaagggagcagccaaagacgcagcccacatgctacaggccaataagacctacggctgtgtgcccgtggccaataagagggacacacgctccattgaagaggctatgaatgagatcagagccaagaagcgtctgcggcagagtggggaagagttgccgccaacctcctaggcgccccgcccagctccctttgacccctggg

SEQ ID NO: 185533 - DNA, 1668 bp, Homo sapiens
  Payload ID: 16534
  Gene Symbol: SPAG7
  Gene Name: sperm associated antigen 7
  ENST ID: ENST00000573366
  CDS Start-End: 860-1390
tctgcctccctccgacaacctttttcccatccgtagccttaaattcccgagctgcccgggcggatcgtagtgttgattggagggatgagaatacccgccgggtccgattggccactgtctccgcctgcgttctcggagtagcttccctgcgggtgggctggagttcggcggccggcgtagggcgcggccctgcagggcggtgggagcctccccggggctgctcgtgttgcagcttgggatgatactggcggaacgcaggaccccaactcccaaacctgcggaccttgaccacggacgagccctgtcccagctccccacgtgccccagggggaccagagcaggcaggacgccttccaagtattcaagggccgctggttgcctacgcttcgtccccttgtttcttgaacaaccgttagggaccaggggtacccctcagggaggccacagtccggggctggggcgctcattgatgcagtgatcacacgtaagtttaataaccaacttgataagtgctctgagagaaaaataactgtgagagcggccacctgaggttctcccccaatctgcagtgagccgagatcagaacaggtaattccgtaaatgagagagagaagcaaagcgttacaggcagaagagtctatttgaaatctctgagaaaggaggaagcatgatgggaatggggaactggaattctctaatgctccgatgactgtctaagtgggggatcacccggcattgacagactgggaagcttaaatgagtcactcgcctgaggtcacatggttagtttgaacaggccgcccgcctgaagaaactacaagagcaagagaaacaacagaaagtggagtttcgtaaaaggatggagaaggaggtgtcagatttcattcaagacagtgggcagatcaagaaaaagtttcagccaatgaacaagatcgagaggagcatactacatgatgtggtggaagtggctggcctgacatccttctcctttggggaagatgatgactgtcgctatgtcatgatcttcaaaaaggagtttgcaccctcagatgaagagctagactcttaccgtcgtggagaggaatgggacccccagaaggctgaggagaagcggaagctgaaggagctggcccagaggcaagaggaggaggcagcccagcaggggcctgtggtggtgagccctgccagcgactacaaggacaagtacagccacctcatcggcaagggagcagccaaagacgcagcccacatgctacaggccaataagacctacggctgtgtgcccgtggccaataagagggacacacgctccattgaagaggctatgaatgagatcagagccaagaagcgtctgcggcagagtggggaagagttgccgccaacctcctaggcgccccgcccagctccctttgacccctggggcagggcagggggcagggagagacaaggctgctgctattagagcccatcctggagccccacctctgaaccacctcctaccagctgtccctcaggctgggggaaaacaggtgtttgatttgtcaccgttggagcttggatatgtgcgtggcatgtgtgtgtgtgtgtgagagtgtgaatgcacaggtgggtatttaatctgtattattccccgttcttggaattttcttccccatggggctggggtac

SEQ ID NO: 185534 - DNA, 1094 bp, Homo sapiens
  Payload ID: 16534
  Gene Symbol: SPAG7
  Gene Name: sperm associated antigen 7
  ENST ID: ENST00000575142
  CDS Start-End: 20-604
gggctccatcctgagctccatggagaagccacccagcctcggtgaccaggagactcggcgcaaggcccgagaacaggccgcccgcctgaagaaactacaagagcaagagaaacaacagaaagtggagtttcgtaaaaggatggagaaggaggtgtcagatttcattcaagacagtgggcagatcaagaaaaagtttcagccaatgaacaagatcgagaggagcatactacatgatgtggtggaagtggctggcctgacatccttctcctttggggaagatgatgactgtcgctatgtcatgatcttcaaaaaggagtttgcaccctcagatgaagagctagactcttaccgtcgtggagaggaatgggacccccagaaggctgaggagaagcggaagctgaaggagctggcccagaggcaagaggaggaggcagcccagcaggggcctgtggtggtgagccctgccagcgactacaaggacaagtacagccacctcatcggcaagggagcagccaaagacgcagcccacatgctacaggccaataagacctacggctgtggtgaggccacagtgcggctgggggtggctgggagaggagcataggatgcggcaggagggcagtggaggctgaggtacggatttctaggcccgccctaccctcctctctgcccctagtgcccgtggccaataagagggacacacgctccattgaagaggctatgaatgagatcagagccaagaagcgtctgcggcagagtggggaagagttgccgccaacctcctaggcgccccgcccagctccctttgacccctggggcagggcagggggcagggagagacaaggctgctgctattagagcccatcctggagccccacctctgaaccacctcctaccagctgtccctcaggctgggggaaaacaggtgtttgatttgtcaccgttggagcttggatatgtgcgtggcatgtgtgtgtgtgtgtgagagtgtgaatgcacaggtgggtatttaatctgtattattccccgttcttggaattttcttccccatggggctggggtactttacattcaataaatactgtttaacccaa

SEQ ID NO: 185535 - DNA, 1759 bp, Homo sapiens
  Payload ID: 16535
  Gene Symbol: SPAG8
  Gene Name: sperm associated antigen 8
  Uniprot ID: Q99932
  ENST ID: ENST00000340291
  CDS Start-End: 126-1631
gaagacttccgccccgcagaggacttgcctccaccgccacctgcaagtccgcccagctgtacttctgcgcaggctccaggagttgtttgctgtctctatggcaacccagtagctggagtctgaagatggagaccaacgagtctacggagggatcgcggtcgcggtcgcgatctttagacatacagcccagctccgaaggactggggcccacttcggaaccgtttccttcttcagatgacagtcccaggtcggccctggcagctgcaaccgcagcagctgcagcggctgcatcagctgctgcagctactgcagccttcaccactgccaaagcagctgcattatctacaaagaccccagcgccctgttctgagttcatggagccgtcctctgaccccagccttcttggggagccctgtgcgggacccggctttacccacaatatagcccatgggagtcttggctttgagcccgtctatgtttcctgtattgctcaggacacttgcactacaactgaccatagttctaatcctggccctgttccaggctctagctctgggcctgttcttggttccagctcaggtgctggccatggctctggctctggctctggtcctggctgtggctctgtccctggctctggctctggtcctggtcctggctctggtcctggctctggtcctggtcatggctctggctctcatcctggtcctgcctctgggcctggtccagacactggccctgactctgagctcagcccctgtattcctccagggttcagaaacctggtggcagatcgggtccctaactatacctcctggagtcagcactgcccctgggagccccagaaacaaccaccttgggaatttttgcaagtcttagaaccgggtgcccgaggactatggaaacccccagacattaaagggaagcttatggtttgctatgaaactttgccgcggggccagtgcctcctctacaactgggaggaagagagagccaccaaccacctggatcaagtcccaagcatgcaggatggctctgagagttttttcttccgacacggacaccggggactgctgactatgcaactaaagtcacccatgccctccagcaccacccagaaagactcgtaccagccaccaggaaacgtctattggccacttcgagggaagcgtgaagccatgctggagatgctcctgcagcatcagatctgtaaagaggtgcaggcagaacaggaacccacaaggaagctcttcgaggttgagtctgtgacacaccatgactaccgaatggagctggcacaagcagggactcctgccccaacaaagcctcacgactaccgccaggagcaacctgagaccttctggatacagagggcaccacagctgccgacatggtggccattgcccacccaggtaccagcagcagaagactatctgacttggaaagaatgggggtttacaggagtccaggaggtcctttccgctctcctaagagccacacctggtgaatactcagtaaacatttgcggaatgaatgaacaccctgtctgcagcaggacatggacaaataggctctgccatcaggaaatgggaagcaagaaaacggtaactcaagaggacagaggctggtgaggaggtaaagcaggcccagtgaaatggacctgacagcccaaactgtcagagaggaggaaagcaggcatttgattttggtaattgtgccaaagctatgtaagagaataaatgccattgttttaaggaaa

SEQ ID NO: 185536 - DNA, 1600 bp, Homo sapiens
  Payload ID: 16535
  Gene Symbol: SPAG8
  Gene Name: sperm associated antigen 8
  Uniprot ID: Q99932
  ENST ID: ENST00000396638
  CDS Start-End: 24-1481
aacccagtagctggagtctgaagatggagaccaacgagtctacggagggatcgcggtcgcggtcgcgatctttagacatacagcccagctccgaaggactggggcccacttcggaaccgtttccttcttcagatgacagtcccaggtcggccctggcagctgcaaccgcagcagctgcagcggctgcatcagctgctgcagctactgcagccttcaccactgccaaagcagctgcattatctacaaagaccccagcgccctgttctgagttcatggagccgtcctctgaccccagccttcttggggagccctgtgcgggacccggctttacccacaatatagcccatgggagtcttggctttgagcccgtctatgtttcctgtattgctcaggacacttgcactacaactgaccatagttctaatcctggccctgttccaggctctagctctgggcctgttcttggttccagctcaggtgctggccatggctctggctctggctctggtcctggctgtggctctgtccctggctctggctctggtcctggtcctggctctggtcctggctctggtcctggtcatggctctggctctcatcctggtcctgcctctgggcctggtccagacactggccctgactctgagctcagcccctgtattcctccagggttcagaaacctggtggcagatcgggtccctaactatacctcctggagtcagcactgcccctgggagccccagaaacaaccaccttgggaatttttgcaagtcttagaaccgggtgcccgaggactatggaaacccccagacattaaagggaagcttatggtttgctatgaaactttgccgcggggccagtgcctcctctacaactgggaggaagagagagccaccaaccacctggatcaagtcccaagcatgcaggatggctctgagagttttttcttccgacacggacaccggggactgctgactatgcaactaaagtcacccatgccctccagcaccacccagaaagactcgtaccagccaccaggaaacgtctattggccacttcgagggaagcgtgaagccatgctggagatgctcctgcagcatcagatctgtaaagaggtgcaggcagaacaggaacccacaaggaagctcttcgaggttgagtctgtgacacaccatgactaccgaatggagctggcacaagcagggactcctgccccaacaaagcctcacgactaccgccaggagcaacctgagaccttctggatacagagggcaccacagctgccgggtgtcagtaacatcaggacattggacacaccattccggaagaactgcagcttctcaacaccagtacccttgtctctggggaaacttttgccctatgaacctgagaattacccctaccaattgggagaaatatcttcccttccctgtcccggaggaaggctgggtggtggaggggggagaatgactcctttctgaggggtgaggagggaagtggggtatggaatatggaatctatttctgtctgcactagagaggtcgggaggaagttaattctcactgtacttgaagaggctttacataaagggttctctctc

SEQ ID NO: 185537 - DNA, 1553 bp, Homo sapiens
  Payload ID: 16535
  Gene Symbol: SPAG8
  Gene Name: sperm associated antigen 8
  ENST ID: ENST00000497810
  CDS Start-End: 1-1451
tggagaccaacgagtctacggagggatcgcggtcgcgatctttagacatacagcccagctccgaaggactggggcccacttcggaaccgtttccttcttcagatgacagtcccaggtcggccctggcagctgcaaccgcagcagctgcagcggctgcatcagctgctgcagctactgcagccttcaccactgccaaagcagctgcattatctacaaagaccccagcgccctgttctgagttcatggagccgtcctctgaccccagccttcttggggagccctgtgcgggacccggctttacccacaatatagcccatgggagtcttggctttgagcccgtctatgtttcctgtattgctcaggacacttgcactacaactgaccatagttctaatcctggccctgttccaggctctagctctgggcctgttcttggttccagctcaggtgctggccatggctctggctctggctctggtcctggctgtggctctgtccctggctctggctctggtcctggtcctggctctggtcctggctctggtcctggtcatggctctggctctcatcctggtcctgcctctgggcctggtccagacactggccctgactctgagctcagcccctgtattcctccagggttcagaaacctggtggcagatcgggtccctaactatacctcctggagtcagcactgcccctgggagccccagaaacaaccaccttgggaatttttgcaagtcttagaaccgggtgcccgaggactatggaaacccccagacattaaagggaagcttatggtttgctatgaaactttgccgcggggccagtgcctcctctacaactgggaggaagagagagccaccaaccacctggatcaagtcccaagcatgcaggatggctctgagagttttttcttccgacacggacaccggggactgctgactatgcaactaaagtcacccatgccctccagcaccacccagaaagactcgtaccagccaccaggaaacgtctattggccacttcgagggaagcgtgaagccatgctggagatgctcctgcagcatcagatctgtaaagaggtgcaggcagaacaggaacccacaaggaagctcttcgaggttgagtctgtgacacaccatgactaccgaatggagctggcacaagcagggactcctgccccaacaaagcctcacgactaccgccaggagcaacctgagaccttctggatacagagggcaccacagctgccgggtgtcagtaacatcaggacattggacacaccattccggaagaactgcagcttctcaacaccagtacccttgtctctggggaaacttttgccctatgaacctgagaattacccctaccaattgggagaaatatcttcccttccctgtcccggaggaaggctgggtggtggaggggggagaatgactcctttctgaggggtgaggagggaagtggggtatggaatatggaatctatttctgtctgcactagagaggtcgggaggaagttaattctcactgtacttgaagaggctttac

SEQ ID NO: 185538 - DNA, 1618 bp, Homo sapiens
  Payload ID: 16535
  Gene Symbol: SPAG8
  Gene Name: sperm associated antigen 8
  ENST ID: ENST00000484764
  CDS Start-End: 42-1475
gtttgctgtctctatggcaacccagtagctggagtctgaagatggagaccaacgagtctacggagggatcgcggtcgcgatctttagacatacagcccagctccgaaggactggggcccacttcggaaccgtttccttcttcagatgacagtcccaggtcggccctggcagctgcaaccgcagcagctgcagcggctgcatcagctgctgcagctactgcagccttcaccactgccaaagcagctgcattatctacaaagaccccagcgccctgttctgagttcatggagccgtcctctgaccccagccttcttggggagccctgtgcgggacccggctttacccacaatatagcccatgggagtcttggctttgagcccgtctatgtttcctgtattgctcaggacacttgcactacaactgaccatagttctaatcctggccctgttccaggctctagctctgggcctgttcttggttccagctcaggtgctggccatggctctggctctggctctggtcctggctgtggctctgtccctggctctggctctggtcctggtcctggctctggtcctggctctggtcctggtcatggctctggctctcatcctggtcctgcctctgggcctggtccagacactggccctgactctgagctcagcccctgtattcctccagggttcagaaacctggtggcagatcgggtccctaactatacctcctggagtcagcactgcccctgggagccccagaaacaaccaccttgggaatttttgcaagtcttagaaccgggtgcccgaggactatggaaacccccagacattaaagggaagcttatggtttgctatgaaactttgccgcggggccagtgcctcctctacaactgggaggaagagagagccaccaaccacctggatcaagtcccaagcatgcaggatggctctgagagttttttcttccgacacggacaccggggactgctgactatgcaactaaagtcacccatgccctccagcaccacccagaaagactcgtaccagccaccaggaaacgtctattggccacttcgagggaagcgtgaagccatgctggagatgctcctgcagcatcagatctgtaaagaggtgcaggcagaacaggaacccacaaggaagctcttcgaggttgagtctgtgacacaccatgactaccgaatggagctggcacaagcagggactcctgccccaacaaaggagcaacctgagaccttctggatacagagggcaccacagctgccgggtgtcagtaacatcaggacattggacacaccattccggaagaactgcagcttctcaacaccagtacccttgtctctggggaaacttttgccctatgaacctgagaattacccctaccaattgggagaaatatcttcccttccctgtcccggaggaaggctgggtggtggaggggggagaatgactcctttctgaggggtgaggagggaagtggggtatggaatatggaatctatttctgtctgcactagagaggtcgggaggaagttaattctcactgtacttgaagaggctttacataaagggttctctctcatcccaagactgctaatttagtga

SEQ ID NO: 185539 - DNA, 941 bp, Homo sapiens
  Payload ID: 16535
  Gene Symbol: SPAG8
  Gene Name: sperm associated antigen 8
  ENST ID: ENST00000472605
  CDS Start-End: 3-293
agatggagaccaacgagtctacggagggatcgcggtcgcggtcgcgatctttagacatacagcccagctccgaaggactggggcccacttcggaaccgtttccttcttcagatgacagtcccaggtcggccctggcagctgcaaccgcagcagctgcagcggctgcatcagctgctgcagctactgcagccttcaccactgccaaagcagctgcattatctacaaagaccccagcgccctgttctgagttcatggagccgtcctctgaccccagccttcttggggagccctagagccaccaaccacctggatcaagtcccaagcatgcaggatggctctgagagttttttcttccgacacggacaccggggactgctgactatgcaactaaagtcacccatgccctccagcaccacccagaaagactcgtaccagccaccaggaaacgtctattggccacttcgagggaagcgtgaagccatgctggagatgctcctgcagcatcagatctggtaagggattgggtaaaggggaagagggatggggaggagaaaaattgggtgagaatggccttgacacccctcgggctacatagtaaagaggtgcaggcagaacaggaacccacaaggaagctcttcgaggttgagtctgtgacacaccatgactaccgaatggagctggcacaagcagggactcctgccccaacaaaggtgagaacccaccccccatcccccgccacttgcaccagctgggctctgacaggctgtggccaagtaccaagcccagaggttgagagagagggctgaaggccaggagttactcagtaccctccctcacagcctcacgactaccgccaggagcaacctgagaccttctggatacagagggcaccacagctgccggtgtgtgagggtgactaggtgttgggggcagagcggggc

SEQ ID NO: 185540 - DNA, 2481 bp, Homo sapiens
  Payload ID: 16535
  Gene Symbol: SPAG8
  Gene Name: sperm associated antigen 8
  Uniprot ID: Q99932
  ENST ID: ENST00000475644
  CDS Start-End: 116-1396
gccccgcagaggacttgcctccaccgccacctgcaagtccgcccagctgtacttctgcgcaggctccaggagttgtttgctgtctctatggcaacccagtagctggagtctgaagatggagaccaacgagtctacggagggatcgcggtcgcggtcgcgatctttagacatacagcccagctccgaaggactggggcccacttcggaaccgtttccttcttcagatgacagtcccaggtcggccctggcagctgcaaccgcagcagctgcagcggctgcatcagctgctgcagctactgcagccttcaccactgccaaagcagctgcattatctacaaagaccccagcgccctgttctgagttcatggagccgtcctctgaccccagccttcttggggagccctgtgcgggacccggctttacccacaatatagcccatgggagtcttggctttgagcccgtctatgtttcctgtattgctcaggacacttgcactacaactgaccatagttctaatcctggccctgttccaggctctagctctgggcctgttcttggttccagctcaggtgctggccatggctctggctctggctctggtcctggctgtggctctgtccctggctctggctctggtcctggtcctggctctggtcctggctctggtcctggtcatggctctggctctcatcctggtcctgcctctgggcctggtccagacactggccctgactctgagctcagcccctgtattcctccagggttcagaaacctggtggcagatcgggtccctaactatacctcctggagtcagcactgcccctgggagccccagaaacaaccaccttgggaatttttgcaagtcttagaaccgggtgcccgaggactatggaaacccccagacattaaagggaagcttatggtttgctatgaaactttgccgcggggccagtgcctcctctacaactgggaggaagagagagccaccaaccacctggatcaagtcccaagcatgcaggatggctctgagagttttttcttccgacacggacaccggggactgctgactatgcaactaaagtcacccatgccctccagcaccacccagaaagactcgtaccagccaccaggaaacgtctattggccacttcgagggaagcgtgaagccatgctggagatgctcctgcagcatcagatctgtaaagaggtgcaggcagaacaggaacccacaaggaagctcttcgaggttgagtctgtgacacaccatgactaccgaatggagctggcacaagcagggactcctgccccaacaaagcctcacgactaccgccaggagcaacctgagaccttctggatacagagggcaccacagctgccggtgtgtgagggtgactaggtgttgggggcagagcggggcaggaaaggtagggcagagttgttttgttctggcttggggagagtgggatccatcctcatcctggcactcctccagggtgtcagtaacatcaggacattggacacaccattccggaagaactgcagcttctcaacaccagtacccttgtctctggggaaacttttgccctatgaacctgagaattacccctaccaattgggagaaatatcttcccttccctgtcccggaggaaggctgggtggtggaggggggagaatgactcctttctgaggggtgaggagggaagtggggtatggaatatggaatctatttctgtctgcactagagaggtcgggaggaagttaattctcactgtacttgaagaggctttacataaagggttctctctcatcccaagactgctaatttagtgattctgtgagtcactgtgtgcataccccataacctttccttgggattgcccctatcccacactatgacatcagaactttttttattattgttttatatttgaccaaaatattctggtttagatacagatatttacagaaagtagggaggaaggggaccaagccagagagggacaggtatatgtacagggctgagctgcagagggctacaacttccatataaggtaggtttttttgtggctgttttccattgcatatgaaaatgtccatttctggtgtgtgcagacatggtggccattgcccacccaggtaccagcagcagaagactatctgacttggaaagaatgggggtttacaggagtccaggaggtcctttccgctctcctaagagccacacctggtgaatactcagtaaacatttgcggaatgaatgaacaccctgtctgcagcaggacatggacaaataggctctgccatcaggaaatgggaagcaagaaaacggtaactcaagaggacagaggctggtgaggaggtaaagcaggcccagtgaaatggacctgacagcccaaactgtcagagaggaggaaagcaggcatttgattttggtaattgtgccaaagctatgtaagagaataaatgccattgttttaagga

SEQ ID NO: 185541 - DNA, 752 bp, Homo sapiens
  Payload ID: 16535
  Gene Symbol: SPAG8
  Gene Name: sperm associated antigen 8
  ENST ID: ENST00000471631
  CDS Start-End: 29-238
atggcaacccagtagctggagtctgaagatggagaccaacgagtctacggagggatcgcggtcgcggtcgcgatctttagacatacagcccagctccgaaggactggggcccacttcggaaccgtttccttcttcagatgacagtcccagagagccaccaaccacctggatcaagtcccaagcatgcaggatggctctgagagttttttcttccgacacggacaccggggactgctgactatgcaactaaagtcacccatgccctccagcaccacccagaaagactcgtaccagccaccaggaaacgtctattggccacttcgagggaagcgtgaagccatgctggagatgctcctgcagcatcagatctggtaagggattgggtaaaggggaagagggatggggaggagaaaaattgggtgagaatggccttgacacccctcgggctacatagtaaagaggtgcaggcagaacaggaacccacaaggaagctcttcgaggttgagtctgtgacacaccatgactaccgaatggagctggcacaagcagggactcctgccccaacaaaggtgagaacccaccccccatcccccgccacttgcaccagctgggctctgacaggctgtggccaagtaccaagcccagaggttgagagagagggctgaaggccaggagttactcagtaccctccctcacagcctcacgactaccgccaggagcaacctgagaccttctggatacagagggcacca

SEQ ID NO: 185542 - DNA, 759 bp, Homo sapiens
  Payload ID: 16535
  Gene Symbol: SPAG8
  Gene Name: sperm associated antigen 8
  ENST ID: ENST00000495667
  CDS Start-End: 27-236
ggcaacccagtagctggagtctgaagatggagaccaacgagtctacggagggatcgcggtcgcggtcgcgatctttagacatacagcccagctccgaaggactggggcccacttcggaaccgtttccttcttcagatgacagtcccagagagccaccaaccacctggatcaagtcccaagcatgcaggatggctctgagagttttttcttccgacacggacaccggggactgctgactatgcaactaaagtcacccatgccctccagcaccacccagaaagactcgtaccagccaccaggaaacgtctattggccacttcgagggaagcgtgaagccatgctggagatgctcctgcagcatcagatctggtaagggattgggtaaaggggaagagggatggggaggagaaaaattgggtgagaatggccttgacacccctcgggctacatagtaaagaggtgcaggcagaacaggaacccacaaggaagctcttcgaggttgagtctgtgacacaccatgactaccgaatggagctggcacaagcagggactcctgccccaacaaagcctcacgactaccgccaggagcaacctgagaccttctggatacagagggcaccacagctgccgggtgtcagtaacatcaggacattggacacaccattccggaagaactgcagcttctcaacaccagtacccttgtctctggggaaacttttgccctatgaacctgagaattacccctaccaattgggagaa

SEQ ID NO: 185543 - DNA, 8273 bp, Homo sapiens
  Payload ID: 16536
  Gene Symbol: SPAG9
  Gene Name: sperm associated antigen 9
  Uniprot ID: O60271
  ENST ID: ENST00000262013
  CDS Start-End: 210-4175
agttggtgcagcggcggttggggtgagagcgcctacgccacccctcccctcctccggccccggcccccaccccgccgggcccagccccagccccggcccgggctccagccctagtacccgtcccagcccgagtcgggtccgtcccgtgcgggcaggtgccgcccctctgccggcgacgccccgggccgcccgcccgtccgcttgccaccatggagctggaggacggtgtggtgtatcaggaggagcccggcggctccggggccgtgatgtcggagcgggtgtccggcctggccggctccatctaccgcgagttcgagcggcttatcgggcgctatgacgaggaggtggtcaaagagctgatgccgctggtggtggctgtgctggagaacctggactcggtgttcgcgcaggaccaggagcaccaggtggagctggagctgctgcgggacgacaacgagcagctcatcacccagtacgagcgggagaaggcgctgcgcaagcacgctgaggagaaattcattgaatttgaagactctcaagaacaggaaaaaaaggacttacagacccgagtggaatctttagaatctcaaacaagacaacttgagctgaaagcgaaaaactatgctgaccagattagcagacttgaagaaagagaagcagaactgaagaaggaatataatgcattacatcaaagacacactgagatgatccataattatatggaacatttagaaagaacaaaacttcatcagctctcagggagtgatcaactagaatccacagctcatagtagaattagaaaagaacgccctatatcattaggaattttcccattacctgctggagatggattgcttacacctgatgctcagaaaggaggagagacccctggatctgagcaatggaaatttcaggaattaagtcaaccacgttctcataccagcctgaaggtcagcaatagtcctgaacctcagaaggctgtagaacaggaggatgagctttctgatgttagccaaggcggatctaaagctaccactccagcatcaacagctaattcagatgtggcaacaattcctactgatactcccttaaaggaagaaaacgaaggatttgtgaaggttacagatgcgccaaataaatcagagataagcaaacacattgaagtacaggtagcccaggaaactagaaatgtatctactggctctgctgaaaatgaagaaaagtcagaagttcaagcaatcatcgaatctactcctgagctggatatggacaaagatctcagtggatataaaggttcaagcactcccaccaaaggcatagagaacaaagcttttgatcgcaatacagaatctctctttgaagaactgtcttcagctggctcaggcctaataggagatgtggatgaaggagcagatttactaggaatgggtcgggaagttgagaatcttatattagaaaatacacaactgttggaaaccaaaaatgctttgaacatagtgaagaatgatttgatagcaaaagtggatgaactgacctgtgagaaagatgtgctgcaaggggaattggaggctgtgaagcaagccaaactgaaactagaggaaaagaacagagaattggaggaagagcttaggaaagctcgggcagaagctgaagatgcaaggcaaaaagcaaaagatgacgatgatagtgatattcccacagcccagaggaaacggtttactagagtagaaatggcccgtgttctcatggagcgaaaccagtataaagagagattgatggagcttcaggaagctgttcgatggacagagatgattcgggcatcacgagaaaatccagccatgcaggaaaaaaaaaggtcaagcatttggcagtttttcagccgacttttcagctcctcaagtaacacgactaagaagcctgaaccacctgttaatctgaagtacaatgcacccacgtctcatgttactccgtccgtcaagaaaagaagcagcaccttatctcagctccctggggataagtccaaagcctttgatttccttagtgaagaaactgaagctagtttagcctcacgcagagaacaaaagagagagcagtatcgtcaggtaaaagcacatgttcagaaggaagacggtagagtgcaggcttttggctggagtctgcctcagaagtacaaacaggtaaccaatggtcaaggtgaaaataagatgaaaaatttacctgtgcctgtctatctcagacctctggatgaaaaagatacatcaatgaagctgtggtgtgctgttggagtcaatttatctggtgggaagaccagagatggtggttctgttgttggagcaagtgtattttacaaggatgttgctggtttggatacagaaggcagtaaacagcgaagtgcctctcagagtagtttagataagttagatcaggaacttaaggaacagcagaaggagttaaaaaatcaagaagaattatccagtctagtttggatctgtaccagcactcattcggctacaaaagttcttattattgatgctgttcaacctggcaacatcctagacagtttcactgtttgcaactctcatgttctgtgcattgcaagtgtgccaggtgcacgagaaacagactaccctgcaggagaagatctttcagaatctggtcaggtagacaaagcatctttatgtggaagtatgacaagcaacagctcagcagagacagacagcctgttaggaggcatcacagtggttggttgttctgcagaaggtgtgacgggagctgccacttcccctagtacaaatggtgcttctccagtgatggataaaccaccagaaatggaagcagaaaatagtgaggttgatgaaaatgttccaacagcagaagaagcaactgaagctacagaagggaatgcggggtcagctgaagacacagtggacatctcccaaactggcgtctacacagagcatgtctttacagatcctttgggagttcagatcccagaagacctctccccagtgtatcagtcgagcaatgactcagatgcatataaagatcaaatatcagtactgccaaatgaacaagacttggtgagagaagaagcccagaaaatgagtagtcttttaccaactatgtggcttggagctcaaaatggctgtttgtatgtccattcatctgtagcccagtggaggaaatgtctccattccattaaacttaaagattcgattctcagtattgtacacgtgaagggaatcgtgttagtagccctggctgacggcacccttgcaatctttcacagaggagtggatgggcagtgggatttgtcaaactatcacctcttagaccttggacggcctcatcattccatccgttgcatgactgtggtacatgacaaagtctggtgtggctataggaacaaaatctatgtggtgcagccaaaggccatgaaaatagagaaatcttttgatgcacatcccaggaaggagagccaagtgcgacagcttgcgtgggtgggggatggcgtgtgggtctccattcgcttggattctacgctccgtctctatcatgcacacacttatcaacatctacaggatgtggacattgagccttatgtaagcaaaatgttaggtactggaaaactgggcttctcttttgtgagaattacagctcttatggtgtcttgtaatcgtttgtgggtggggacaggaaatggtgtcattatctccatcccattgacagaaacaaataaaacctcaggtgtaccaggaaatcgtcctggaagtgtaatccgtgtatatggtgatgaaaacagtgataaagtgactccagggacatttataccctattgttcaatggcacatgcacagctttgcttccatgggcaccgggatgctgtgaaattctttgtggcagtcccaggtcaagtcatcagcccacaaagtagcagtagtggcacggatctgacgggtgacaaagcagggccatctgcacaggagcctggtagtcagacgcccttgaagtctatgcttgtcatcagtggaggagagggctacatcgacttccgaatgggtgatgaaggtggagaatcagaacttcttggagaggatcttccacttgaaccttctgtcaccaaagcagaaaggagtcacttgatagtgtggcaagtgatgtatggcaatgagtgagcccatgggaaacaggtggagatggggaagccgtctcttctgcatggtttattttccctctatccttttatttaatgctcttttgtgagataagtttcaccacataatgtgtgagcattttttcctgttaactttatattacaaaatccgttctaccataacaatacagaggaactagctgtgttactgcaccagtgttataggtaacttcagtatattatgaacaaatcaaagaatgtttacttcctgcaaactggtgaattatagaaagcaatccagatgtggtttactctgccacagtctaatgtcattcacttcatttgatggggtcacttgttagctgtcactaataatggaattaatgggaaacacttgataaatgaaactgtaccgttaaatacaatagctgagttttccccagtgtattgtaaaattgacacacactaatacaagatggattatcaggatgtatctaaatgtcccgagagggttaaaagctaactgtaaattactttaactttcactttcaaatctgacaaatcttgtttatatggtatataaaactttgttttcatcagatttgggggggttttatattaaagaaattaagactacactatttaaataaacgtttcctgtttctgacttattagagctctaaagtttatgaggcctacttctctgaatattctgatgggttttttttgagaccagtctcattttcatactgacatgtctgaaagatttattatttataaagcttaggacatactctgggaagcttagaagatacttcagcactgggaggattttttaaaggaaatgtgttttgtatttcttgtaccagagaatggtgatgttgattgagttttttccatgtaaaaaatgtacttgtttgccaaatgttcctagattgctcttaacctgttaatacaagtaaaactgtagtggggatggagtctggcctaagtacagaatgagggatttaattagaaaagttattttcttttgttctgtatcaaactgcagaacagctatatacttggtattttgtacgtgaataacgttttagcttttgtgcccttttgagcttgaagggttatcctcaaaggggaaaactatgaaggggaagaagacaaacctaagataccataaagtaaaggttgacattacatattttcattcacaatgcccattaaaaaaaaaaaataggttgggcatggtggctcacgcctgtaatcccaacactttaggaggctgaggcagatggattgcttgagcccaggagttcaagaccagcctgggcaacatggcgaaaccctgtctctaccaaaaaaaaaaaacaaaataaattaaccgggtgtggtggcacatgcctgtagtcccagctacttgggaggctgaggtgggaggatgacctgggcccaggaggtggaggttgcagtgagccttgatagcaccactgcactccagcctgggtgacggagcaagaccctgtctcaaaacagacaaacaagcaaaaaatagattaaagtctggatttcactgattttcttgcttaataagttttttaaaaccacgatgctgcaattttttccctctcaagcttcttgaaaatgtgtgatttacccttttttatctattactctaggcaaagctaaatatgatttttttttttttttttgagacggagtctggctctgttgcccaggctggaatgcagtggtgcgatctcagctcactgcaacctccacctctcaggttcaagtagttctcctgcctcagcctcccaagtagctgggattacaggtgtgtgccaccctgcccagctaatttttgtatttttagtagagacagggtttcaccacattggccaggctggtctcaaactcctgacctcagatgatctacccgccttggcctcccgaagtgcttgaattacaggcgtgagcccccgcgccggtccgaagcaaagctaaatgtaattttatgtactgttttaacagtataaacctatgggataaaggcccccaatcatcagaaggactactgaaaagaaaagaaagcaaacgtagatgtcaaattgtctaaacattcttaagtaccactgattttttttttctggactattatacaaagatgtctgtaaaaagtataccagtggcttttatgcatatacacgattaggctagattgtgaagtacatgggatttcatgagccagaggaggcatttggatccattgggccacatgtgactataagcacattgtgtacacaataaaattgtagccactcatgtattaaaactgttttggtaaaagctgtattaaaagaataattttttgcttgagctacttagtcacttttttgcagggcaccaaaatgtaggctacttttccatagcttgtttgctatgtttttatttcatcttaaatctgagccatttttggcaatatcttttaaaaaatcattattaaacatttattggaaatgttgtatagattcacaagaaagagacaccaaagtgtttgggaattttaatcccaagaagtaaacatcccagagtcagatcccatttgctgttgttcagccatgtttgtatgactgaatgtaatttaggaaatcaggagttagagatgaaaaatacaaacatgtcaaatggttgtaattgctttttttgaacttactggctttaacttaagtaatataggtgtgtagttgttttatctaaagatgtcagattatctgtggccctgttaattaactgcagggaccagagagaggacaaaaatgcctgtataatttgctttaaaggcttgtccttatgtttgtaatttcagttaaatattttctacagattgcttcacttcccctttcccccaataacaagttcatattcttgtaatgtttactttggtcaacgtggtaatttttggaagaaaatgccaaaatgtaagcttctcacaagcagcaaaggaatgtaactgcctgtagctaccacatcaagggagagaagaggcttgcgtactttgggttgatctcactgtacaaaaaaagtgtacccctattggaagaaataaggaatacttgaaggtttctcctttttttacacttgagtcatgtgcaaggttgaaccatatgaaattgccagtgttcaaccattgctgatctgcaaaagcgacaatatcatatgcctcaacctaacacttactcttaaatgcaggttaaaatctctgtgaggcaaagggataatattctctaggaactcacttttgagagtatttttctctaacccatgtggatctaaattttaaaaataggaatgaatctcttaattgcagcttgtggagagtataaaacattttgagcacaatatgcagcacataacttttcagattgtgtttgcatagaaaaggttaaaatcaattctttcagttactgtattgttcatttcttgtaaaggtcttcctacatttgagacgagaccctttaacataggctgccttagtaacaaaataaaacagatgtgtcataatattaactgtcctaaagaacatgtgtcttgcaaatgccatggaactgaatatttatttccttgtgagtattatgaccgttaccaaaggactcaaccagatttagggctcttcttaattgatcatgttcagaaagggactcatttggtcccactttgtaacatgggaagagtagaagagaaaattaaatgtggaaatcataaatgcttttctaacagggttatgctattctgtaacactaaatgtctgtcttttctcttaaaagattaagttttattaattttgtcatacatttctctatttgaatatatcttaaccattttatgttccaaattcgttttttgtccaagacattctatcagaattttacttgcctctataatctgaaaaatgggttctagaatgtcccacttgctgtctcttagaggctgagcttcatttctatgagcaaagagctcatttagcaatgtagttatttcagtatttatttctattatggaatccctggggttcagaatgtaactttgtacatgagatatatataaatatgtatatgaacatgta

SEQ ID NO: 185544 - DNA, 4761 bp, Homo sapiens
  Payload ID: 16536
  Gene Symbol: SPAG9
  Gene Name: sperm associated antigen 9
  Uniprot ID: O60271
  ENST ID: ENST00000357122
  CDS Start-End: 210-4133
agttggtgcagcggcggttggggtgagagcgcctacgccacccctcccctcctccggccccggcccccaccccgccgggcccagccccagccccggcccgggctccagccctagtacccgtcccagcccgagtcgggtccgtcccgtgcgggcaggtgccgcccctctgccggcgacgccccgggccgcccgcccgtccgcttgccaccatggagctggaggacggtgtggtgtatcaggaggagcccggcggctccggggccgtgatgtcggagcgggtgtccggcctggccggctccatctaccgcgagttcgagcggcttatcgggcgctatgacgaggaggtggtcaaagagctgatgccgctggtggtggctgtgctggagaacctggactcggtgttcgcgcaggaccaggagcaccaggtggagctggagctgctgcgggacgacaacgagcagctcatcacccagtacgagcgggagaaggcgctgcgcaagcacgctgaggagaaattcattgaatttgaagactctcaagaacaggaaaaaaaggacttacagacccgagtggaatctttagaatctcaaacaagacaacttgagctgaaagcgaaaaactatgctgaccagattagcagacttgaagaaagagaagcagaactgaagaaggaatataatgcattacatcaaagacacactgagatgatccataattatatggaacatttagaaagaacaaaacttcatcagctctcagggagtgatcaactagaatccacagctcatagtagaattagaaaagaacgccctatatcattaggaattttcccattacctgctggagatggattgcttacacctgatgctcagaaaggaggagagacccctggatctgagcaatggaaatttcaggaattaagtcaaccacgttctcataccagcctgaaggatgagctttctgatgttagccaaggcggatctaaagctaccactccagcatcaacagctaattcagatgtggcaacaattcctactgatactcccttaaaggaagaaaacgaaggatttgtgaaggttacagatgcgccaaataaatcagagataagcaaacacattgaagtacaggtagcccaggaaactagaaatgtatctactggctctgctgaaaatgaagaaaagtcagaagttcaagcaatcatcgaatctactcctgagctggatatggacaaagatctcagtggatataaaggttcaagcactcccaccaaaggcatagagaacaaagcttttgatcgcaatacagaatctctctttgaagaactgtcttcagctggctcaggcctaataggagatgtggatgaaggagcagatttactaggaatgggtcgggaagttgagaatcttatattagaaaatacacaactgttggaaaccaaaaatgctttgaacatagtgaagaatgatttgatagcaaaagtggatgaactgacctgtgagaaagatgtgctgcaaggggaattggaggctgtgaagcaagccaaactgaaactagaggaaaagaacagagaattggaggaagagcttaggaaagctcgggcagaagctgaagatgcaaggcaaaaagcaaaagatgacgatgatagtgatattcccacagcccagaggaaacggtttactagagtagaaatggcccgtgttctcatggagcgaaaccagtataaagagagattgatggagcttcaggaagctgttcgatggacagagatgattcgggcatcacgagaaaatccagccatgcaggaaaaaaaaaggtcaagcatttggcagtttttcagccgacttttcagctcctcaagtaacacgactaagaagcctgaaccacctgttaatctgaagtacaatgcacccacgtctcatgttactccgtccgtcaagaaaagaagcagcaccttatctcagctccctggggataagtccaaagcctttgatttccttagtgaagaaactgaagctagtttagcctcacgcagagaacaaaagagagagcagtatcgtcaggtaaaagcacatgttcagaaggaagacggtagagtgcaggcttttggctggagtctgcctcagaagtacaaacaggtaaccaatggtcaaggtgaaaataagatgaaaaatttacctgtgcctgtctatctcagacctctggatgaaaaagatacatcaatgaagctgtggtgtgctgttggagtcaatttatctggtgggaagaccagagatggtggttctgttgttggagcaagtgtattttacaaggatgttgctggtttggatacagaaggcagtaaacagcgaagtgcctctcagagtagtttagataagttagatcaggaacttaaggaacagcagaaggagttaaaaaatcaagaagaattatccagtctagtttggatctgtaccagcactcattcggctacaaaagttcttattattgatgctgttcaacctggcaacatcctagacagtttcactgtttgcaactctcatgttctgtgcattgcaagtgtgccaggtgcacgagaaacagactaccctgcaggagaagatctttcagaatctggtcaggtagacaaagcatctttatgtggaagtatgacaagcaacagctcagcagagacagacagcctgttaggaggcatcacagtggttggttgttctgcagaaggtgtgacgggagctgccacttcccctagtacaaatggtgcttctccagtgatggataaaccaccagaaatggaagcagaaaatagtgaggttgatgaaaatgttccaacagcagaagaagcaactgaagctacagaagggaatgcggggtcagctgaagacacagtggacatctcccaaactggcgtctacacagagcatgtctttacagatcctttgggagttcagatcccagaagacctctccccagtgtatcagtcgagcaatgactcagatgcatataaagatcaaatatcagtactgccaaatgaacaagacttggtgagagaagaagcccagaaaatgagtagtcttttaccaactatgtggcttggagctcaaaatggctgtttgtatgtccattcatctgtagcccagtggaggaaatgtctccattccattaaacttaaagattcgattctcagtattgtacacgtgaagggaatcgtgttagtagccctggctgacggcacccttgcaatctttcacagaggagtggatgggcagtgggatttgtcaaactatcacctcttagaccttggacggcctcatcattccatccgttgcatgactgtggtacatgacaaagtctggtgtggctataggaacaaaatctatgtggtgcagccaaaggccatgaaaatagagaaatcttttgatgcacatcccaggaaggagagccaagtgcgacagcttgcgtgggtgggggatggcgtgtgggtctccattcgcttggattctacgctccgtctctatcatgcacacacttatcaacatctacaggatgtggacattgagccttatgtaagcaaaatgttaggtactggaaaactgggcttctcttttgtgagaattacagctcttatggtgtcttgtaatcgtttgtgggtggggacaggaaatggtgtcattatctccatcccattgacagaaacaaataaaacctcaggtgtaccaggaaatcgtcctggaagtgtaatccgtgtatatggtgatgaaaacagtgataaagtgactccagggacatttataccctattgttcaatggcacatgcacagctttgcttccatgggcaccgggatgctgtgaaattctttgtggcagtcccaggtcaagtcatcagcccacaaagtagcagtagtggcacggatctgacgggtgacaaagcagggccatctgcacaggagcctggtagtcagacgcccttgaagtctatgcttgtcatcagtggaggagagggctacatcgacttccgaatgggtgatgaaggtggagaatcagaacttcttggagaggatcttccacttgaaccttctgtcaccaaagcagaaaggagtcacttgatagtgtggcaagtgatgtatggcaatgagtgagcccatgggaaacaggtggagatggggaagccgtctcttctgcatggtttattttccctctatccttttatttaatgctcttttgtgagataagtttcaccacataatgtgtgagcattttttcctgttaactttatattacaaaatccgttctaccataacaatacagaggaactagctgtgttactgcaccagtgttataggtaacttcagtatattatgaacaaatcaaagaatgtttacttcctgcaaactggtgaattatagaaagcaatccagatgtggtttactctgccacagtctaatgtcattcacttcatttgatggggtcacttgttagctgtcactaataatggaattaatgggaaacacttgataaatgaaactgtaccgttaaatacaatagctgagttttccccagtgtattgtaaaattgacacacactaatacaagatggattatcaggatgtatctaaatgtcccgagagggttaaaagctaactgtaaattactttaactttcactttcaaatctgacaaatcttgtttatatggtatataaaactttgttttcatcagatttgggggggttttatattaaagaaattaagactacactatttaaataa

SEQ ID NO: 185545 - DNA, 4949 bp, Homo sapiens
  Payload ID: 16536
  Gene Symbol: SPAG9
  Gene Name: sperm associated antigen 9
  Uniprot ID: O60271
  ENST ID: ENST00000510283
  CDS Start-End: 219-3752
gcataaatgctaggagcagcagctctatggttatgaggtggggagaacggaatgacgtcatcgcttgggagctgctgcaggatggagtggaaagctgctgctgatggcattgtttttgtggcagcaagctgaatgacagatcctcactacaaagatacccctttggcccccgtgtaggcctccttggttcgggtgtttcaccatgccagcacagcgccatgagtcctggatgcatgctgctgtttgtgtttggctttgttggcggggcggtggtcattaattctgctatcttagtatctctctctgttttgctgcttgtgcacttttctatttctaccggtgtgccagctctgacgcagaacctaccaaggatactcagaaaagaacgccctatatcattaggaattttcccattacctgctggagatggattgcttacacctgatgctcagaaaggaggagagacccctggatctgagcaatggaaatttcaggaattaagtcaaccacgttctcataccagcctgaaggatgagctttctgatgttagccaaggcggatctaaagctaccactccagcatcaacagctaattcagatgtggcaacaattcctactgatactcccttaaaggaagaaaacgaaggatttgtgaaggttacagatgcgccaaataaatcagagataagcaaacacattgaagtacaggtagcccaggaaactagaaatgtatctactggctctgctgaaaatgaagaaaagtcagaagttcaagcaatcatcgaatctactcctgagctggatatggacaaagatctcagtggatataaaggttcaagcactcccaccaaaggcatagagaacaaagcttttgatcgcaatacagaatctctctttgaagaactgtcttcagctggctcaggcctaataggagatgtggatgaaggagcagatttactaggaatgggtcgggaagttgagaatcttatattagaaaatacacaactgttggaaaccaaaaatgctttgaacatagtgaagaatgatttgatagcaaaagtggatgaactgacctgtgagaaagatgtgctgcaaggggaattggaggctgtgaagcaagccaaactgaaactagaggaaaagaacagagaattggaggaagagcttaggaaagctcgggcagaagctgaagatgcaaggcaaaaagcaaaagatgacgatgatagtgatattcccacagcccagaggaaacggtttactagagtagaaatggcccgtgttctcatggagcgaaaccagtataaagagagattgatggagcttcaggaagctgttcgatggacagagatgattcgggcatcacgagaaaatccagccatgcaggaaaaaaaaaggtcaagcatttggcagtttttcagccgacttttcagctcctcaagtaacacgactaagaagcctgaaccacctgttaatctgaagtacaatgcacccacgtctcatgttactccgtccgtcaagaaaagaagcagcaccttatctcagctccctggggataagtccaaagcctttgatttccttagtgaagaaactgaagctagtttagcctcacgcagagaacaaaagagagagcagtatcgtcaggtaaaagcacatgttcagaaggaagacggtagagtgcaggcttttggctggagtctgcctcagaagtacaaacaggtaaccaatggtcaaggtgaaaataagatgaaaaatttacctgtgcctgtctatctcagacctctggatgaaaaagatacatcaatgaagctgtggtgtgctgttggagtcaatttatctggtgggaagaccagagatggtggttctgttgttggagcaagtgtattttacaaggatgttgctggtttggatacagaaggcagtaaacagcgaagtgcctctcagagtagtttagataagttagatcaggaacttaaggaacagcagaaggagttaaaaaatcaagaagaattatccagtctagtttggatctgtaccagcactcattcggctacaaaagttcttattattgatgctgttcaacctggcaacatcctagacagtttcactgtttgcaactctcatgttctgtgcattgcaagtgtgccaggtgcacgagaaacagactaccctgcaggagaagatctttcagaatctggtcaggtagacaaagcatctttatgtggaagtatgacaagcaacagctcagcagagacagacagcctgttaggaggcatcacagtggttggttgttctgcagaaggtgtgacgggagctgccacttcccctagtacaaatggtgcttctccagtgatggataaaccaccagaaatggaagcagaaaatagtgaggttgatgaaaatgttccaacagcagaagaagcaactgaagctacagaagggaatgcggggtcagctgaagacacagtggacatctcccaaactggcgtctacacagagcatgtctttacagatcctttgggagttcagatcccagaagacctctccccagtgtatcagtcgagcaatgactcagatgcatataaagatcaaatatcagtactgccaaatgaacaagacttggtgagagaagaagcccagaaaatgagtagtcttttaccaactatgtggcttggagctcaaaatggctgtttgtatgtccattcatctgtagcccagtggaggaaatgtctccattccattaaacttaaagattcgattctcagtattgtacacgtgaagggaatcgtgttagtagccctggctgacggcacccttgcaatctttcacagaggagtggatgggcagtgggatttgtcaaactatcacctcttagaccttggacggcctcatcattccatccgttgcatgactgtggtacatgacaaagtctggtgtggctataggaacaaaatctatgtggtgcagccaaaggccatgaaaatagagaaatcttttgatgcacatcccaggaaggagagccaagtgcgacagcttgcgtgggtgggggatggcgtgtgggtctccattcgcttggattctacgctccgtctctatcatgcacacacttatcaacatctacaggatgtggacattgagccttatgtaagcaaaatgttaggtactggaaaactgggcttctcttttgtgagaattacagctcttatggtgtcttgtaatcgtttgtgggtggggacaggaaatggtgtcattatctccatcccattgacagaaaccgtaatcctccaccagggacgtttactggggctgagggcaaataaaacctcaggtgtaccaggaaatcgtcctggaagtgtaatccgtgtatatggtgatgaaaacagtgataaagtgactccagggacatttataccctattgttcaatggcacatgcacagctttgcttccatgggcaccgggatgctgtgaaattctttgtggcagtcccaggtcaagtcatcagcccacaaagtagcagtagtggcacggatctgacgggtgacaaagcagggccatctgcacaggagcctggtagtcagacgcccttgaagtctatgcttgtcatcagtggaggagagggctacatcgacttccgaatgggtgatgaaggtggagaatcagaacttcttggagaggatcttccacttgaaccttctgtcaccaaagcagaaaggagtcacttgatagtgtggcaagtgatgtatggcaatgagtgagcccatgggaaacaggtggagatggggaagccgtctcttctgcatggtttattttccctctatccttttatttaatgctcttttgtgagataagtttcaccacataatgtgtgagcattttttcctgttaactttatattacaaaatccgttctaccataacaatacagaggaactagctgtgttactgcaccagtgttataggtaacttcagtatattatgaacaaatcaaagaatgtttacttcctgcaaactggtgaattatagaaagcaatccagatgtggtttactctgccacagtctaatgtcattcacttcatttgatggggtcacttgttagctgtcactaataatggaattaatgggaaacacttgataaatgaaactgtaccgttaaatacaatagctgagttttccccagtgtattgtaaaattgacacacactaatacaagatggattatcaggatgtatctaaatgtcccgagagggttaaaagctaactgtaaattactttaactttcactttcaaatctgacaaatcttgtttatatggtatataaaactttgttttcatcagatttgggggggttttatattaaagaaattaagactacactatttaaataaacgtttcctgtttctgacttattagagctctaaagtttatgaggcctacttctctgaatattctgatgggttttttttgagaccagtctcattttcatactgacatgtctgaaagatttattatttataaagcttaggacatactctgggaagcttagaagatacttcagcactgggaggattttttaaaggaaatgtgttttgtatttcttgtaccagagaatggtgatgttgattgagttttttccatgtaaaaaatgtacttgtttgccaaatgttcctagattgctcttaacctgttaatacaagtaaaactgtagtggggatggagtctggcctaagtacagaatgagggatttaattagaaaagttattttcttttgttctgtatcaaactgcagaacagctatatacttggtattttgtacgtgaataacgttttagcttttgtgcccttttgagcttgaagggttatcctcaaaggggaaaactatgaaggggaagaagacaaacctaagataccataaagtaaaggttgacattacatattttcattcacaatgcccatt

SEQ ID NO: 185546 - DNA, 822 bp, Homo sapiens
  Payload ID: 16536
  Gene Symbol: SPAG9
  Gene Name: sperm associated antigen 9
  ENST ID: ENST00000513746
  CDS Start-End: 1-459
acaagcaacagctcagcagagacagacagcctgttaggaggcatcacagtggttggttgttctgcagaaggtgtgacgggagctgccacttcccctagtacaaatggtgcttctccagtgatggataaaccaccagaaatggaagcagaaaatagtgaggttgatgaaaatgttccaacagcagaagaagcaactgaagctacagaagggaatgcggggtcagctgaagacacagtggacatctcccaaactggcgtctacacagagcatgtctttacagatcctttgggagttcagatcccagaagacctctccccagtgtatcagtcgagcaatgactcagatgcatataaagatcaaatatcagtactgccaaatgaacaagacttggtgagagaagaagcccagaaaatgagtagtcttttaccaactatgtggcttggagctcaaaatggctgaaatcttttgatgcacatcccaggaaggagagccaagtgcgacagcttgcgtgggtgggggatggcgtgtgggtctccattcgcttggattctacgctccgtctctatcatgcacacacttatcaacatctacaggatgtggacattgagccttatgtaagcaaaatgttaggtactggaaaactgggcttctcttttgtgagaattacagctcttatggtgtcttgtaatcgtttgtgggtggggacaggaaatggtgtcattatctccatcccattgacagaaacaaataaaacctcaggtgtaccaggaaatcgtcctggaagtgtaatccgtgtatatggtgatgaaaacagtgataaag

SEQ ID NO: 185547 - DNA, 686 bp, Homo sapiens
  Payload ID: 16536
  Gene Symbol: SPAG9
  Gene Name: sperm associated antigen 9
  ENST ID: ENST00000510855
  CDS Start-End: 219-686
gcataaatgctaggagcagcagctctatggttatgaggtggggagaacggaatgacgtcatcgcttgggagctgctgcaggatggagtggaaagctgctgctgatggcattgtttttgtggcagcaagctgaatgacagatcctcactacaaagatacccctttggcccccgtgtaggcctccttggttcgggtgtttcaccatgccagcacagcgccatgagtcctggatgcatgctgctgtttgtgtttggctttgttggcggggcggtggtcattaattctgctatcttagtatctctctctgttttgctgcttgtgcacttttctatttctaccggtgtgccagctctgacgcagaacctaccaaggatactcagaaaagaacgccctatatcattaggaattttcccattacctgctggagatggattgcttacacctgatgctcagaaaggaggagagacccctggatctgagcaatggaaatttcaggaattaagtcaaccacgttctcataccagcctgaaggtcagcaatagtcctgaacctcagaaggctgtagaacaggaggatgagctttctgatgttagccaaggcggatctaaagctaccactccagcatcaacagctaattcagatgtggcaacaattcctactgatactcccttaaaggaagaaaacgaa

SEQ ID NO: 185548 - DNA, 4659 bp, Homo sapiens
  Payload ID: 16536
  Gene Symbol: SPAG9
  Gene Name: sperm associated antigen 9
  Uniprot ID: O60271
  ENST ID: ENST00000505279
  CDS Start-End: 79-4014
gtcgggtccgtcccgtgcgggcaggtgccgcccctctgccggcgacgccccgggccgcccgcccgtccgcttgccaccatggagctggaggacggtgtggtgtatcaggaggagcccggcggctccggggccgtgatgtcggagcgggtgtccggcctggccggctccatctaccgcgagttcgagcggcttatcgggcgctatgacgaggaggtggtcaaagagctgatgccgctggtggtggctgtgctggagaacctggactcggtgttcgcgcaggaccaggagcaccaggtggagctggagctgctgcgggacgacaacgagcagctcatcacccagtacgagcgggagaaggcgctgcgcaagcacgctgaggagaaattcattgaatttgaagactctcaagaacaggaaaaaaaggacttacagacccgagtggaatctttagaatctcaaacaagacaacttgagctgaaagcgaaaaactatgctgaccagattagcagacttgaagaaagagaagcagaactgaagaaggaatataatgcattacatcaaagacacactgagatgatccataattatatggaacatttagaaagaacaaaacttcatcagctctcagggagtgatcaactagaatccacagctcatagtagaattagaaaagaacgccctatatcattaggaattttcccattacctgctggagatggattgcttacacctgatgctcagaaaggaggagagacccctggatctgagcaatggaaatttcaggaattaagtcaaccacgttctcataccagcctgaaggatgagctttctgatgttagccaaggcggatctaaagctaccactccagcatcaacagctaattcagatgtggcaacaattcctactgatactcccttaaaggaagaaaacgaaggatttgtgaaggttacagatgcgccaaataaatcagagataagcaaacacattgaagtacaggtagcccaggaaactagaaatgtatctactggctctgctgaaaatgaagaaaagtcagaagttcaagcaatcatcgaatctactcctgagctggatatggacaaagatctcagtggatataaaggttcaagcactcccaccaaaggcatagagaacaaagcttttgatcgcaatacagaatctctctttgaagaactgtcttcagctggctcaggcctaataggagatgtggatgaaggagcagatttactaggaatgggtcgggaagttgagaatcttatattagaaaatacacaactgttggaaaccaaaaatgctttgaacatagtgaagaatgatttgatagcaaaagtggatgaactgacctgtgagaaagatgtgctgcaaggggaattggaggctgtgaagcaagccaaactgaaactagaggaaaagaacagagaattggaggaagagcttaggaaagctcgggcagaagctgaagatgcaaggcaaaaagcaaaagatgacgatgatagtgatattcccacagcccagaggaaacggtttactagagtagaaatggcccgtgttctcatggagcgaaaccagtataaagagagattgatggagcttcaggaagctgttcgatggacagagatgattcgggcatcacgagaaaatccagccatgcaggaaaaaaaaaggtcaagcatttggcagtttgtgccaactcgtttcagccgacttttcagctcctcaagtaacacgactaagaagcctgaaccacctgttaatctgaagtacaatgcacccacgtctcatgttactccgtccgtcaagaaaagaagcagcaccttatctcagctccctggggataagtccaaagcctttgatttccttagtgaagaaactgaagctagtttagcctcacgcagagaacaaaagagagagcagtatcgtcaggtaaaagcacatgttcagaaggaagacggtagagtgcaggcttttggctggagtctgcctcagaagtacaaacaggtaaccaatggtcaaggtgaaaataagatgaaaaatttacctgtgcctgtctatctcagacctctggatgaaaaagatacatcaatgaagctgtggtgtgctgttggagtcaatttatctggtgggaagaccagagatggtggttctgttgttggagcaagtgtattttacaaggatgttgctggtttggatacagaaggcagtaaacagcgaagtgcctctcagagtagtttagataagttagatcaggaacttaaggaacagcagaaggagttaaaaaatcaagaagaattatccagtctagtttggatctgtaccagcactcattcggctacaaaagttcttattattgatgctgttcaacctggcaacatcctagacagtttcactgtttgcaactctcatgttctgtgcattgcaagtgtgccaggtgcacgagaaacagactaccctgcaggagaagatctttcagaatctggtcaggtagacaaagcatctttatgtggaagtatgacaagcaacagctcagcagagacagacagcctgttaggaggcatcacagtggttggttgttctgcagaaggtgtgacgggagctgccacttcccctagtacaaatggtgcttctccagtgatggataaaccaccagaaatggaagcagaaaatagtgaggttgatgaaaatgttccaacagcagaagaagcaactgaagctacagaagggaatgcggggtcagctgaagacacagtggacatctcccaaactggcgtctacacagagcatgtctttacagatcctttgggagttcagatcccagaagacctctccccagtgtatcagtcgagcaatgactcagatgcatataaagatcaaatatcagtactgccaaatgaacaagacttggtgagagaagaagcccagaaaatgagtagtcttttaccaactatgtggcttggagctcaaaatggctgtttgtatgtccattcatctgtagcccagtggaggaaatgtctccattccattaaacttaaagattcgattctcagtattgtacacgtgaagggaatcgtgttagtagccctggctgacggcacccttgcaatctttcacagaggagtggatgggcagtgggatttgtcaaactatcacctcttagaccttggacggcctcatcattccatccgttgcatgactgtggtacatgacaaagtctggtgtggctataggaacaaaatctatgtggtgcagccaaaggccatgaaaatagagaaatcttttgatgcacatcccaggaaggagagccaagtgcgacagcttgcgtgggtgggggatggcgtgtgggtctccattcgcttggattctacgctccgtctctatcatgcacacacttatcaacatctacaggatgtggacattgagccttatgtaagcaaaatgttaggtactggaaaactgggcttctcttttgtgagaattacagctcttatggtgtcttgtaatcgtttgtgggtggggacaggaaatggtgtcattatctccatcccattgacagaaacaaataaaacctcaggtgtaccaggaaatcgtcctggaagtgtaatccgtgtatatggtgatgaaaacagtgataaagtgactccagggacatttataccctattgttcaatggcacatgcacagctttgcttccatgggcaccgggatgctgtgaaattctttgtggcagtcccaggtcaagtcatcagcccacaaagtagcagtagtggcacggatctgacgggtgacaaagcagggccatctgcacaggagcctggtagtcagacgcccttgaagtctatgcttgtcatcagtggaggagagggctacatcgacttccgaatgggtgatgaaggtggagaatcagaacttcttggagaggatcttccacttgaaccttctgtcaccaaagcagaaaggagtcacttgatagtgtggcaagtgatgtatggcaatgagtgagcccatgggaaacaggtggagatggggaagccgtctcttctgcatggtttattttccctctatccttttatttaatgctcttttgtgagataagtttcaccacataatgtgtgagcattttttcctgttaactttatattacaaaatccgttctaccataacaatacagaggaactagctgtgttactgcaccagtgttataggtaacttcagtatattatgaacaaatcaaagaatgtttacttcctgcaaactggtgaattatagaaagcaatccagatgtggtttactctgccacagtctaatgtcattcacttcatttgatggggtcacttgttagctgtcactaataatggaattaatgggaaacacttgataaatgaaactgtaccgttaaatacaatagctgagttttccccagtgtattgtaaaattgacacacactaatacaagatggattatcaggatgtatctaaatgtcccgagagggttaaaagctaactgtaaattactttaactttcactttcaaatctgacaaatcttgtttatatggtatataaaactttgttttcatcagatttgggggggttttatattaaagaaattaagactacactatttaaataaacgtttcctgtttctga

SEQ ID NO: 185549 - DNA, 522 bp, Homo sapiens
  Payload ID: 16536
  Gene Symbol: SPAG9
  Gene Name: sperm associated antigen 9
  ENST ID: ENST00000511795
  CDS Start-End: 1-522
ggctctgctgaaaatgaagaaaagtcagaagttcaagcaatcatcgaatctactcctgagctggatatggacaaagatctcagtggatataaaggttcaagcactcccaccaaaggcatagagaacaaagcttttgatcgcaatacagaatctctctttgaagaactgtcttcagctggctcaggcctaataggagatgtggatgaaggagcagatttactaggggaatattctgaccataatttctttggaatgggtcgggaagttgagaatcttatattagaaaatacacaactgttggaaaccaaaaatgctttgaacatagtgaagaatgatttgatagcaaaagtggatgaactgacctgtgagaaagatgtgctgcaaggggaattggaggctgtgaagcaagccaaactgaaactagaggaaaagaacagagaattggaggaagagcttaggaaagctcgggcagaagctgaagatgcaaggcaaaaagcaaaagatgacgatgatagtgatatt

SEQ ID NO: 185550 - DNA, 750 bp, Homo sapiens
  Payload ID: 16536
  Gene Symbol: SPAG9
  Gene Name: sperm associated antigen 9
  ENST ID: ENST00000513906
  CDS Start-End: 1-750
aggaacagcagaaggagttaaaaaatcaagaagaattatccagtctagtttggatctgtaccagcactcattcggctacaaaagttcttattattgatgctgttcaacctggcaacatcctagacagtttcactgtttgcaactctcatgttctgtgcattgcaagtgtgccaggtgcacgagaaacagactaccctgcaggagaagatctttcagaatctggtcaggtagacaaagcatctttatgtggaagtatgacaagcaacagctcagcagagacagacagcctgttaggaggcatcacagtggttggttgttctgcagaaggtgtgacgggagctgccacttcccctagtacaaatggtgcttctccagtgatggataaaccaccagcagaagaagcaactgaagctacagaagggaatgcggggtcagctgaagacacagtggacatctcccaaactggcgtctacacagagcatgtctttacagatcctttgggagttcagatcccagaagacctctccccagtgtatcagtcgagcaatgactcagatgcatataaagatcaaatatcagtactgccaaatgaacaagacttggtgagagaagaagcccagaaaatgagtagtcttttaccaactatgtggcttggagctcaaaatggctgtttgtatgtccattcatctgtagcccagtggaggaaatgtctccattccattaaacttaaagattcgattctcagtattg

SEQ ID NO: 185551 - DNA, 8246 bp, Homo sapiens
  Payload ID: 16536
  Gene Symbol: SPAG9
  Gene Name: sperm associated antigen 9
  ENST ID: ENST00000618113
  CDS Start-End: 210-4148
agttggtgcagcggcggttggggtgagagcgcctacgccacccctcccctcctccggccccggcccccaccccgccgggcccagccccagccccggcccgggctccagccctagtacccgtcccagcccgagtcgggtccgtcccgtgcgggcaggtgccgcccctctgccggcgacgccccgggccgcccgcccgtccgcttgccaccatggagctggaggacggtgtggtgtatcaggaggagcccggcggctccggggccgtgatgtcggagcgggtgtccggcctggccggctccatctaccgcgagttcgagcggcttatcgggcgctatgacgaggaggtggtcaaagagctgatgccgctggtggtggctgtgctggagaacctggactcggtgttcgcgcaggaccaggagcaccaggtggagctggagctgctgcgggacgacaacgagcagctcatcacccagtacgagcgggagaaggcgctgcgcaagcacgctgaggagaaattcattgaatttgaagactctcaagaacaggaaaaaaaggacttacagacccgagtggaatctttagaatctcaaacaagacaacttgagctgaaagcgaaaaactatgctgaccagattagcagacttgaagaaagagaagcagaactgaagaaggaatataatgcattacatcaaagacacactgagatgatccataattatatggaacatttagaaagaacaaaacttcatcagctctcagggagtgatcaactagaatccacagctcatagtagaattagaaaagaacgccctatatcattaggaattttcccattacctgctggagatggattgcttacacctgatgctcagaaaggaggagagacccctggatctgagcaatggaaatttcaggaattaagtcaaccacgttctcataccagcctgaaggatgagctttctgatgttagccaaggcggatctaaagctaccactccagcatcaacagctaattcagatgtggcaacaattcctactgatactcccttaaaggaagaaaacgaaggatttgtgaaggttacagatgcgccaaataaatcagagataagcaaacacattgaagtacaggtagcccaggaaactagaaatgtatctactggctctgctgaaaatgaagaaaagtcagaagttcaagcaatcatcgaatctactcctgagctggatatggacaaagatctcagtggatataaaggttcaagcactcccaccaaaggcatagagaacaaagcttttgatcgcaatacagaatctctctttgaagaactgtcttcagctggctcaggcctaataggagatgtggatgaaggagcagatttactaggaatgggtcgggaagttgagaatcttatattagaaaatacacaactgttggaaaccaaaaatgctttgaacatagtgaagaatgatttgatagcaaaagtggatgaactgacctgtgagaaagatgtgctgcaaggggaattggaggctgtgaagcaagccaaactgaaactagaggaaaagaacagagaattggaggaagagcttaggaaagctcgggcagaagctgaagatgcaaggcaaaaagcaaaagatgacgatgatagtgatattcccacagcccagaggaaacggtttactagagtagaaatggcccgtgttctcatggagcgaaaccagtataaagagagattgatggagcttcaggaagctgttcgatggacagagatgattcgggcatcacgagaaaatccagccatgcaggaaaaaaaaaggtcaagcatttggcagttactgtcttcttttagtttcagccgacttttcagctcctcaagtaacacgactaagaagcctgaaccacctgttaatctgaagtacaatgcacccacgtctcatgttactccgtccgtcaagaaaagaagcagcaccttatctcagctccctggggataagtccaaagcctttgatttccttagtgaagaaactgaagctagtttagcctcacgcagagaacaaaagagagagcagtatcgtcaggtaaaagcacatgttcagaaggaagacggtagagtgcaggcttttggctggagtctgcctcagaagtacaaacaggtaaccaatggtcaaggtgaaaataagatgaaaaatttacctgtgcctgtctatctcagacctctggatgaaaaagatacatcaatgaagctgtggtgtgctgttggagtcaatttatctggtgggaagaccagagatggtggttctgttgttggagcaagtgtattttacaaggatgttgctggtttggatacagaaggcagtaaacagcgaagtgcctctcagagtagtttagataagttagatcaggaacttaaggaacagcagaaggagttaaaaaatcaagaagaattatccagtctagtttggatctgtaccagcactcattcggctacaaaagttcttattattgatgctgttcaacctggcaacatcctagacagtttcactgtttgcaactctcatgttctgtgcattgcaagtgtgccaggtgcacgagaaacagactaccctgcaggagaagatctttcagaatctggtcaggtagacaaagcatctttatgtggaagtatgacaagcaacagctcagcagagacagacagcctgttaggaggcatcacagtggttggttgttctgcagaaggtgtgacgggagctgccacttcccctagtacaaatggtgcttctccagtgatggataaaccaccagaaatggaagcagaaaatagtgaggttgatgaaaatgttccaacagcagaagaagcaactgaagctacagaagggaatgcggggtcagctgaagacacagtggacatctcccaaactggcgtctacacagagcatgtctttacagatcctttgggagttcagatcccagaagacctctccccagtgtatcagtcgagcaatgactcagatgcatataaagatcaaatatcagtactgccaaatgaacaagacttggtgagagaagaagcccagaaaatgagtagtcttttaccaactatgtggcttggagctcaaaatggctgtttgtatgtccattcatctgtagcccagtggaggaaatgtctccattccattaaacttaaagattcgattctcagtattgtacacgtgaagggaatcgtgttagtagccctggctgacggcacccttgcaatctttcacagaggagtggatgggcagtgggatttgtcaaactatcacctcttagaccttggacggcctcatcattccatccgttgcatgactgtggtacatgacaaagtctggtgtggctataggaacaaaatctatgtggtgcagccaaaggccatgaaaatagagaaatcttttgatgcacatcccaggaaggagagccaagtgcgacagcttgcgtgggtgggggatggcgtgtgggtctccattcgcttggattctacgctccgtctctatcatgcacacacttatcaacatctacaggatgtggacattgagccttatgtaagcaaaatgttaggtactggaaaactgggcttctcttttgtgagaattacagctcttatggtgtcttgtaatcgtttgtgggtggggacaggaaatggtgtcattatctccatcccattgacagaaacaaataaaacctcaggtgtaccaggaaatcgtcctggaagtgtaatccgtgtatatggtgatgaaaacagtgataaagtgactccagggacatttataccctattgttcaatggcacatgcacagctttgcttccatgggcaccgggatgctgtgaaattctttgtggcagtcccaggtcaagtcatcagcccacaaagtagcagtagtggcacggatctgacgggtgacaaagcagggccatctgcacaggagcctggtagtcagacgcccttgaagtctatgcttgtcatcagtggaggagagggctacatcgacttccgaatgggtgatgaaggtggagaatcagaacttcttggagaggatcttccacttgaaccttctgtcaccaaagcagaaaggagtcacttgatagtgtggcaagtgatgtatggcaatgagtgagcccatgggaaacaggtggagatggggaagccgtctcttctgcatggtttattttccctctatccttttatttaatgctcttttgtgagataagtttcaccacataatgtgtgagcattttttcctgttaactttatattacaaaatccgttctaccataacaatacagaggaactagctgtgttactgcaccagtgttataggtaacttcagtatattatgaacaaatcaaagaatgtttacttcctgcaaactggtgaattatagaaagcaatccagatgtggtttactctgccacagtctaatgtcattcacttcatttgatggggtcacttgttagctgtcactaataatggaattaatgggaaacacttgataaatgaaactgtaccgttaaatacaatagctgagttttccccagtgtattgtaaaattgacacacactaatacaagatggattatcaggatgtatctaaatgtcccgagagggttaaaagctaactgtaaattactttaactttcactttcaaatctgacaaatcttgtttatatggtatataaaactttgttttcatcagatttgggggggttttatattaaagaaattaagactacactatttaaataaacgtttcctgtttctgacttattagagctctaaagtttatgaggcctacttctctgaatattctgatgggttttttttgagaccagtctcattttcatactgacatgtctgaaagatttattatttataaagcttaggacatactctgggaagcttagaagatacttcagcactgggaggattttttaaaggaaatgtgttttgtatttcttgtaccagagaatggtgatgttgattgagttttttccatgtaaaaaatgtacttgtttgccaaatgttcctagattgctcttaacctgttaatacaagtaaaactgtagtggggatggagtctggcctaagtacagaatgagggatttaattagaaaagttattttcttttgttctgtatcaaactgcagaacagctatatacttggtattttgtacgtgaataacgttttagcttttgtgcccttttgagcttgaagggttatcctcaaaggggaaaactatgaaggggaagaagacaaacctaagataccataaagtaaaggttgacattacatattttcattcacaatgcccattaaaaaaaaaaaataggttgggcatggtggctcacgcctgtaatcccaacactttaggaggctgaggcagatggattgcttgagcccaggagttcaagaccagcctgggcaacatggcgaaaccctgtctctaccaaaaaaaaaaaacaaaataaattaaccgggtgtggtggcacatgcctgtagtcccagctacttgggaggctgaggtgggaggatgacctgggcccaggaggtggaggttgcagtgagccttgatagcaccactgcactccagcctgggtgacggagcaagaccctgtctcaaaacagacaaacaagcaaaaaatagattaaagtctggatttcactgattttcttgcttaataagttttttaaaaccacgatgctgcaattttttccctctcaagcttcttgaaaatgtgtgatttacccttttttatctattactctaggcaaagctaaatatgatttttttttttttttttgagacggagtctggctctgttgcccaggctggaatgcagtggtgcgatctcagctcactgcaacctccacctctcaggttcaagtagttctcctgcctcagcctcccaagtagctgggattacaggtgtgtgccaccctgcccagctaatttttgtatttttagtagagacagggtttcaccacattggccaggctggtctcaaactcctgacctcagatgatctacccgccttggcctcccgaagtgcttgaattacaggcgtgagcccccgcgccggtccgaagcaaagctaaatgtaattttatgtactgttttaacagtataaacctatgggataaaggcccccaatcatcagaaggactactgaaaagaaaagaaagcaaacgtagatgtcaaattgtctaaacattcttaagtaccactgattttttttttctggactattatacaaagatgtctgtaaaaagtataccagtggcttttatgcatatacacgattaggctagattgtgaagtacatgggatttcatgagccagaggaggcatttggatccattgggccacatgtgactataagcacattgtgtacacaataaaattgtagccactcatgtattaaaactgttttggtaaaagctgtattaaaagaataattttttgcttgagctacttagtcacttttttgcagggcaccaaaatgtaggctacttttccatagcttgtttgctatgtttttatttcatcttaaatctgagccatttttggcaatatcttttaaaaaatcattattaaacatttattggaaatgttgtatagattcacaagaaagagacaccaaagtgtttgggaattttaatcccaagaagtaaacatcccagagtcagatcccatttgctgttgttcagccatgtttgtatgactgaatgtaatttaggaaatcaggagttagagatgaaaaatacaaacatgtcaaatggttgtaattgctttttttgaacttactggctttaacttaagtaatataggtgtgtagttgttttatctaaagatgtcagattatctgtggccctgttaattaactgcagggaccagagagaggacaaaaatgcctgtataatttgctttaaaggcttgtccttatgtttgtaatttcagttaaatattttctacagattgcttcacttcccctttcccccaataacaagttcatattcttgtaatgtttactttggtcaacgtggtaatttttggaagaaaatgccaaaatgtaagcttctcacaagcagcaaaggaatgtaactgcctgtagctaccacatcaagggagagaagaggcttgcgtactttgggttgatctcactgtacaaaaaaagtgtacccctattggaagaaataaggaatacttgaaggtttctcctttttttacacttgagtcatgtgcaaggttgaaccatatgaaattgccagtgttcaaccattgctgatctgcaaaagcgacaatatcatatgcctcaacctaacacttactcttaaatgcaggttaaaatctctgtgaggcaaagggataatattctctaggaactcacttttgagagtatttttctctaacccatgtggatctaaattttaaaaataggaatgaatctcttaattgcagcttgtggagagtataaaacattttgagcacaatatgcagcacataacttttcagattgtgtttgcatagaaaaggttaaaatcaattctttcagttactgtattgttcatttcttgtaaaggtcttcctacatttgagacgagaccctttaacataggctgccttagtaacaaaataaaacagatgtgtcataatattaactgtcctaaagaacatgtgtcttgcaaatgccatggaactgaatatttatttccttgtgagtattatgaccgttaccaaaggactcaaccagatttagggctcttcttaattgatcatgttcagaaagggactcatttggtcccactttgtaacatgggaagagtagaagagaaaattaaatgtggaaatcataaatgcttttctaacagggttatgctattctgtaacactaaatgtctgtcttttctcttaaaagattaagttttattaattttgtcatacatttctctatttgaatatatcttaaccattttatgttccaaattcgttttttgtccaagacattctatcagaattttacttgcctctataatctgaaaaatgggttctagaatgtcccacttgctgtctcttagaggctgagcttcatttctatgagcaaagagctcatttagcaatgtagttatttcagtatttatttctattatggaatccctggggttcagaatgtaactttgtacatgagatatatataaatatgtatatgaacatgta

SEQ ID NO: 185552 - DNA, 853 bp, Homo sapiens
  Payload ID: 16537
  Gene Symbol: SPA17
  Gene Name: sperm autoantigenic protein 17
  Uniprot ID: Q15506
  ENST ID: ENST00000227135
  CDS Start-End: 183-638
ttttgcagtcctcgcagcctcccgcgacctcaggactgggctgtactcgccccttctcggccgccgtagtttttttttttttttaaagaaaaaacggttacccagcaactagaaaaacaaccggaaccggcggcaccagctcggagagaaaggaggttccataggcagttcttaccaagaagatgtcgattccattctccaacacccactaccgaattccacaaggatttgggaatcttcttgaagggctgacacgcgagattctgagagagcaaccggacaatataccagcttttgcagcagcctattttgagagccttctagagaaaagagagaaaaccaactttgatccagcagaatgggggagtaaggtagaagaccgcttctataacaatcatgcattcgaggagcaagaaccacctgagaaaagtgatcctaaacaagaagagtctcagatatctgggaaggaggaagagacatcagtcaccatcttagactcttctgaggaagataaggaaaaagaagaggttgctgctgtcaaaatccaagctgccttccggggacacatagccagagaggaggcaaagaaaatgaaaacaaatagtcttcaaaatgaggaaaaagaggaaaacaagtgaggacactggttttacctccaggaaacatgaaaaataatccaaatccatcaaccttcttattaatgtcatttcttcctgaggaaggaagatttgatgttgtgaaataacattcgttactgttgtgaaaatctgtcatgagcatttgtttaataagcataccattgaaacatgccacttgaagatttctctgagatcatgagtttgtttacacttgt

SEQ ID NO: 185553 - DNA, 4949 bp, Homo sapiens
  Payload ID: 16537
  Gene Symbol: SPA17
  Gene Name: sperm autoantigenic protein 17
  Uniprot ID: Q15506
  ENST ID: ENST00000532692
  CDS Start-End: 1422-1877
tcgccccttctcggccgccgtagtttttttttttttttaaagaaaaaacggttacccagcaactagaaaaacaaccggaaccggcggcaccagctcggagagaaaggaggtgaggccgcttccccacttcctctccgataccaagacctagccttttcccttcgtctctcttattctctcagcatcccagacacagcctcggagccctgggccgtttgggagccgaggcagcccattctgcgcgagtctgaaatcccaggtcctcaacatcccgcccccgactagacccgtctgccccctccgcccgccctcctctgcccacattggttcagaatctcgccagctcttttcaccactctagaatggttcgatacccccatctactgctccctcagaaaaagcaaaagagaggagtcaggcgtggtggcgcgcgcctgtaatcccaattgctcgggaggctgaggcgggatcatcgctggagcccaggagttcgaggccagagaccccctctcaaagaaaaaaaaagcgatgaaacgagaaccctccatagtctgagcctcattaaaccgtccagttctcccaacctggacccctaccacggcctccgcctctattccgcattgacgcacactctcacattaacaggccaggtcccggaggattcttttcatactcagtagtagctcagcccgctgcttagcagctacccttaatctagcccttgtatttcaagacagaaagagacaacctgatcaagaagaaaccgaaaaatataagaattctaaaactttagaggctgggatttcaaaatcatgacacacagccccatcccatcccatccctccctcacacacacgcacgcacaaccccattccacagtacgaaggtgttcgaagcattgtgggtcatgcttcagaagtggcagcaaggggaaagattgtgcaacttcttcattcaacaaattaatttctagaaccaggactaatttctactctttaaaaaaaaatagacctcaaagaaggtcttctcagcaattgacaatgaatttaactttttagcaatcattctctctaaattcctgtgtgatagcaaaaattacccttaccttttgagcatataaagggtaaagagagaaaaagtcatattgaaaattatgggttttttgcaggattttaaatgatttggcctagtgaatgggtctgtgtttgtattatactaattcacaatggagatttcaaaactctttggaagaaatggatgggcttgggttgtgttagggaaaaaagaattcaagtccagatgtatgagtctcagaaataatttgttggcatagttgtgattatataagtaaaatcagacaaatttaaagacagtactctttaatgaatctttaggttccataggcagttcttaccaagaagatgtcgattccattctccaacacccactaccgaattccacaaggatttgggaatcttcttgaagggctgacacgcgagattctgagagagcaaccggacaatataccagcttttgcagcagcctattttgagagccttctagagaaaagagagaaaaccaactttgatccagcagaatgggggagtaaggtagaagaccgcttctataacaatcatgcattcgaggagcaagaaccacctgagaaaagtgatcctaaacaagaagagtctcagatatctgggaaggaggaagagacatcagtcaccatcttagactcttctgaggaagataaggaaaaagaagaggttgctgctgtcaaaatccaagctgccttccggggacacatagccagagaggaggcaaagaaaatgaaaacaaatagtcttcaaaatgaggaaaaagaggaaaacaagtgaggacactggttttacctccaggaaacatgaaaaataatccaaatccatcaaccttcttattaatgtcatttcttcctgaggaaggaagatttgatgttgtgaaataacattcgttactgttgtgaaaatctgtcatgagcatttgtttaataagcataccattgaaacatgccacttgaagatttctctgagatcatgagtttgtttacacttgtctcaagcctatctatagagacccttggatttagaattatagaactaaagtatctgagattacagagatctcagaggttatgtgttctaactattatcaaatgaataaatcctctctatcacatcccccaaaaatgttctttagctcctgtttcactcctagtggtaaagaatttcactgctttttaaggatagtctatttaattttggaatttttagaaagataagctgggacaaaaatctgcctccttcagcctggccaacatggtgaaaccccatgtctactaaaagtacaaaaattggccaggcgtggtgcgcacacctgtaatcccagctactcgggaggctgaggcaggagaatcgcttgaacctgggaagtggaggctgcagtaagccgagatcgcaccactgcactccagcctgggcgacagagcaagactctgtctcaaaaacaaaacaaaacaaaaaaaagcctctgcctccttgtaagtttaacccactggttttcatttatcatacatgtattcaatcatttattgaaaatgtattgagtactattcatgtgctgggaattagtagtgaatacttgttcttacactcatacaacttacaatgctttattgttttgctctccagaaccacacagaacaagactaataacatcatattgtaaaaagcaaaagctatcatatcatgctgccttcttcagttaaaacttcccaagtttttaaatatacaatggtaatgcctgtttaacaaactcagaggctttatctcttttatgttttcaatgattcattcaaatccctagtgccttagttttagaaagttccgtctctcctttttgaggcctctccacccttgattgtccaagaaactgagggttcatgtcttagaccaaagggtgcagttctcttcccaatacaaaaggtagaaagtggagtcttaccatttagttaatgctgttgccttctaccataatgttgtagcatagtccagcagactgaggtgattctctggctggttccaattcctgcctgcaccatagtggatggcccatgatttagttccaggattacatctctcttggtttatagtcacaaagccagtgttcccccaaagcttaaaaacaagccaggatggctcagtcctgaggagattctaaaaccaggtctatgttgtcacaacaaatactctcctacaaacactttgatccttgtcctaggcttagacatgctctttctgcaaagcagttttatttcaggtgcctcactgcccttccctggcactgagcctttatcaggctctgcaacagaggttcccccaagtgatcgccactcaaacacagttgattcacaccaaccctttcaaggttgtggctttcattctctaatgtccactcatacaggcagcctttctccttccaaaatcttgctgccactgtagagagtttcatgctagctaaacacaagtctctaatatcccccttcctctcctccttaacccctctcctccaggcttacagaggaaaagaaatcagttctcctccaggattccagctgttcgtccctcccattccactgaaagcaccagcttctaacaccttcccctctcagacagagccatcctgcttagcggattgtcaaggggggacccagaatttatgcaaagacttagattccctgacctggagagatcagaagaggaaaaaagggattttttccctagtgagtatatagcaggaaaaaaaaaaaagatgagttagctttttcagtaattctcctgttatacacataaagtgactagcactatgcattccatacacacacacacacacacacagatctcatggtagtgatattggtagtgaaggaggaaaaggaaaaggtgagcaatggatgtgatattatgagaacaacacatatgaatgacactttattagaacttatctggttttcctcttatctctctggctgttccttctcaattcccttcactggtaactcttcaactccccaaccactaaatgctaagtgcccttaggctcagtctttcgaccccatttctacactcacttgatttcctgcagtttcatagctttaaaatccaatcttcttaatgatcactcccagacctttctctcctctgcctgcgaacttctatattcaactgcctacataacatccccatttggatgtctataggcatctcaaaagtaacatataaaaaatgaatcctgatattgcccccaaatctgaaacttcccccacacccaagtttttccattcaaaaatggctgctccattcttccatttgctcaggccaaaaaccttggattcatctttaatgcgtcactttctttcacaccccatatacaatctatcagcaaaacctgtgggctgtacctataaaataatactcagaatctgcctacttctaaccacttccattgttaccgccttggtcctagttcccatgatagccttgtgaattattgcaataacctatattggccagtgattatctcactactactgcacaacccattccaaagttagtggtttaagacaattatattttctcctgggtctgtaggtcagtggtaatgtagctaagctaggctggactacaatctcaaggttaggttcaggtcagctctaagctgtgggtttgtgggctgacaggaaggtctgcttcaggctgtgggcccaagggtcagctgcagcacagtgcctctgcttcacgtgtccttttctgagcccctgctgaaagacgttatccaggacaagctcttctcatgctggtcacagaagacaagcaggaaaacccagcatgcaagaatatttcaagcttttgctc

SEQ ID NO: 185554 - DNA, 1431 bp, Homo sapiens
  Payload ID: 16538
  Gene Symbol: SPESP1
  Gene Name: sperm equatorial segment protein 1
  Uniprot ID: Q6UW49
  ENST ID: ENST00000310673
  CDS Start-End: 155-1207
ctgcgcttgcgcgctggggacaaccgttgctgggtgtcccagggcctgaggcaggacggtactccgctgacaccttccctttcggccttgaggttcccagcctggtggccccaggacgttccggtcgcatggcagagtgctacggacgacgcctatgaagcccttagtccttctagttgcgcttttgctatggccttcgtctgtgccggcttatccgagcataactgtgacacctgatgaagagcaaaacttgaatcattatatacaagttttagagaacctagtacgaagtgttccctctggggagccaggtcgtgagaaaaaatctaactctccaaaacatgtttattctatagcatcaaagggatcaaaatttaaggagctagttacacatggagacgcttcaactgagaatgatgttttaaccaatcctatcagtgaagaaactacaactttccctacaggaggcttcacaccggaaataggaaagaaaaaacacacggaaagtaccccattctggtcgatcaaaccaaacaatgtttccattgttttgcatgcagaggaaccttatattgaaaatgaagagccagagccagagccggagccagctgcaaaacaaactgaggcaccaagaatgttgccagttgttactgaatcatctacaagtccatatgttacctcatacaagtcacctgtcaccactttagataagagcactggcattgggatctctacagaatcagaagatgttcctcagctctcaggtgaaactgcgatagaaaaacccgaagagtttggaaagcacccagagagttggaataatgatgacattttgaaaaaaattttagatattaattcacaagtgcaacaggcacttcttagtgacaccagcaacccagcatatagagaagatattgaagcctctaaagatcacctaaaacgaagccttgctctagcagcagcagcagaacataaattaaaaacaatgtataagtcccagttattgccagtaggacgaacaagtaataaaattgatgacatcgaaactgttattaacatgctgtgtaattctagatctaaactctatgaatatttagatattaaatgtgttccaccagagatgagagaaaaagctgctacagtattcaatacattaaaaaatatgtgtagatcaaggagagtcacagccttattaaaagtttattaaacaataatataaaaattttaaacctacttgatattccataacaaagctgatttaagcaaactgcattttttcacaggagaaataatcatattcgtaatttcaaaagttgtataaaaatattttctattgtagttcaaatgtgccaacatctttatgtgtcatgtgttatgaacaattttcatatgcactaaaaacctaatttaaaataaaattttggttcagga

SEQ ID NO: 185555 - DNA, 1580 bp, Homo sapiens
  Payload ID: 16539
  Gene Symbol: SPEF1
  Gene Name: sperm flagellar 1
  Uniprot ID: Q9Y4P9
  ENST ID: ENST00000379756
  CDS Start-End: 162-872
agaaaacaatatggccgctcccagctgggacgtgagtctctggattaggcaggcagaggcagttatgggcttctgcagtggcgagaaaggaagcgcctgaagggtcgtgaggctggggcgggacccggcaccgctggggcggccaggccgtgaggacgccaatggcgagcagcgtggacgaggaggcgctgcaccagctgtacctgtgggtagacaacatccctctgtcccggcccaagcgaaacctctcccgggactttagcgatggagtccttgttgcagaggtcatcaagttttacttccccaagatggtggagatgcacaattatgtccccgccaactctctccagcagaagctcagcaactggggtcatctgaacaggaaggtactgaagaggctgaacttttcagtaccggatgacgtgatgcgcaagatcgcgcagtgcgccccaggcgtggtggagctggtgctcatcccgctgaggcagcgcctggaggagaggcagaggcgcaggaagcagggcgccggctccttacaggagctggctccccaggatggcagtggctacatggatgtgggtgtatcccagaaggcccgaggtgaaggtgtcccggacccccagggagggggtcagctcagctgggaccggccgccggcgcctcggcctccagcgtataaccgggcgttgcagggcgaccccagcttcgtcctccagatcgctgaaaaggagcaggagctgttggcctctcaagagaccgtgcaggtcctgcagatgaaggtaaggcgcctggagcacctgctccagctcaagaatgtgcggatcgaagacctctcccggcggctccagcaggcggagcgtaagcagcggtgagcggcggcccgggccgcgcggggacgcccgggtacccgccagagccccgacgccgcgccggacccacccaccgatggatagaccattgggagggcggagcccgctgctctcacgagcctgctggggcccgagtgccctccttccttgggatgggtgagcgtgggaggagatgggacaggaactctaggagcgcaggcccgggactgagccgcctcctaccactccggagatccgggtcaggagaatggaccgctttccagagcccagaagccacgtgcagagacctagcctgtcccccaaagcagtgtccaacaccttgggcccggccttgcatctcccggcgctgggccttggggggcggtcccttggctctgtccacacccccagaatcaggtccccgcccagctccgaggacggcggcgtctccatccaggctagttccccatgccctcagccatgggggaatctgtcccgggccgctgaggggctcccctgcccctcctgggagcttacctgggacccacctcggcgacggagaccgcagcagctggagaggaaggggtgaggcgtgggatcgccaggagtagggaggacatcgacgatgtgcccgtagcagtcgcccctccctcctcgcgcacggggtactgaggcggaaggtttgaaggttacggctcagggctgccccattaaagtcagtgttgtgttcta

SEQ ID NO: 185556 - DNA, 3026 bp, Homo sapiens
  Payload ID: 16540
  Gene Symbol: SPEF2
  Gene Name: sperm flagellar 2
  Uniprot ID: Q9C093
  ENST ID: ENST00000282469
  CDS Start-End: 155-1699
gtcccctcttctctaaggcctttcgcctagttccagcctggatacgcttccatagcaaagggttgcccttggctacaggaggacgcgggctggcaggcttggttcctggcgagtttctaagcccccgcctgcggtctgaggcaccggctgaaccatgtcggagatcctgtgccagtggctcaacaaggagttgaaggtgtcccggaccgtgagtcccaagtcatttgcaaaggcattttccagtggctatctacttggagaagttctacacaagtttgaacttcaggatgatttttcagaatttttggacagcagggtttcaagtgccaaacttaataatttttctcgcttggagccaacacttaaccttctgggtgtgcagtttgatcagaatgtggcccatggcatcatcacagaaaagcctggggtggcaacaaagctgttatatcaattgtacattgctcttcagaaaaagaagaaaagtggactgactggagtggagatgcaaaccatgcaacgtctgacaaatttaagacttcaaaacatgaaaagtgatacttttcaagagagacttagacacatgataccacgtcaaactgatttcaatctgatgcggattacatacaggtttcaagaaaaatataaacacgtgaaagaagatcttgcccatttgcattttgagaaacttgaaagatttcaaaaactcaaggaagagcaaagatgttttgatattgaaaagcaatacttaaacagaagacgacaaaatgaaataatggccaaaatccaagcagctattatacagattcctaaacctgcatcaaatcgtactttgaaagcactcgaggcccaaaaaatgatgaaaaagaaaaaagaggcagaagatgtggctgatgaaattaagaagttcgaagcattaataaaaaaggatctccaagcaaaagaaagtgcatccaagacttctttagatacagcaggccagacaaccaccgatttgttaaatacttactcagatgacgagtacattaaaaaaatccagaagcgccttgaagaagatgcttttgcacgagagcaaagggagaaaagacggcggaaattgttaatggaccagttaatagcccacgaagcacaagaggaggcttatcgggaggaacagctgattaaccggctgatgcggcagtcccagcaggagcgcaggattgccgtgcagctcatgcatgttcggcatgaaaaggaagttttatggcaaaacagaattttcagagaaaaacaacatgaggaaagacgacttaaagatttccaggatgctcttgatcgagaagcggctttggcaaaacaagccaagattgactttgaagaacaattccttaaagaaaagagatttcatgatcagattgctgtggaaagagctcaagctcgttatgaaaagcattattcagtatgtgcagaaattttggatcaaatagttgatttgtccactaaagtggcagactatcgaatgttgacaaataatctgattccgtataagttgatgcatgattggaaggaactattttttaatgcaaaacccatatatgaacaagcctctgttaagacactacctgctaacccctcaagagaacaacttacagaactggagaaaagggacttgctagataccaatgattatgaagaatataaggtacctactgatatgaaataattagaatgctacataataaatcctttttctttaacattaattttgtgatattccttatttcatttctactaataaaaatagacatgttttgtttgcattttcccttgttttaatttgtatgtttgtactactttttagatgcttaaactatacataagctattatctattgttcctagtaatcttaggggagtggtctgaaaaaacatcaagcatagtaattgtctgggtagacagatttcagaatttttaaaatgctttaatttatttattagcatttttctttgtatgggctgtgtacttttgcttcaaaaaccattgttaaaaagtatttcttttgtaatcaatctaaataatagactttttttacaggcaaaatgaaagaggaggaagtctgggttttatgaatagcatagattcaaacaatcttttattcaaagattgaaataaaaagtatcgggtgccaactgtgatttttagaagaactgttgtaaagcctttgagattagacagactagagctacattactgaaattgccaactactaactgtgtgaccttaggtgaccagttcattaagggctaatagatttccatttttcaattaatggaaagggaatgctactatacctacttcatttaaaataacatgagttaaacacttagctgagtgcacttcatgttggatgcatataatacatatccatttctttcctcaccatcctactctccccatcccactccatctcacccttagaagtaaaggtgtaacaatcatagcttttggatagaaattttgagtggatcaacagcaatggaatgaggagtgaggctttttattagaaaaattacaaaatgagtcccggaaggtcagtaagtgcaacatgaaaaaaatctatgaaaagattatttgacctaattattcactgatagtacatactcaacaaaggtttgtgggacaaagggtgaataaaatgaatgaattacaatgaacaaagaaaagtgcaaaataacactaacaagtaaatattacaagaagataaccttgtggttaaaagataaggaaaaatatgagattatgagaaattaaatgtatactatattttaattaaatgaatctgtatttgtagcactaagagaattattattaaggattgactagaaccttaaaagatatatgtggatgtttgttttgtacggttgtaaaatatactagacctattacatccacctaaagtataatgccatgtaagaaaatgctttgacagtatcaacctgtgttaaggtatttctttccattgtaaattaaaagtcattttatttgacaga

SEQ ID NO: 185557 - DNA, 5681 bp, Homo sapiens
  Payload ID: 16540
  Gene Symbol: SPEF2
  Gene Name: sperm flagellar 2
  Uniprot ID: Q9C093
  ENST ID: ENST00000356031
  CDS Start-End: 155-5623
gtcccctcttctctaaggcctttcgcctagttccagcctggatacgcttccatagcaaagggttgcccttggctacaggaggacgcgggctggcaggcttggttcctggcgagtttctaagcccccgcctgcggtctgaggcaccggctgaaccatgtcggagatcctgtgccagtggctcaacaaggagttgaaggtgtcccggaccgtgagtcccaagtcatttgcaaaggcattttccagtggctatctacttggagaagttctacacaagtttgaacttcaggatgatttttcagaatttttggacagcagggtttcaagtgccaaacttaataatttttctcgcttggagccaacacttaaccttctgggtgtgcagtttgatcagaatgtggcccatggcatcatcacagaaaagcctggggtggcaacaaagctgttatatcaattgtacattgctcttcagaaaaagaagaaaagtggactgactggagtggagatgcaaaccatgcaacgtctgacaaatttaagacttcaaaacatgaaaagtgatacttttcaagagagacttagacacatgataccacgtcaaactgatttcaatctgatgcggattacatacaggtttcaagaaaaatataaacacgtgaaagaagatcttgcccatttgcattttgagaaacttgaaagatttcaaaaactcaaggaagagcaaagatgttttgatattgaaaagcaatacttaaacagaagacgacaaaatgaaataatggccaaaatccaagcagctattatacagattcctaaacctgcatcaaatcgtactttgaaagcactcgaggcccaaaaaatgatgaaaaagaaaaaagaggcagaagatgtggctgatgaaattaagaagttcgaagcattaataaaaaaggatctccaagcaaaagaaagtgcatccaagacttctttagatacagcaggccagacaaccaccgatttgttaaatacttactcagatgacgagtacattaaaaaaatccagaagcgccttgaagaagatgcttttgcacgagagcaaagggagaaaagacggcggaaattgttaatggaccagttaatagcccacgaagcacaagaggaggcttatcgggaggaacagctgattaaccggctgatgcggcagtcccagcaggagcgcaggattgccgtgcagctcatgcatgttcggcatgaaaaggaagttttatggcaaaacagaattttcagagaaaaacaacatgaggaaagacgacttaaagatttccaggatgctcttgatcgagaagcggctttggcaaaacaagccaagattgactttgaagaacaattccttaaagaaaagagatttcatgatcagattgctgtggaaagagctcaagctcgttatgaaaagcattattcagtatgtgcagaaattttggatcaaatagttgatttgtccactaaagtggcagactatcgaatgttgacaaataatctgattccgtataagttgatgcatgattggaaggaactattttttaatgcaaaacccatatatgaacaagcctctgttaagacactacctgctaacccctcaagagaacaacttacagaactggagaaaagggacttgctagataccaatgattatgaagaatataagaacatggttggagagtgggccttaccagaagaaatggttgacaatttaccaccctccaacaattgcatactgggccatattcttcacaggctagctgaaaaatctcttcctcctcgagcggaatcaacaacacctgaattaccttcatttgctgttaaaggatgcttattggggaaaacattaagtggaaaaactaccattttaaggtctctacaaaaagactttcctatacagatactttctattgacactcttgtccaagaagctatccaagcatttcatgacaatgaaaaagtcagtgaggttctaccaattcagaaaaatgatgaagaagatgctctaccagttctgcaagaggagattaaagaaagccaggatccacaacatgtattttcagctggtccagtttcagatgaagtattaccagaaacagaaggtgaaacaatgcttagtgctaatgctgataaaacaccaaaagctgaagaagtcaaatcaagtgatagtttcttaaaactcactacacgtgctcagcttggtgcaaaatcagaacagttgctgaagaaaggaaagagcattcctgatgtgctgcttgttgacatcatagtaaatgctattaatgagatacctgtgaatcaagactgtatcctagatggttttccaatgactttaaaccaagcacagcttctggaagaagctcttacaggctgcaatagaaacctcacagaagtggaaagaaaaaaagcacaaaaatccacattggctattgatcctgcgacttccaaagaaatacctcttccctctcctgcatttgattttgtcatattattagatgtttcagatacttcctcaatgagtcgcatgaatgatattatagctgaagaattgtcctataaaactgctcacgaagatatcagtcaacgtgtagctgctgaaaaccaagataaggatggagaccaaaatttaagagaccagatacaacatagaattataggcttcttggacaactggcctttattggagcaatggttttcagagccagaaaatattttgataaaaatcaatgctgaaatagataaggaatctttatgtgaaaaagtaaaagaaattcttacgactgaaatagcaaaaaaaaagaataaagttgagaagaaattagaagaaaaggaagctgagaaaaaagcagcagcttccctggctgagcttccacttcctacacctcctcctgctcctcctcctgaaccagaaaaagagaaggaaattcatcaaagccatgtggcttcaaaaactcctactgcaaaaggaaaacctcaatcagaagccccgcatggtaagcaagaatctcttcaggaaggaaaagggaagaaaggtgagaccgcactcaaaagaaaaggttctcctaaaggaaaatcatcaggaggaaaagtaccagtaaagaaatcacctgctgactctacagatacatcacctgttgcaatagtgccacagccacctaagccaggatcagaagaatgggtctatgtgaatgaaccagttcctgaggaaatgcctttgtttttagtaccttactgggaactaatagaaaattcctatataaacaccatcaaaacagtactcaggcatctgagggaagaccagcatactgtgcttgcttacttatatgagattagaacaagtttccaggagtttctaaagcgtccggatcacaagcaagattttgtagctcaatggcaggctgatttcaactcccttcctgatgacctgtgggatgatgaggaaacaaaggctgaactacatcaacgagtgaatgatctgcgagaccgcctgtgggacatttgtgatgcccggaaggaagaggcggagcaggagcggcttgacatcattaatgagagctggttacaggacactcttggaatgacaatgaaccatttcttttccctgatgcaggcagagctgaaccgtttccaagatacaaagagactccttcaagattattactggggaatggaaagtaaaatcccagtagaggacaacaagagatttactcgaatccctttggtccaactggatagtaaagacaattctgaaagccagcttagaattcctctagttcctcgaatatccatttctctggaaacagttacacccaaaccaaaaacaaaatcagtactgaagggcaagatggataactccctagaaaacgttgagtccaactttgaggccgatgaaaagttggtcatggacacctggcagcaggcttctttagcagtatctcacatggtggctgctgaaattcatcagaggcttatggaagaagaaaaagaaaaccagccagcagaccccaaagaaaaatctcctcagatgggtgcaaataaaaaagtcaaaaaggagccacccaagaaaaaacaggaagacaaaaaacccaaaggtaaatcaccacctatggcagaagcaactcctgtcatagtaacaacagaggaaattgctgaaatcaaaaggaaaaatgaactgagggtcaaaataaaagaagaacaccttgctgccttgcaatttgaagaaatagccacgcaatttcgacttgaactgataaagacaaaagcattggctcttcttgaagatttagtaacaaaggtggttgatgtatataaactcatggaaaaatggcttggtgagaggtatttgaatgaaatggccagtacagaaaaattaactgacgtagctcgctatcacattgaaacatctacaaaaattcagaatgaactttatttaagccaagaagacttcttcattaatggcaatataaaagtcttcccagatcctcccccatcaatacgtcctccacctgtagaaaaggaagaagatggtaccctgaccattgaacagcttgacagtcttcgagatcagttcttagatatggcacctaaaggcataataggaaataaagcatttactgacattctgatcgatttggtgaccctgaaccttggcacaaacaactttcctagtaattggatgcaccttacccaacctgaattacaggaattaacatctttattaacagtcaactccgagttcgtggactggcggaagttcctgttagtaacctcaatgccttggcccattcccttggaggaggagctccttgagacccttcagaagttcaaggctgtggataaggagcagttgggcaccatcacttttgagcagtatatgcaggctggtctgtggtttacaggagatgaagatataaaaattccagaaaatcctcttgaaccccttccatttaataggcaggagcatcttatagagtttttctttaggctatttgctgactatgagaaggatccaccccagcttgactacacacagatgctgctttactttgcttgccacccagacaccgtggaaggagtctacagggccctcagtgtggctgttggaactcatgtcttccaacaagtcaaagcttccattccaagtgcagaaaagacctcctcaactgatgcaggtccagctgaggaatttcctgaacctgaggaaaatgctgcaagagaagaaaggaaattaaaagacgacacggagaaaagggaacagaaggatgaagaaatccctgaaaatgcaaacaatgaaaagatgtccatggaaacactactcaaagtgttcaaagggggaagtgaagcacaggactccaatagatttgccagccacctaaagatagagaacatttatgcagagggcttcataaaaacatttcaagacctaggtgccaagaacctggagccaattgaagtcgctgttctcttgaagcatccttttattcaagacctgatttcaaattattcagactataagtttcctgatattaaaataattctccaaaggagtgaacatgtacaaggaagtgatggagagagatcaccttcaagacatacagaggaaaagaaatgaagacaaaagagtgtgatttttttaattctgcaataaatcttccaaaaattaaatgtga

SEQ ID NO: 185558 - DNA, 5964 bp, Homo sapiens
  Payload ID: 16540
  Gene Symbol: SPEF2
  Gene Name: sperm flagellar 2
  Uniprot ID: Q9C093
  ENST ID: ENST00000440995
  CDS Start-End: 1-5457
atgtcggagatcctgtgccagtggctcaacaaggagttgaaggtgtcccggaccgtgagtcccaagtcatttgcaaaggcattttccagtggctatctacttggagaagttctacacaagtttgaacttcaggatgatttttcagaatttttggacagcagggtttcaagtgccaaacttaataatttttctcgcttggagccaacacttaaccttctgggtgtgcagtttgatcagaatgtggcccatggcatcatcacagaaaagcctggggtggcaacaaagctgttatatcaattgtacattgctcttcagaaaaagaagaaaagtggactgactggagtggagatgcaaaccatgcaacgtctgacaaatttaagacttcaaaacatgaaaagtgatacttttcaagagagacttagacacatgataccacgtcaaactgatttcaatctgatgcggattacatacaggtttcaagaaaaatataaacacgtgaaagaagatcttgcccatttgcattttgagaaacttgaaagatttcaaaaactcaaggaagagcaaagatgttttgatattgaaaagcaatacttaaacagaagacgacaaaatgaaataatggccaaaatccaagcagctattatacagattcctaaacctgcatcaaatcgtactttgaaagcactcgaggcccaaaaaatgatgaaaaagaaaaaagaggcagaagatgtggctgatgaaattaagaagttcgaagcattaataaaaaaggatctccaagcaaaagaaagtgcatccaagacttctttagatacagcaggccagacaaccaccgatttgttaaatacttactcagatgacgagtacattaaaaaaatccagaagcgccttgaagaagatgcttttgcacgagagcaaagggagaaaagacggcggaaattgttaatggaccagttaatagcccacgaagcacaagaggaggcttatcgggaggaacagctgattaaccggctgatgcggcagtcccagcaggagcgcaggattgccgtgcagctcatgcatgttcggcatgaaaaggaagttttatggcaaaacagaattttcagagaaaaacaacatgaggaaagacgacttaaagatttccaggatgctcttgatcgagaagcggctttggcaaaacaagccaagattgactttgaagaacaattccttaaagaaaagagatttcatgatcagattgctgtggaaagagctcaagctcgttatgaaaagcattattcagtatgtgcagaaattttggatcaaatagttgatttgtccactaaagtggcagactatcgaatgttgacaaataatctgattccgtataagttgatgcatgattggaaggaactattttttaatgcaaaacccatatatgaacaagcctctgttaagacactacctgctaacccctcaagagaacaacttacagaactggagaaaagggacttgctagataccaatgattatgaagaatataagaacatggttggagagtgggccttaccagaagaaatggttgacaatttaccaccctccaacaattgcatactgggccatattcttcacaggctagctgaaaaatctcttcctcctcgagcggaatcaacaacacctgaattaccttcatttgctgttaaaggatgcttattggggaaaacattaagtggaaaaactaccattttaaggtctctacaaaaagactttcctatacagatactttctattgacactcttgtccaagaagctatccaagcatttcatgacaatgaaaaagtcagtgaggttctaccaattcagaaaaatgatgaagaagatgctctaccagttctgcaagaggagattaaagaaagccaggatccacaacatgtattttcagctggtccagtttcagatgaagtattaccagaaacagaaggtgctaatgctgataaaacaccaaaagctgaagaagtcaaatcaagtgatagtttcttaaaactcactacacgtgctcagcttggtgcaaaatcagaacagttgctgaagaaaggaaagagcattcctgatgtgctgcttgttgacatcatagtaaatgctattaatgagatacctgtgaatcaagactgtatcctagatggttttccaatgactttaaaccaagcacagcttctggaagaagctcttacaggctgcaatagaaacctcacagaagtggaaagaaaaaaagcacaaaaatccacattggctattgatcctgcgacttccaaagaaatacctcttccctctcctgcatttgattttgtcatattattagatgtttcagatacttcctcaatgagtcgcatgaatgatattatagctgaagaattgtcctataaaactgctcacgaagatatcagtcaacgtgtagctgctgaaaaccaagataaggatggagaccaaaatttaagagaccagatacaacatagaattataggcttcttggacaactggcctttattggagcaatggttttcagagccagaaaatattttgataaaaatcaatgctgaaatagataaggaatctttatgtgaaaaagtaaaagaaattcttacgactgaaatagcaaaaaaaaagaataaagttgagaagaaattagaagaaaaggaagctgagaaaaaagcagcagcttccctggctgagcttccacttcctacacctcctcctgctcctcctcctgaaccagaaaaagagaaggaaattcatcaaagccatgtggcttcaaaaactcctactgcaaaaggaaaacctcaatcagaagccccgcatggtaagcaagaatctcttcaggaaggaaaagggaagaaaggtgagaccgcactcaaaagaaaaggttctcctaaaggaaaatcatcaggaggaaaagtaccagtaaagaaatcacctgctgactctacagatacatcacctgttgcaatagtgccacagccacctaagccaggatcagaagaatgggtctatgtgaatgaaccagttcctgaggaaatgcctttgtttttagtaccttactgggaactaatagaaaattcctatataaacaccatcaaaacagtactcaggcatctgagggaagaccagcatactgtgcttgcttacttatatgagattagaacaagtttccaggagtttctaaagcgtccggatcacaagcaagattttgtagctcaatggcaggctgatttcaactcccttcctgatgacctgtgggatgatgaggaaacaaaggctgaactacatcaacgagtgaatgatctgcgagaccgcctgtgggacatttgtgatgcccggaaggaagaggcggagcaggagcggcttgacatcattaatgagagctggttacaggacactcttggaatgacaatgaaccatttcttttccctgatgcaggcagagctgaaccgtttccaagatacaaagagactccttcaagattattactggggaatggaaagtaaaatcccagtagaggacaacaagagatttactcgaatccctttggtccaactggatagtaaagacaattctgaaagccagcttagaattcctctagttcctcgaatatccatttctctggaaacagttacacccaaaccaaaaacaaaatcagtactgaagggcaagatggataactccctagaaaacgttgagtccaactttgaggccgatgaaaagttggtcatggacacctggcagcaggcttctttagcagtatctcacatggtggctgctgaaattcatcagaggcttatggaagaagaaaaagaaaaccagccagcagaccccaaagaaaaatctcctcagatgggtgcaaataaaaaagtcaaaaaggagccacccaagaaaaaacaggaagacaaaaaacccaaaggtaaatcaccacctatggcagaagcaactcctgtcatagtaacaacagaggaaattgctgaaatcaaaaggaaaaatgaactgagggtcaaaataaaagaagaacaccttgctgccttgcaatttgaagaaatagccacgcaatttcgacttgaactgataaagacaaaagcattggctcttcttgaagatttagtaacaaaggtggttgatgtatataaactcatggaaaaatggcttggtgagaggtatttgaatgaaatggccagtacagaaaaattaactgacgtagctcgctatcacattgaaacatctacaaaaattcagaatgaactttatttaagccaagaagacttcttcattaatggcaatataaaagtcttcccagatcctcccccatcaatacgtcctccacctgtagaaaaggaagaagatggtaccctgaccattgaacagcttgacagtcttcgagatcagttcttagatatggcacctaaaggcataataggaaataaagcatttactgacattctgatcgatttggtgaccctgaaccttggcacaaacaactttcctagtaattggatgcaccttacccaacctgaattacaggaattaacatctttattaacagtcaactccgagttcgtggactggcggaagttcctgttagtaacctcaatgccttggcccattcccttggaggaggagctccttgagacccttcagaagttcaaggctgtggataaggagcagttgggcaccatcacttttgagcagtatatgcaggctggtctgtggtttacaggagatgaagatataaaaattccagaaaatcctcttgaaccccttccatttaataggcaggagcatcttatagagtttttctttaggctatttgctgactatgagaaggatccaccccagcttgactacacacagatgctgctttactttgcttgccacccagacaccgtggaaggagtctacagggccctcagtgtggctgttggaactcatgtcttccaacaagtcaaagcttccattccaagtgcagaaaagacctcctcaactgatgcaggtccagctgaggaatttcctgaacctgaggaaaatgctgcaagagaagaaaggaaattaaaagacgacacggagaaaagggaacagaaggatgaagaaatccctgaaaatgcaaacaatgaaaagatgtccatggaaacactactcaaagtgttcaaagggggaagtgaagcacaggactccaatagatttgccagccacctaaagatagagaacatttatgcagagggcttcataaaaacatttcaagacctaggtgccaagaacctggagccaattgaagtcgctgttctcttgaagcatccttttattcaagacctgatttcaaattattcagactataagtttcctgtacacatcatctatgtagtggaaatgatagtgtgtgcaaaaggttgggcaccacttccatcaggaaaacagtgtgcaagatggagaaactaaggacaaaccccagagaaactggacaaacccagcagaagaaaggaagaactgcaactcagaaatcacataaccaccaagcaggtctggaccacacatgctaaatgtgcatccactatggcgagtcccaggcctttaacagcagggactaaggagggcagaggctgacaccaaccccctttcatactgtagcactacatccctctcagataccagtttaacacgaagtctccctgtttgactcctgtgagttgtgtattgaactacaaagtgtttgctgagttgaaaataaaagcgctttcactttgatagaatgtagattgtgtatcttgacttctcaatgatagcaagttacattttgcagttttcttcctatacccacaaatgaaactattcagacttaaatatcttcctgtgtgcctaaacgtttttgttctaagttgctgatccttttaaatattaaattattaattaatattaaaattaattttattgcctgtattagtataa

SEQ ID NO: 185559 - DNA, 547 bp, Homo sapiens
  Payload ID: 16540
  Gene Symbol: SPEF2
  Gene Name: sperm flagellar 2
  ENST ID: ENST00000508817
  CDS Start-End: 1-348
caaaaatccacattggctattgatcctgcgacttccaaagaaatacctcttccctctcctgcatttgattttgtcatattattagatgtttcagatacttcctcaatgagtcgcatgaatgatattatagaccagcaggatcctgggctgagtgggagcctagccactagggttgggtgcaacatgcagttctgcagtgctcggggtctatggaggaacctgaagaacatcttcacagagaaacacactacatccaaagccacgtgggctacaaagtcctgccagggctgggctgagctgaagaattgtcctataaaactgctcacgaagatatcagtcaacgtgtagctgctgaaaaccaagataaggatggagaccaaaatttaagagaccagatacaacatagaattataggcttcttggacaactggcctttattggagcaatggttttcagagccagaaaatattttgataaaaatcaatgctgaaatagataaggaatctttatgtgaaaaagtaaaagaaattcttacgactgaaatagc

SEQ ID NO: 185560 - DNA, 4707 bp, Homo sapiens
  Payload ID: 16540
  Gene Symbol: SPEF2
  Gene Name: sperm flagellar 2
  ENST ID: ENST00000509059
  CDS Start-End: 155-2986
gtcccctcttctctaaggcctttcgcctagttccagcctggatacgcttccatagcaaagggttgcccttggctacaggaggacgcgggctggcaggcttggttcctggcgagtttctaagcccccgcctgcggtctgaggcaccggctgaaccatgtcggagatcctgtgccagtggctcaacaaggagttgaaggtgtcccggaccgtgagtcccaagtcatttgcaaaggcattttccagtggctatctacttggagaagttctacacaagtttgaacttcaggatgatttttcagaatttttggacagcagggtttcaagtgccaaacttaataatttttctcgcttggagccaacacttaaccttctgggtgtgcagtttgatcagaatgtggcccatggcatcatcacagaaaagcctggggtggcaacaaagctgttatatcaattgtacattgctcttcagaaaaagaagaaaagtggactgactggagtggagatgcaaaccatgcaacgtctgacaaatttaagacttcaaaacatgaaaagtgatacttttcaagagagacttagacacatgataccacgtcaaactgatttcaatctgatgcggattacatacaggtttcaagaaaaatataaacacgtgaaagaagatcttgcccatttgcattttgagaaacttgaaagatttcaaaaactcaaggaagagcaaagatgttttgatattgaaaagcaatacttaaacagaagacgacaaaatgaaataatggccaaaatccaagcagctattatacagattcctaaacctgcatcaaatcgtactttgaaagcactcgaggcccaaaaaatgatgaaaaagaaaaaagaggcagaagatgtggctgatgaaattaagaagttcgaagcattaataaaaaaggatctccaagcaaaagaaagtgcatccaagacttctttagatacagcaggccagacaaccaccgatttgttaaatacttactcagatgacgagtacattaaaaaaatccagaagcgccttgaagaagatgcttttgcacgagagcaaagggagaaaagacggcggaaattgttaatggaccagttaatagcccacgaagcacaagaggaggcttatcgggaggaacagctgattaaccggctgatgcggcagtcccagcaggagcgcaggattgccgtgcagctcatgcatgttcggcatgaaaaggaagttttatggcaaaacagaattttcagagaaaaacaacatgaggaaagacgacttaaagatttccaggatgctcttgatcgagaagcggctttggcaaaacaagccaagattgactttgaagaacaattccttaaagaaaagagatttcatgatcagattgctgtggaaagagctcaagctcgttatgaaaagcattattcagtatgtgcagaaattttggatcaaatagttgatttgtccactaaagtggcagactatcgaatgttgacaaataatctgattccgtataagttgatgcatgattggaaggaactattttttaatgcaaaacccatatatgaacaagcctctgttaagacactacctgctaacccctcaagagaacaacttacagaactggagaaaagggacttgctagataccaatgattatgaagaatataagaacatggttggagagtgggccttaccagaagaaatggttgacaatttaccaccctccaacaattgcatactgggccatattcttcacaggctagctgaaaaatctcttcctcctcgagcggaatcaacaacacctgaattaccttcatttgctgttaaaggatgcttattggggaaaacattaagtggaaaaactaccattttaaggtctctacaaaaagactttcctatacagatactttctattgacactcttgtccaagaagctatccaagcatttcatgacaatgaaaaagtcagtgaggttctaccaattcagaaaaatgatgaagaagatgctctaccagttctgcaagaggagattaaagaaagccaggatccacaacatgtattttcagctggtccagtttcagatgaagtattaccagaaacagaaggtgctaatgctgataaaacaccaaaagctgaagaagtcaaatcaagtgatagtttcttaaaactcactacacgtgctcagcttggtgcaaaatcagaacagttgctgaagaaaggaaagagcattcctgatgtgctgcttgttgacatcatagtaaatgctattaatgagatacctgtgaatcaagactgtatcctagatggttttccaatgactttaaaccaagcacagcttctggaagaagctcttacaggctgcaatagaaacctcacagaagtggaaagaaaaaaagcacaaaaatccacattggctattgatcctgcgacttccaaagaaatacctcttccctctcctgcatttgattttgtcatattattagatgtttcagatacttcctcaatgagtcgcatgaatgatattatagctgaagaattgtcctataaaactgctcacgaagatatcagtcaacgtgtagctgctgaaaaccaagataaggatggagaccaaaatttaagagaccagatacaacatagaattataggcttcttggacaactggcctttattggagcaatggttttcagagccagaaaatattttgataaaaatcaatgctgaaatagataaggaatctttatgtgaaaaagtaaaagaaattcttacgactgaaatagcaaaaaaaaagaataaagttgagaagaaattagaagaaaaggaagctgagaaaaaagcagcagcttccctggctgagcttccacttcctacacctcctcctgctcctcctcctgaaccagaaaaagagaaggaaattcatcaaagccatgtggcttcaaaaactcctactgcaaaaggaaaacctcaatcaggtgattgacagaatgatttataatcctgttttcagtttcttatttttactcagtaaagaattataaattatagtctatctacattcagactttgggcaacttcaatcatatgaaacaaggctttacactcagatggaagtggaaaagccctcggagtagctaaaagcgtagttgttacaaagcccaacttctttgccatgtaggaggagacatggagtcatcacacctaggtctactgattagagtaagaccacagacgagaagaggaaaaggcacagagtaacaggtaacttcaggcagatcaagaggatacacgtctgtgtgctgaactatagagttacatttatgtaatgagtaagaacatcttaataaaataagaatgagtatagctggttttccaccagaataagggaacaaattaacagcaaccattagaactagaatttatatgtaattgtaaatcttcaggactatgtgattataaaagtatagaaacaagctcctgccatctcagtaaacatatatttatggacacagagataaagagcctagatagagaacacttttagtttaagtttgttctagatccttaaccgctatggaccataagtctagcattaagtggcagacaatgaatataatgacaaaagtgaagtgcttaattgttgtaatgcatgatattggtagagtgtcagtatccatttgtgtgtgtatataaaacaaatgaggctctggtttctagtttcagctttataaatggctgactgtgcagttacaccatgtctacctaagtatctttgatactgtgtcatgaccacatttctaaactctatagtctttctgcctcacggagatttgagataggtcttaatttttaaaattaaacttattcatattaaacaaagacatatgaagactttagtaagatatattatgatatattaaagaccattctgctccaggaaattagaaattaactacaggcaaaatacacacatcctaaaaaatgtttttatcatgtcaacaataaaacacaaagacatgaattaaacatacacccttttcccgctgtctcattaggaaattaaaaaacaattcagaggtctggaggaaaatggaaatatttaaaatgctttttagaactggggaagacaggccaagcatggtggctcatccctgtaatcccagcactttgggaggctgaggtgggcagatcaccagaaatcaggagttcgagaccccgctggccaacagggcaaaacccatctctaccaaaaatacaaaaattagctgggcgtggtggcaggcacctgtaatcccagctgcttgggaggctgaggcaggagaattgcttgaacctgagaggcggaggttgcagtgagccgagattgccccactgcactctagcctgggggatagagtgaaactctacctccaaaaaaaagaaaagaaaaataactgaggaagacagttttcacagtgggtcaggtgagcctagaattatcgaatatcgtcctttaacctatagctatgactctaggttaaagctcctcctcagcttgctccagtcaagagtatctatgtatttgagccatttcctgaaaccagactctagtgtttctgatcagaccagctcagtctttaagtttctgaagtttgtttgctattttataattatattcttgaatactgtgcattgaagaaataataaatctattgttgctttaaa

SEQ ID NO: 185561 - DNA, 1500 bp, Homo sapiens
  Payload ID: 16540
  Gene Symbol: SPEF2
  Gene Name: sperm flagellar 2
  ENST ID: ENST00000504054
  CDS Start-End: 335-1500
gcaatctcggctggctgcaagctccgcctccctcccagtagccaggactacaggcctacaggcgcccgccaccacacccggctaattttctgtatttttagtagagacaggctttcaacgtgttagccaggattcttatttgtagtaatcaagcacactgattctaacttaacagagcagaacatcaatgtattagttttcaaagagggctctatttgccctaggtccgtggttaccaagaaacaaggctattttctaattgttgtaggccaaggatttcagagggcttgataggggtctgggacttgtgtctatggaatagcaggaatagaagatgaacttgggtcatgtgaagggtatttggcttcaaattattaacactggagacaagaacatggttggagagtgggccttaccagaagaaatggttgacaatttaccaccctccaacaattgcatactgggccatattcttcacaggctagctgaaaaatctcttcctcctcgagcggaatcaacaacacctgaattaccttcatttgctgttaaaggatgcttattggggaaaacattaagtggaaaaactaccattttaaggtctctacaaaaagactttcctatacagatactttctattgacactcttgtccaagaagctatccaagcatttcatgacaatgaaaaagtcagtgaggttctaccaattcagaaaaatgatgaagaagatgctctaccagttctgcaagaggagattaaagaaagccaggatccacaacatgtattttcagctggtccagtttcagatgaagtattaccagaaacagaaggtgctaatgctgataaaacaccaaaagctgaagaagtcaaatcaagtgatagtttcttaaaactcactacacgtgctcagcttggtgcaaaatcagaacagttgctgaagaaaggaaagagcattcctgatgtgctgcttgttgacatcatagtaaatgctattaatgagatacctgtgaatcaagactgtatcctagatggttttccaatgactttaaaccaagcacagcttctggaagaagctcttacaggctgcaatagaaacctcacagaagtggaaagaaaaaaagcacaaaaatccacattggctattgatcctgcgacttccaaagaaatacctcttccctctcctgcatttgattttgtcatattattagatgtttcagatacttcctcaatgagtcgcatgaatgatattatagctgaagaattgtcctataaaactgctcacgaagatatcagtcaacgtgtagctgctgaaaaccaagataaggatggagaccaaaatttaagagaccagatacaacatagaattataggcttcttggacaactggcctttattggagcaatggttttcagagccagaaaatattttgataaaaatcaatgctgaaatagataaggaatctttatgtgaaaaagtaaaagaaattcttacgactgaaatagc

SEQ ID NO: 185562 - DNA, 381 bp, Homo sapiens
  Payload ID: 16540
  Gene Symbol: SPEF2
  Gene Name: sperm flagellar 2
  ENST ID: ENST00000506759
  CDS Start-End: 1-363
cccaaaccaaaaacaaaatcagtactgaagggcaagatggataactccctagaaaacgttgagtccaactttgaggccgatgaaaagttggtcatggacacctggcagcaggcttctttagcagtatctcacatggtcctgggtctaccaagatgtcttctcttttcacaacatgccaagccttcttcgagtttccatgaaatatcgcattcaaacagaaagcagcatcaactttccaaaagattttgtgaaagtggtagaagaggaccttgcagcacagatctcacagcaaacaaaatttccaactgggcactttccaagtcccttcttggcctctctgccttcaggcttctttttctctgaccttctcatacaagcagc

SEQ ID NO: 185563 - DNA, 2142 bp, Homo sapiens
  Payload ID: 16540
  Gene Symbol: SPEF2
  Gene Name: sperm flagellar 2
  ENST ID: ENST00000513078
  CDS Start-End: 1-346
aattcagaatgaactttatttaagccaagaagacttcttcattaatggcaatataaaagtcttcccagatcctcccccatcaatacgtcctccacctgtagaaaaggaagaagatggtaccctgaccattgaacagcttgacagtcttcgagatcagttcttagatatggcacctaaagagtgctctgagaactgctttcaaaggccttcaccttcgacctgtgatgccttctcaaataggagacaggaagtggcttcatggattacaggcagccctccagaactttctcaagggatatcctgcaattgttcggcaactgcactcagcaggcagaggcaaaagtgacaccagtcaaaagaaacccaaagaacttctggagtcccttctccaagctgacattgttaaatttgcccacttcttgttggatgtcatgaatgtccttagcattctgtcctgtgtcaataagaatagaaattcctcaattgctgacatatttgccactttagagtcaatgctggaaatgctccaaatgtatcaaacaagactagggccaaaagaacgcatggtggattcagccacacactttcatggtaactgcctcagagggaaagaaaacatttctgctgtgagaaacattgttttaacacatcttatcaagagacttcaaggctgtttcagagatgccagccaaaatgtggtgagggctaccgtgattggaagttttaaattgtggcccacaaagataaatcaagaatttggagaaaaagaggtatccatcctgactgcacattatgaaccagtattagaagctgccaatgtgaaacttagtgaagtggatactgaatggagcatgttgaaattagagatttatgccagatttcagaacattcgaaaattgacctgggattttgtgaattccatttacttacacaagtatccaaatatcctgacactagtcgacctagtgttgacccttcctgcaagttcagctgaagcagaacatggctttagtcagatgaaatggaccaagtcacatatgcatgcaaaaatcaaggctgaaagcataataggaaataaagcatttactgacattctgatcgatttggtgaccctgaaccttggcacaaacaactttcctagtaattggatgcaccttacccaacctgaattacaggaattaacatctttattaacagtcaactccgagttcgtggactggcggaagttcctgttagtaacctcaatgccttggcccattcccttggaggaggagctccttgagacccttcagaagttcaaggctgtggataaggagcagttgggcaccatcacttttgagcagtatatgcaggctggtctgtggtttacaggagatgaagatataaaaattccagaaaatcctcttgaaccccttccatttaataggcaggagcatcttatagagtttttctttaggctatttgctgactatgagaaggatccaccccagcttgactacacacagatgctgctttactttgcttgccacccagacaccgtggaaggagtctacagggccctcagtgtggctgttggaactcatgtcttccaacaagtcaaagcttccattccaagtgcagaaaagacctcctcaactgatgcaggtccagctgaggaatttcctgaacctgaggaaaatgctgcaagagaagaaaggaaattaaaagacgacacggagaaaagggaacagaaggatgaagaaatccctgaaaatgcaaacaatgaaaagatgtccatggaaacactactcaaagtgttcaaagggggaagtgaagcacaggactccaatagatttgccagccacctaaagatagagaacatttatgcagagggcttcataaaaacatttcaagacctaggtgccaagaacctggagccaattgaagtcgctgttctcttgaagcatccttttattcaagacctgatttcaaattattcagactataagtttcctgatattaaaataattctccaaaggagtgaacatgtacaaggaagtgatggagagagatcaccttcaagacatacagaggaaaagaaatgaagacaaaagagtgtgatttttttaattctgcaataaatcttccaaaaattaaatgtga

SEQ ID NO: 185564 - DNA, 671 bp, Homo sapiens
  Payload ID: 16540
  Gene Symbol: SPEF2
  Gene Name: sperm flagellar 2
  ENST ID: ENST00000505847
  CDS Start-End: 110-547
gcttccatagcaaagggttgcccttggctacaggaggacgcgggctggcaggcttggttcctggcgagtttctaagcccccgcctgcggtctgaggcaccggctgaaccatgtcggagatcctgtgccagtggctcaacaaggagttgaaggtgtcccggaccgtgagtcccaagtcatttgcaaaggcattttccagtggctatctacttggagaagttctacacaagtttgaacttcaggatgatttttcagaatttttggacagcagggtttcaagtgccaaacttaataatttttctcgcttggagccaacacttaaccttctgggtgtgcagtttgatcagaatgtggcccatggcatcatcacagaaaagcctggggtggcaacaaagctgttatatcaattgtacattgctcttcagaaaaagaagaaaagtggactgactggagtggagatgcaaaccatgcaacgtctgacaaatttaagacttcaaaacatgaaaagtgatacttttcaagagagactggggccacttatcagttgagaaaaagagtcagtggcaggagagatgaaaatggtacaaggacaagatggaaagaggccctctggggacggaaagaggaatatgcaatcaatggttcatgtggaagaggtgatatcataggaaa

SEQ ID NO: 185565 - DNA, 800 bp, Homo sapiens
  Payload ID: 16540
  Gene Symbol: SPEF2
  Gene Name: sperm flagellar 2
  ENST ID: ENST00000510777
  CDS Start-End: 79-800
aggaggacgcgggctggcaggcttggttcctggcgagtttctaagcccccgcctgcggtctgaggcaccggctgaaccatgtcggagatcctgtgccagtggctcaacaaggagttgaaggtgtcccggaccgtgagtcccaagtcatttgcaaaggcattttccagtggctatctacttggagaagttctacacaagtttgaacttcaggatgatttttcagaatttttggacagcagggtttcaagtgccaaacttaataatttttctcgcttggagccaacacttaaccttctgggtgtgcagtttgatcagaatgtggcccatggcatcatcacagaaaagcctggggtggcaacaaagctgttatatcaattgtacattgctcttcagaaaaagaagaaaagtggactgactggagtggagatgcaaaccatgcaacgtctgacaaatttaagacttcaaaacatgaaaagtgatacttttcaagagcaatacttaaacagaagacgacaaaatgaaataatggccaaaatccaagcagctattatacagattcctaaacctgcatcaaatcgtactttgaaagcactcgaggcccaaaaaatgatgaaaaagaaaaaagaggcagaagatgtggctgatgaaattaagaagttcgaagcattaataaaaaaggatctccaagcaaaagaaagtgcatccaagacttctttagatacagcaggccagacaaccaccgatttgttaaatacttactcagatgacgagtacattaaaaaaatccagaagcgccttga

SEQ ID NO: 185566 - DNA, 3146 bp, Homo sapiens
  Payload ID: 16540
  Gene Symbol: SPEF2
  Gene Name: sperm flagellar 2
  ENST ID: ENST00000506526
  CDS Start-End: 1-455
aagaacaccttgctgccttgcaatttgaagaaatagccacgcaatttcgacttgaactgataaagacaaaagcattggctcttcttgaagatttagtaacaaaggtggttgatgtatataaactcatggaaaaatggcttggtgagaggtatttgaatgaaatggccagtacagaaaaattaactgacgtagctcgctatcacattgaaacatctacaaaaattcagaatgaactttatttaagccaagaagacttcttcattaatggcaatataaaagtcttcccagatcctcccccatcaatacgtcctccacctgtagaaaaggaagaagatggtaccctgaccattgaacagcttgacagtcttcgagatcagttcttagatatggcacctaaaggactgaatttctcaatgcacatcatctcagcgaggctcatgccaaggcctcattaatggaagcaacaagtagctctccagtgaacagagccaccaccaaactaatgatgaggaccatgagcaaagtaaccctcgggagagtagagaacttattcagatcatgccatgctattgccaagaccggacgtcccctcaaagattttatttggatgtgcaaattagatgatatgaaaggtgttgatattggcccagtattcagaactaaaaaatcagcaagaatgtttacatactttattgctgaagtagaacgaaaaaatctaagagagaaattagaaaaaagtaaatttttctctgtcatcagtgatggaatcatagacagtttaatcaaagaagccgaacttgtctatgtgcagtttgcacatgcaggaaaggtgcactgtcaaattgttggggtacagatagtagaaagaaatgatcctctggcaataaaaaatgccattgagaaaactctagagataaatcttcaacttagactgtcgagccaagactgggcaaagaagctggttggttttggaagtgatggtacccatagcatagagggagagaacaacgaggtggccctactattaagagaaatacaaccatgtgtacaaactgtatattgctttgcacatcaccttgaactatcttacaaagcggtgttccagaacattcctctgtacaatgatgtcaaagacctccttcacagcatttatcacttttatcacaattctcctcttcataagagtgctctgagaactgctttcaaaggccttcaccttcgacctgtgatgccttctcaaataggagacaggaagtggcttcatggattacaggcagccctccagaactttctcaagggatatcctgcaattgttcggcaactgcactcagcaggcagaggcaaaagtgacaccagtcaaaagaaacccaaagaacttctggagtcccttctccaagctgacattgttaaatttgcccacttcttgttggatgtcatgaatgtccttagcattctgtcctgtgtcaataagaatagaaattcctcaattgctgacatatttgccactttagagtcaatgctggaaatgctccaaatgtatcaaacaagactagggccaaaagaacgcatggtggattcagccacacactttcatggtaactgcctcagagggaaagaaaacatttctgctgtgagaaacattgttttaacacatcttatcaagagacttcaaggctgtttcagagatgccagccaaaatgtggtgagggctaccgtgattggaagttttaaattgtggcccacaaagataaatcaagaatttggagaaaaagaggtatccatcctgactgcacattatgaaccagtattagaagctgccaatgtgaaacttagtgaagtggatactgaatggagcatgttgaaattagagatttatgccagatttcagaacattcgaaaattgacctgggattttgtgaattccatttacttacacaagtatccaaatatcctgacactagtcgacctagtgttgacccttcctgcaagttcagctgaagcagaacatggctttagtcagatgaaatggaccaagtcacatatgcatgcaaaaatcaaggctgaaagcataataggaaataaagcatttactgacattctgatcgatttggtgaccctgaaccttggcacaaacaactttcctagtaattggatgcaccttacccaacctgaattacaggaattaacatctttattaacagtcaactccgagttcgtggactggcggaagttcctgttagtaacctcaatgccttggcccattcccttggaggaggagctccttgagacccttcagaagttcaaggctgtggataaggagcagttgggcaccatcacttttgagcagtatatgcaggctggtctgtggtttacaggagatgaagatataaaaattccagaaaatcctcttgaaccccttccatttaataggcaggagcatcttatagagtttttctttaggctatttgctgactatgagaaggatccaccccagcttgactacacacagatgctgctttactttgcttgccacccagacaccgtggaaggagtctacagggccctcagtgtggctgttggaactcatgtcttccaacaagtcaaagcttccattccaagtgcagaaaagacctcctcaactgatgcaggtccagctgaggaatttcctgaacctgaggaaaatgctgcaagagaagaaaggaaattaaaagacgacacggagaaaagggaacagaaggatgaagaaatccctgaaaatgcaaacaatgaaaagatgtccatggaaacactactcaaagtgttcaaagggggaagtgaagcacaggactccaatagatttgccagccacctaaagatagagaacatttatgcagagggcttcataaaaacatttcaagacctaggtgccaagaacctggagccaattgaagtcgctgttctcttgaagcatccttttattcaagacctgatttcaaattattcagactataagtttcctgatattaaaataattctccaaaggagtgaacatgtacaaggaagtgatggagagagatcaccttcaagacatacagaggaaaagaaatgaagacaaaagagtgtgatttttttaattctgcaataaatcttccaaaaattaaatgtga

SEQ ID NO: 185567 - DNA, 775 bp, Homo sapiens
  Payload ID: 16541
  Gene Symbol: SMCP
  Gene Name: sperm mitochondria-associated cysteine-rich protein
  Uniprot ID: P49901
  ENST ID: ENST00000368765
  CDS Start-End: 151-501
ggttcagaaggctttggcttctgatagtcatggactcactaggctgctgaggaagatcaataatacctactggaatcagtcatgagaagtcaagcatggaaattgtgaattgtgtgtgtggccagaccagtacctccaagtgttcagaagatgtgtgaccagacaaaacacagtaaatgctgcccagcaaaaggcaatcaatgctgcccaccacagcagaaccagtgctgccagtcaaaaggcaatcaatgctgcccaccaaaacagaaccagtgctgccagccaaaaggcagtcaatgctgcccaccaaaacacaatcactgctgccagccaaaacccccatgctgcattcaggccaggtgctgtggtttggagaccaagcctgaagtctcaccccttaacatggagtctgagcccaactcaccgcaaactcaggacaagggctgtcaaacccagcagcagccccatagcccacaaaatgagtccaggccaagcaaatgagagcagaagaagtcaaacaaagaagaagtccctggggccatgcctttcactttgtagggtgggggattactgagagtcaggctagacctgtgtttagagaagcagttttcacagtgactaccatttccacccaatgagaggctcctatttcccatcatagctccctaccctagggaggcctccatctggaaatgggaggatgaagaggctagaatcatctttcctagtgatcctgacatttagacagcacagaaataaagagcaataaaaagaa

SEQ ID NO: 185568 - DNA, 691 bp, Homo sapiens; identical to SEQ ID NO: 185156
  Payload ID: 16542
  Gene Symbol: SPANXA1
  Gene Name: sperm protein associated with the nucleus, X-linked, family member A1
  Uniprot ID: Q9NS26
  ENST ID: ENST00000370519
  CDS Start-End: 334-627

SEQ ID NO: 185569 - DNA, 386 bp, Homo sapiens
  Payload ID: 16542
  Gene Symbol: SPANXA1
  Gene Name: sperm protein associated with the nucleus, X-linked, family member A1
  Uniprot ID: Q9NS26
  ENST ID: ENST00000615379
  CDS Start-End: 40-333
caaaagcctgccgctgacattgaagaaccaatatatacaatggacaaacaatccagtgccggcggggtgaagaggagcgtcccctgtgattccaacgaggccaacgagatgatgccggagaccccaactggggactcagacccgcaacctgctcctaaaaaaatgaaaacatctgagtcctcgaccatactagtggttcgctacaggaggaactttaaaagaacatctccagaggaactgctgaatgaccacgcccgagagaacagaatcaaccccctccaaatggaggaggaggaattcatggaaataatggttgaaatacctgcaaagtagcaagaagctacatctctcaaccttgggcaatgaaaataaagtttgagaagctg

SEQ ID NO: 185570 - DNA, 4965 bp, Homo sapiens
  Payload ID: 16543
  Gene Symbol: SSFA2
  Gene Name: sperm specific antigen 2
  Uniprot ID: P28290
  ENST ID: ENST00000320370
  CDS Start-End: 113-3883
agctccccggggccccctgcccggccgggcgctgacagcaagggcgggggtccctgccgccgccttgtctcgcgcagggtccggctggggtagcggagcccccagtgcggccatggaccggcccctgtcgtcgtcggcggaggcggaggaggaactggagtggcaagtggcgagtcgcaggaggaaggcctgggccaagtgccgcagctcctggcaagcgtcggagacggaggatctgtccacagaagcgacgacgcaggacgaggaggaggacgaggaggaggacctccccggcgcgcagctgccggcagcggggggaagaggaaacgtgcccaacgagaagatcgcgatatggctcaaggactgccgtacacctttgggagcctcactggatgaacaaagcagtagtacactcaagggtgtgcttgtgagaaatggaggaagttttgaagatgatttgtcattgggagctgaagccaaccacctccatgaaagtgatgctcaaattgaaaactgcaataatatcttggccaaagagagaagattacagtttcatcagaaagggagaagtatgaattccactggatctgggaaaagtagtgggacagtttcaagtgtttcagaattgttggaactttatgaggaagatcctgaagaaattctttataatcttggatttggacgtgatgaaccagatattgcttctaaaattccttccagattttttaattcatcatcctttgccaaagggatagatattaaagtatttttgagtgctcagatgcaacggatggaagtagaaaacccaaattatgctttaacaagccgttttcgtcaaattgaagtgcttactactgtggccaatgcgttttcttctttatattctcaagtctccgggacgcccctgcagagaattggaagtatgtcctcagtgacctctaacaaggagacagacccacctccacctttaactcgaagtaacactgcaaatcgtttaatgaaaacactctcaaaactgaatttatgtgttgataaaacagagaaaggagaaagtagtagtccttctccatcagctgaaaaaggaaagattctaaatgtttcagtgattgaagaaagtggcaataaaaacgatcaaaagtctcaaaaaattatgaagaagaaagagtcatcttctatgttggctacagttaaagaagaagtctctggtagttcagcagctgttacggagaatgctgatagtgatagaatttctgatgaagcaaatagtaattttaaccaaggaactgaaaatgaacaaagtaaagaaactcaaagtcatgagagtaaactgggtgaggaatctggtattgtagaatccaaattagatagtgatttcaacatatccagccacagtgagctggaaaatagcagtgagctgaaaagtgtccatatatccacacctgaaaaagagccttgtgcaccactgacaataccatccataagaaatataatgacacagcagaaggactccttcgaaatggaagaggttcaaagtacggagggagaagctcctcatgttccagccacttaccagctaggtcttacgaagtcgaaaagagatcatctgttacgtactgcaagtcagcattccgatagcagtggttttgctgaagattctacagactgcctatcccttaatcatcttcaggttcaggagtccttgcaggctatggggagtagtgctgatagttgtgacagtgagacaacagttacgtcacttggtgaagaccttgccacaccaacagcacaagaccagccttattttaatgaatcagaggaggagtctcttgtccctcttcagaagggactagagaaggcagcagcagttgcagacaaaagaaaatcaggtagccaggatttccctcagtgcaacaccattgagaatacaggaactaaacagtccacctgtagtccaggggatcatatcattgaaattactgaagtggaagaggatttgtttccagcagagacagtagagctactgagggaagcaagtgctgaaagtgatgtgggtaaaagcagtgaaagtgaatttactcagtataccacacaccatattctgaaatcattggcttctattgaagctaaatgcagtgatatgagctctgaaaatacaactgggcctccctcttccatggacagagttaatacagctttgcaaagagctcaaatgaaggtttgcagtctgtctaatcaaaggatggggcgtagcctgctaaaatcaaaagatttgttaaaacaaaggtacttatttgcaaaagctggctatcctctaagaaggtctcagtctttaccaaccaccttattgagcccagtaagggttgtgtcctctgtcaatgttcgattatctccaggaaaagagaccagatgcagcccaccttccttcacctataagtacacacctgaagaggagcaggaattggaaaagcgggtgatggaacatgatggtcagtctttagttaaatcgaccattttcatctctccatcatctgtgaagaaagaagaagccccccagagtgaggcgccgcgggtggaggaatgccatcatggaaggactcctacctgttcacggcttgctccaccaccaatgtctcagtctacctgttcccttcattccatccactctgagtggcaagaaaggcccctgtgtgagcacacaagaactctgagcactcacagtgttcccaacatatcaggggctacttgtagtgccttcgcttcccctttcgggtgtccttactcacatagacatgccacctacccttaccgagtgtgctctgtgaatcctccttcagccatagaaatgcagttgcgaagagtattacatgatattagaaactcactgcagaatctttcacagtaccctatgatgagaggacctgatcctgctgctgctccatatagtactcagaaatcatctgttctacctctttatgaaaatacttttcaggagctccaggtaatgaggcggagcctgaatttgtttagaacacaaatgatggatttagaattggcaatgctgcgtcagcaaaccatggtttatcatcatatgactgaggaggagaggtttgaagttgatcagctccagggtttgagaaattcagtccgaatggaacttcaggacctggaactgcagctggaggagcgcctgctgggcctggaggagcagcttcgtgctgtgcgcatgccttcacccttccgctcctccgcactcatgggaatgtgtggcagtagaagcgctgataacttgtcatgcccttctccattgaatgtaatggaaccagtcactgaactgatgcaggagcagtcatacctgaagtctgaattgggcctgggacttggagaaatgggatttgaaattcctcctggagaaagctcagaatctgttttttcccaagcaacatcagaatcatcttctgtatgttctggtccctctcatgctaacagaagaactggagtaccttctactgcctcagtgggcaaatccaaaaccccattagtggcaaggaagaaagtgttccgagcatcggtggctctaacgccaacagctccttctagaacaggctctgtgcagacacctccagatttggaaagttctgaggaagttgatgcagctgaaggagccccagaagttgtaggacctaaatctgaagtggaagaagggcatggaaaactcccatcaatgccagctgctgaggaaatgcataaaaatgtggagcaagatgagttgcagcaagtcatacgggaggttggcatggatcctattagctgtgtaatactggaattatcaatgatatgcactggtggaggtgttatttgtgctttagaagatacttgctgttgagctgggctactgtatacagtgtacaatgtgtatttcttcaaccatatattttaaaaagacgtacatagaaacttaggcactttgctatttcttttctaaactatcaaaaactctagcagtttgaaaagcctaatatttatttgtatgtcagtatttttcatttgattccctattagaattaattttaaaacttgaagacttccagacttatccaacttataaataacatatttcttcagactaacatcttaaaacactgacctctatgaggtatttactgtgcaataactgattcatttttttcagagcttgaagcatccaatgatttttccctccactgctgttaattaatgtcacttccaagaagaaaaactgttctgttgtaaaaaatataattgctcttaattcttggggaggttactaatagcagtaggatagaattttatgaggttacctacaactacttaatgtacttacactgtaagccttgttgctttacccaagacaaatgtaattttatcattgcttatgtagtatttttcttttggaaatgtgccttatgttaaacactatgtacttttactttttgcattgtccagacttctttattagatggagatgtttctttttctgtcttctagactaaatagagtatcatccaaataatggggcctatgacttgaatgaatagaaatgaataagctggtgtttgttttttcaaaatggaagtaatttagatttgttctcctcatacataaaatgattttagttcagttttaaccagtgaaaactttgtttttatgaaaaaaaaggaaaatggtttcccatttggttttatatgtgttaaataaatgtgtaaagtaaccaccaaatgttattagaatttttcttctagcatttataattttttcaactcctattgtgtttctttgtgtgtgatattttaatcaaaagtggttgagttgttaacagtgttctttgaaagaatctctaaaaggcttataaatgtttgaaatatcacacaaaggctgatttctaaaatatatatatattaaaacaataaagtatttattttgcctaaa

SEQ ID NO: 185571 - DNA, 3610 bp, Homo sapiens
  Payload ID: 16543
  Gene Symbol: SSFA2
  Gene Name: sperm specific antigen 2
  ENST ID: ENST00000409136
  CDS Start-End: 113-2419
gaatccatccctttcacttttaacttgcaacaacaacaacaacaaaaatgtgtgatctttggatttacaaaacttttgagctttagagaaagggaaagaggaagaagtgaaaatgaccactgaagatcatctgttacgtactgcaagtcagcattccgatagcagtggttttgctgaagattctacagactgcctatcccttaatcatcttcaggttcaggagtccttgcaggctatggggagtagtgctgatagttgtgacagtgagacaacagttacgtcacttggtgaagaccttgccacaccaacagcacaagaccagccttattttaatgaatcagaggaggagtctcttgtccctcttcagaagggactagagaaggcagcagcagttgcagacaaaagaaaatcaggtagccaggatttccctcagtgcaacaccattgagaatacaggaactaaacagtccacctgtagtccaggggatcatatcattgaaattactgaagtggaagaggatttgtttccagcagagacagtagagctactgagggaagcaagtgctgaaagtgatgtgggtaaaagcagtgaaagtgaatttactcagtataccacacaccatattctgaaatcattggcttctattgaagctaaatgcagtgatatgagctctgaaaatacaactgggcctccctcttccatggacagagttaatacagctttgcaaagagctcaaatgaaggtttgcagtctgtctaatcaaaggatggggcgtagcctgctaaaatcaaaagatttgttaaaacaaaggtacttatttgcaaaagctggctatcctctaagaaggtctcagtctttaccaaccaccttattgagcccagtaagggttgtgtcctctgtcaatgttcgattatctccaggaaaagagaccagatgcagcccaccttccttcacctataagtacacacctgaagaggagcaggaattggaaaagcgggtgatggaacatgatggtcagtctttagttaaatcgaccattttcatctctccatcatctgtgaagaaagaagaagccccccagagtgaggcgccgcgggtggaggaatgccatcatggaaggactcctacctgttcacggcttgctccaccaccaatgtctcagtctacctgttcccttcattccatccactctgagtggcaagaaaggcccctgtgtgagcacacaagaactctgagcactcacagtgttcccaacatatcaggggctacttgtagtgccttcgcttcccctttcgggtgtccttactcacatagacatgccacctacccttaccgagtgtgctctgtgaatcctccttcagccatagaaatgcagttgcgaagagtattacatgatattagaaactcactgcagaatctttcacagtaccctatgatgagaggacctgatcctgctgctgctccatatagtactcagaaatcatctgttctacctctttatgaaaatacttttcaggagctccaggtaatgaggcggagcctgaatttgtttagaacacaaatgatggatttagaattggcaatgctgcgtcagcaaaccatggtttatcatcatatgactgaggaggagaggtttgaagttgatcagctccagggtttgagaaattcagtccgaatggaacttcaggacctggaactgcagctggaggagcgcctgctgggcctggaggagcagcttcgtgctgtgcgcatgccttcacccttccgctcctccgcactcatgggaatgtgtggcagtagaagcgctgataacttgtcatgcccttctccattgaatgtaatggaaccagtcactgaactgatgcaggagcagtcatacctgaagtctgaattgggcctgggacttggagaaatgggatttgaaattcctcctggagaaagctcagaatctgttttttcccaagcaacatcagaatcatcttctgtatgttctggtccctctcatgctaacagaagaactggagtaccttctactgcctcagtgggcaaatccaaaaccccattagtggcaaggaagaaagtgttccgagcatcggtggctctaacgccaacagctccttctagaacaggctctgtgcagacacctccagatttggaaagttctgaggaagttgatgcagctgaaggagccccagaagttgtaggacctaaatctgaagtggaagaagggcatggaaaactcccatcaatgccagctgctgaggaaatgcataaaaatgtggagcaagatgagttgcagcaagtcatacgggagattaaagagtctattgttggggaaatcagacgggaaattgtaagtggacttttggcagcagtatcttcaagtaaagcgtctaattctaagcaagattatcattaaacagaaattataggttggcatggatcctattagctgtgtaatactggaattatcaatgatatgcactggtggaggtgttatttgtgctttagaagatacttgctgttgagctgggctactgtatacagtgtacaatgtgtatttcttcaaccatatattttaaaaagacgtacatagaaacttaggcactttgctatttcttttctaaactatcaaaaactctagcagtttgaaaagcctaatatttatttgtatgtcagtatttttcatttgattccctattagaattaattttaaaacttgaagacttccagacttatccaacttataaataacatatttcttcagactaacatcttaaaacactgacctctatgaggtatttactgtgcaataactgattcatttttttcagagcttgaagcatccaatgatttttccctccactgctgttaattaatgtcacttccaagaagaaaaactgttctgttgtaaaaaatataattgctcttaattcttggggaggttactaatagcagtaggatagaattttatgaggttacctacaactacttaatgtacttacactgtaagccttgttgctttacccaagacaaatgtaattttatcattgcttatgtagtatttttcttttggaaatgtgccttatgttaaacactatgtacttttactttttgcattgtccagacttctttattagatggagatgtttctttttctgtcttctagactaaatagagtatcatccaaataatggggcctatgacttgaatgaatagaaatgaataagctggtgtttgttttttcaaaatggaagtaatttagatttgttctcctcatacataaaatgattttagttcagttttaaccagtgaaaactttgtttttatgaaaaaaaaggaaaatggtttcccatttggttttatatgtgttaaataaatgtgtaaagtaaccaccaaatgttattagaatttttcttctagcatttataattttttcaactcctattgtgtttctttgtgtgtgatattttaatcaaaagtggttgagttgttaacagtgttctttgaaagaatctctaaaaggcttataaatgtttgaaatatcacacaaaggctgatttctaaaatatatatatattaaaacaataaagtatttattttgcctaaa

SEQ ID NO: 185572 - DNA, 4987 bp, Homo sapiens
  Payload ID: 16543
  Gene Symbol: SSFA2
  Gene Name: sperm specific antigen 2
  ENST ID: ENST00000409001
  CDS Start-End: 83-3796
gctgacagcaagggcgggggtccctgccgccgccttgtctcgcgcagggtccggctggggtagcggagcccccagtgcggccatggaccggcccctgtcgtcgtcggcggaggcggaggaggaactggagtggcaagtggcgagtcgcaggaggaaggcctgggccaagtgccgcagctcctggcaagcgtcggagacggaggatctgtccacagaagcgacgacgcaggacgaggaggaggacgaggaggaggacctccccggcgcgcagctgccggcagcggggggaagaggaaacgtgcccaacgagaagatcgcgatatggctcaaggactgccgtacacctttgggagcctcactggatgaacaaagcagtagtacactcaagggtgtgcttgtgagaaatggaggaagttttgaagatgatttgtcattgggagctgaagccaaccacctccatgaaagtgatgctcaaattgaaaactgcaataatatcttggccaaagagagaagattacagtttcatcagaaagggagaagtatgaattccactggatctgggaaaagtagtgggacagtttcaagtgtttcagaattgttggaactttatgaggaagatcctgaagaaattctttataatcttggatttggacgtgatgaaccagatattgcttctaaaattccttccagattttttaattcatcatcctttgccaaagggatagatattaaagtatttttgagtgctcagatgcaacggatggaagtagaaaacccaaattatgctttaacaagccgttttcgtcaaattgaagtgcttactactgtggccaatgcgttttcttctttatattctcaagtctccgggacgcccctgcagagaattggaagtatgtcctcagtgacctctaacaaggagacagacccacctccacctttaactcgaagtaacactgcaaatcgtttaatgaaaacactctcaaaactgaatttatgtgttgataaaacagagaaaggagaaagtagtagtccttctccatcagctgaaaaaggaaagattctaaatgtttcagtgattgaagaaagtggcaataaaaacgatcaaaagtctcaaaaaattatgaagaagaaagagtcatcttctatgttggctacagttaaagaagaagtctctggtagttcagcagctgttacggagaatgctgatagtgatagaatttctgatgaagcaaatagtaattttaaccaaggaactgaaaatgaacaaagtaaagaaactcaaagtcatgagagtaaactgggtgaggaatctggtattgtagaatccaaattagatagtgatttcaacatatccagccacagtgagctggaaaatagcagtgagctgaaaagtgtccatatatccacacctgaaaaagagccttgtgcaccactgacaataccatccataagaaatataatgacacagcagaaggactccttcgaaatggaagaggttcaaagtacggagggagaagctcctcatgttccagccacttaccagctaggtcttacgaagtcgaaaagagatcatctgttacgtactgcaagtcagcattccgatagcagtggttttgctgaagattctacagactgcctatcccttaatcatcttcaggttcaggagtccttgcaggctatggggagtagtgctgatagttgtgacagtgagacaacagttacgtcacttggtgaagaccttgccacaccaacagcacaagaccagccttattttaatgaatcagaggaggagtctcttgtccctcttcagaagggactagagaaggcagcagcagttgcagacaaaagaaaatcaggtagccaggatttccctcagtgcaacaccattgagaatacaggaactaaacagtccacctgtagtccaggggatcatatcattgaaattactgaagtggaagaggatttgtttccagcagagacagtagagctactgagggaagcaagtgctgaaagtgatgtgggtaaaagcagtgaaagtgaatttactcagtataccacacaccatattctgaaatcattggcttctattgaagctaaatgcagtgatatgagctctgaaaatacaactgggcctccctcttccatggacagagttaatacagctttgcaaagagctcaaatgaaggtttgcagtctgtctaatcaaaggatggggcgtagcctgctaaaatcaaaagatttgttaaaacaaaggtacttatttgcaaaagctggctatcctctaagaaggtctcagtctttaccaaccaccttattgagcccagtaagggttgtgtcctctgtcaatgttcgattatctccaggaaaagagaccagatgcagcccaccttccttcacctataagtacacacctgaagaggagcaggaattggaaaagcgggtgatggaacatgatggtcagtctttagttaaatcgaccattttcatctctccatcatctgtgaagaaagaagaagccccccagagtgaggcgccgcgggtggaggaatgccatcatggaaggactcctacctgttcacggcttgctccaccaccaatgtctcagtctacctgttcccttcattccatccactctgagtggcaagaaaggcccctgtgtgagcacacaagaactctgagcactcacagtgttcccaacatatcaggggctacttgtagtgccttcgcttcccctttcgggtgtccttactcacatagacatgccacctacccttaccgagtgtgctctgtgaatcctccttcagccatagaaatgcagttgcgaagagtattacatgatattagaaactcactgcagaatctttcacagtaccctatgatgagaggacctgatcctgctgctgctccatatagtactcagaaatcatctgttctacctctttatgaaaatacttttcaggagctccaggtaatgaggcggagcctgaatttgtttagaacacaaatgatggatttagaattggcaatgctgcgtcagcaaaccatggtttatcatcatatgactgaggaggagaggtttgaagttgatcagctccagggtttgagaaattcagtccgaatggaacttcaggacctggaactgcagctggaggagcgcctgctgggcctggaggagcagcttcgtgctgtgcgcatgccttcacccttccgctcctccgcactcatggtcactgaactgatgcaggagcagtcatacctgaagtctgaattgggcctgggacttggagaaatgggatttgaaattcctcctggagaaagctcagaatctgttttttcccaagcaacatcagaatcatcttctgtatgttctggtccctctcatgctaacagaagaactggagtaccttctactgcctcagtgggcaaatccaaaaccccattagtggcaaggaagaaagtgttccgagcatcggtggctctaacgccaacagctccttctagaacaggctctgtgcagacacctccagatttggaaagttctgaggaagttgatgcagctgaaggagccccagaagttgtaggacctaaatctgaagtggaagaagggcatggaaaactcccatcaatgccagctgctgaggaaatgcataaaaatgtggagcaagatgagttgcagcaagtcatacgggagattaaagagtctattgttggggaaatcagacgggaaattgtaagtggacttttggcagcagtatcttcaagtaaagcgtctaattctaagcaagattatcattaaacagaaattataggttggcatggatcctattagctgtgtaatactggaattatcaatgatatgcactggtggaggtgttatttgtgctttagaagatacttgctgttgagctgggctactgtatacagtgtacaatgtgtatttcttcaaccatatattttaaaaagacgtacatagaaacttaggcactttgctatttcttttctaaactatcaaaaactctagcagtttgaaaagcctaatatttatttgtatgtcagtatttttcatttgattccctattagaattaattttaaaacttgaagacttccagacttatccaacttataaataacatatttcttcagactaacatcttaaaacactgacctctatgaggtatttactgtgcaataactgattcatttttttcagagcttgaagcatccaatgatttttccctccactgctgttaattaatgtcacttccaagaagaaaaactgttctgttgtaaaaaatataattgctcttaattcttggggaggttactaatagcagtaggatagaattttatgaggttacctacaactacttaatgtacttacactgtaagccttgttgctttacccaagacaaatgtaattttatcattgcttatgtagtatttttcttttggaaatgtgccttatgttaaacactatgtacttttactttttgcattgtccagacttctttattagatggagatgtttctttttctgtcttctagactaaatagagtatcatccaaataatggggcctatgacttgaatgaatagaaatgaataagctggtgtttgttttttcaaaatggaagtaatttagatttgttctcctcatacataaaatgattttagttcagttttaaccagtgaaaactttgtttttatgaaaaaaaaggaaaatggtttcccatttggttttatatgtgttaaataaatgtgtaaagtaaccaccaaatgttattagaatttttcttctagcatttataattttttcaactcctattgtgtttctttgtgtgtgatattttaatcaaaagtggttgagttgttaacagtgttctttgaaagaatctctaaaaggcttataaatgtttgaaatatcacacaaaggctgatttctaaaatatatatatattaaaacaataaagtatttattttgcctaaa

SEQ ID NO: 185573 - DNA, 747 bp, Homo sapiens
  Payload ID: 16543
  Gene Symbol: SSFA2
  Gene Name: sperm specific antigen 2
  ENST ID: ENST00000451836
  CDS Start-End: 1-606
ggcagtagaagcgctgataacttgtcatgcccttctccattgaatgtcactgaactgatgcaggagcagtcatacctgaagtctgaattgggcctgggacttggagaaatgggatttgaaattcctcctggagaaagctcagaatctgttttttcccaagcaacatcagaatcatcttctgtatgttctggtccctctcatgctaacagaagaactggagtaccttctactgcctcagtgggcaaatccaaaaccccattagtggcaaggaagaaagtgttccgagcatcggtggctctaacgccaacagctccttctagaacaggctctgtgcagacacctccagatttggaaagttctgaggaagttgatgcagctgaaggagccccagaagttgtaggacctaaatctgaagtggaagaagggcatggaaaactcccatcaatgccagctgctgaggaaatgcataaaaatgtggagcaagatgagttgcagcaagtcatacgggaggttggcatggatcctattagctgtgtaatactggaattatcaatgatatgcactggtggaggtgttatttgtgctttagaagatacttgctgttgagctgggctactgtatacagtgtacaatgtgtatttcttcaaccatatattttaaaaagacgtacatagaaacttaggcactttgctatttcttttctaaactatcaaaaactctagcagtttgaaaagcctaatatttatt

SEQ ID NO: 185574 - DNA, 5150 bp, Homo sapiens
  Payload ID: 16543
  Gene Symbol: SSFA2
  Gene Name: sperm specific antigen 2
  Uniprot ID: P28290
  ENST ID: ENST00000431877
  CDS Start-End: 180-3959
ctccccttccttccctccctccctccctgtcccctcctcctcctcctcctcctccggcgcccgcttcagctccccggggccccctgcccggccgggcgctgacagcaagggcgggggtccctgccgccgccttgtctcgcgcagggtccggctggggtagcggagcccccagtgcggccatggaccggcccctgtcgtcgtcggcggaggcggaggaggaactggagtggcaagtggcgagtcgcaggaggaaggcctgggccaagtgccgcagctcctggcaagcgtcggagacggaggatctgtccacagaagcgacgacgcaggacgaggaggaggacgaggaggaggacctccccggcgcgcagctgccggcagcggggggaagaggaaacgtgcccaacgagaagatcgcgatatggctcaaggactgccgtacacctttgggagcctcactggatgaacaaagcagtagtacactcaagggtgtgcttgtgagaaatggaggaagttttgaagatgatttgtcattgggagctgaagccaaccacctccatgaaagtgatgctcaaattgaaaactgcaataatatcttggccaaagagagaagattacagtttcatcagaaagggagaagtatgaattccactggatctgggaaaagtagtgggacagtttcaagtgtttcagaattgttggaactttatgaggaagatcctgaagaaattctttataatcttggatttggacgtgatgaaccagatattgcttctaaaattccttccagattttttaattcatcatcctttgccaaagggatagatattaaagtatttttgagtgctcagatgcaacggatggaagtagaaaacccaaattatgctttaacaagccgttttcgtcaaattgaagtgcttactactgtggccaatgcgttttcttctttatattctcaagtctccgggacgcccctgcagagaattggaagtatgtcctcagtgacctctaacaaggagacagacccacctccacctttaactcgaagtaacactgcaaatcgtttaatgaaaacactctcaaaactgaatttatgtgttgataaaacagagaaaggagaaagtagtagtccttctccatcagctgaaaaaggaaagattctaaatgtttcagtgattgaagaaagtggcaataaaaacgatcaaaagtctcaaaaaattatgaagaagaaagagtcatcttctatgttggctacagttaaagaagaagtctctggtagttcagcagctgttacggagaatgctgatagtgatagaatttctgatgaagcaaatagtaattttaaccaaggaactgaaaatgaacaaagtaaagaaactcaaagtcatgagagtaaactgggtgaggaatctggtattgtagaatccaaattagatagtgatttcaacatatccagccacagtgagctggaaaatagcagtgagctgaaaagtgtccatatatccacacctgaaaaagagccttgtgcaccactgacaataccatccataagaaatataatgacacagcagaaggactccttcgaaatggaagaggttcaaagtacggagggagaagctcctcatgttccagccacttaccagctaggtcttacgaagtcgaaaagagatcatctgttacgtactgcaagtcagcattccgatagcagtggttttgctgaagattctacagactgcctatcccttaatcatcttcaggttcaggagtccttgcaggctatggggagtagtgctgatagttgtgacagtgagacaacagttacgtcacttggtgaagaccttgccacaccaacagcacaagaccagccttattttaatgaatcagaggaggagtctcttgtccctcttcagaagggactagagaaggcagcagcagttgcagacaaaagaaaatcaggtagccaggatttccctcagtgcaacaccattgagaatacaggaactaaacagtccacctgtagtccaggggatcatatcattgaaattactgaagtggaagaggatttgtttccagcagagacagtagagctactgagggaagcaagtgctgaaagtgatgtgggtaaaagcagtgaaagtgaatttactcagtataccacacaccatattctgaaatcattggcttctattgaagctaaatgcagtgatatgagctctgaaaatacaactgggcctccctcttccatggacagagttaatacagctttgcaaagagctcaaatgaaggtttgcagtctgtctaatcaaaggatggggcgtagcctgctaaaatcaaaagatttgttaaaacaaaggtacttatttgcaaaagctggctatcctctaagaaggtctcagtctttaccaaccaccttattgagcccagtaagggttgtgtcctctgtcaatgttcgattatctccaggaaaagagaccagatgcagcccaccttccttcacctataagtacacacctgaagaggagcaggaattggaaaagcgggtgatggaacatgatggtcagtctttagttaaatcgaccattttcatctctccatcatctgtgaagaaagaagaagccccccagagtgaggcgccgcgggtggaggaatgccatcatggaaggactcctacctgttcacggcttgctccaccaccaatgtctcagtctacctgttcccttcattccatccactctgagtggcaagaaaggcccctgtgtgagcacacaagaactctgagcactcacagtgttcccaacatatcaggggctacttgtagtgccttcgcttcccctttcgggtgtccttactcacatagacatgccacctacccttaccgagtgtgctctgtgaatcctccttcagccatagaaatgcagttgcgaagagtattacatgatattagaaactcactgcagaatctttcacagtaccctatgatgagaggacctgatcctgctgctgctccatatagtactcagaaatcatctgttctacctctttatgaaaatacttttcaggagctccaggtaatgaggcggagcctgaatttgtttagaacacaaatgatggatttagaattggcaatgctgcgtcagcaaaccatggtttatcatcatatgactgaggaggagaggtttgaagttgatcagctccagggtttgagaaattcagtccgaatggaacttcaggacctggaactgcagctggaggagcgcctgctgggcctggaggagcagcttcgtgctgtgcgcatgccttcacccttccgctcctccgcactcatgggaatgtgtggcagtagaagcgctgataacttgtcatgcccttctccattgaatgtaatggaaccagtcactgaactgatgcaggagcagtcatacctgaagtctgaattgggcctgggacttggagaaatgggatttgaaattcctcctggagaaagctcagaatctgttttttcccaagcaacatcagaatcatcttctgtatgttctggtccctctcatgctaacagaagaactggagtaccttctactgcctcagtgggcaaatccaaaaccccattagtggcaaggaagaaagtgttccgagcatcggtggctctaacgccaacagctccttctagaacaggctctgtgcagacacctccagatttggaaagttctgaggaagttgatgcagctgaaggagccccagaagttgtaggacctaaatctgaagtggaagaagggcatggaaaactcccatcaatgccagctgctgaggaaatgcataaaaatgtggagcaagatgagttgcagcaagtcatacgggagattaaagagtctattgttggggaaatcagacgggaaattgtaagtggacttttggcagcagtatcttcaagtaaagcgtctaattctaagcaagattatcattaaacagaaattataggttggcatggatcctattagctgtgtaatactggaattatcaatgatatgcactggtggaggtgttatttgtgctttagaagatacttgctgttgagctgggctactgtatacagtgtacaatgtgtatttcttcaaccatatattttaaaaagacgtacatagaaacttaggcactttgctatttcttttctaaactatcaaaaactctagcagtttgaaaagcctaatatttatttgtatgtcagtatttttcatttgattccctattagaattaattttaaaacttgaagacttccagacttatccaacttataaataacatatttcttcagactaacatcttaaaacactgacctctatgaggtatttactgtgcaataactgattcatttttttcagagcttgaagcatccaatgatttttccctccactgctgttaattaatgtcacttccaagaagaaaaactgttctgttgtaaaaaatataattgctcttaattcttggggaggttactaatagcagtaggatagaattttatgaggttacctacaactacttaatgtacttacactgtaagccttgttgctttacccaagacaaatgtaattttatcattgcttatgtagtatttttcttttggaaatgtgccttatgttaaacactatgtacttttactttttgcattgtccagacttctttattagatggagatgtttctttttctgtcttctagactaaatagagtatcatccaaataatggggcctatgacttgaatgaatagaaatgaataagctggtgtttgttttttcaaaatggaagtaatttagatttgttctcctcatacataaaatgattttagttcagttttaaccagtgaaaactttgtttttatgaaaaaaaaggaaaatggtttcccatttggttttatatgtgttaaataaatgtgtaaagtaaccaccaaatgttattagaatttttcttctagcatttataattttttcaactcctattgtgtttctttgtgtgtgatattttaatcaaaagtggttgagttgttaacagtgttctttgaaagaatctctaaaaggcttataaatgtttgaaatatcacacaaaggctgatttctaaaatatatatatattaaaacaataaagtatttattttgcctaaa

SEQ ID NO: 185575 - DNA, 3772 bp, Homo sapiens
  Payload ID: 16543
  Gene Symbol: SSFA2
  Gene Name: sperm specific antigen 2
  ENST ID: ENST00000454579
  CDS Start-End: 144-284
acagaagcgacgacgcaggacgaggaggaggacgaggaggaggacctccccggcgcgcagctgccggcagcggggggaagaggaaacgtgcccaacgagaagatcgcgatatggctcaaggactgccggtgtgcttgtgagaaatggaggaagttttgaagatgatttgtcattgggagctgaagccaaccacctccatgaaagtgatgctcaaattgaaaactgcaataatatcttggccaaagagagaagattacagtttcatcagaaagggagaagtatgaattccactggatctgggaaaagtagtgggacagtttcaagtgtttcagaattgttggaactttatgaggaagatcctgaagaaattctttataatcttggatttggacgtgatgaaccagatattgcttctaaaattccttccagattttttaattcatcatcctttgccaaagggatagatattaaagtatttttgagtgctcagatgcaacggatggaagtagaaaacccaaattatgctttaacaagccgttttcgtcaaattgaagtgcttactactgtggccaatgcgttttcttctttatattctcaagtctccgggacgcccctgcagagaattggaagtatgtcctcagtgacctctaacaaggagacagacccacctccacctttaactcgaagtaacactgcaaatcgtttaatgaaaacactctcaaaactgaatttatgtgttgataaaacagagaaaggagaaagtagtagtccttctccatcagctgaaaaaggaaagattctaaatgtttcagtgattgaagaaagtggcaataaaaacgatcaaaagtctcaaaaaattatgaagaagaaagagtcatcttctatgttggctacagttaaagaagaagtctctggtagttcagcagctgttacggagaatgctgatagtgatagaatttctgatgaagcaaatagtaattttaaccaaggaactgaaaatgaacaaagtaaagaaactcaaagtcatgagagtaaactgggtgaggaatctggtattgtagaatccaaattagatagtgatttcaacatatccagccacagtgagctggaaaatagcagtgagctgaaaagtgtccatatatccacacctgaaaaagagccttgtgcaccactgacaataccatccataagaaatataatgacacagcagaaggactccttcgaaatggaagaggttcaaagtacggagggagaagctcctcatgttccagccacttaccagctaggtcttacgaagtcgaaaagagatcatctgttacgtactgcaagtcagcattccgatagcagtggttttgctgaagattctacagactgcctatcccttaatcatcttcaggttcaggagtccttgcaggctatggggagtagtgctgatagttgtgacagtgagacaacagttacgtcacttggtgaagaccttgccacaccaacagcacaagaccagccttattttaatgaatcagaggaggagtctcttgtccctcttcagaagggactagagaaggcagcagcagttgcagacaaaagaaaatcaggtagccaggatttccctcagtgcaacaccattgagaatacaggaactaaacagtccacctgtagtccaggggatcatatcattgaaattactgaagtggaagaggatttgtttccagcagagacagtagagctactgagggaagcaagtgctgaaagtgatgtgggtaaaagcagtgaaagtgaatttactcagtataccacacaccatattctgaaatcattggcttctattgaagctaaatgcagtgatatgagctctgaaaatacaactgggcctccctcttccatggacagagttaatacagctttgcaaagagctcaaatgaaggtttgcagtctgtctaatcaaaggatggggcgtagcctgctaaaatcaaaagatttgttaaaacaaaggtacttatttgcaaaagctggctatcctctaagaaggtctcagtctttaccaaccaccttattgagcccagtaagggttgtgtcctctgtcaatgttcgattatctccaggaaaagagaccagatgcagcccaccttccttcacctataagtacacacctgaagaggagcaggaattggaaaagcgggtgatggaacatgatggtcagtctttagttaaatcgaccattttcatctctccatcatctgtgaagaaagaagaagccccccagagtgaggcgccgcgggtggaggaatgccatcatggaaggactcctacctgttcacggcttgctccaccaccaatgtctcagtctacctgttcccttcattccatccactctgagtggcaagaaaggcccctgtgtgagcacacaagaactctgagcactcacagtgttcccaacatatcaggggctacttgtagtgccttcgcttcccctttcgggtgtccttactcacatagacatgccacctacccttaccgagtgtgctctgtgaatcctccttcagccatagaaatgcagttgcgaagagtattacatgatattagaaactcactgcagaatctttcacagtaccctatgatgagaggacctgatcctgctgctgctccatatagtactcagaaatcatctgttctacctctttatgaaaatacttttcaggagctccaggtaatgaggcggagcctgaatttgtttagaacacaaatgatggatttagaattggcaatgctgcgtcagcaaaccatggtttatcatcatatgactgaggaggagaggtttgaagttgatcagctccagggtttgagaaattcagtccgaatggaacttcaggacctggaactgcagctggaggagcgcctgctgggcctggaggagcagcttcgtgctgtgcgcatgccttcacccttccgctcctccgcactcatggtcactgaactgatgcaggagcagtcatacctgaagtctgaattgggcctgggacttggagaaatgggatttgaaattcctcctggagaaagctcagaatctgttttttcccaagcaacatcagaatcatcttctgtatgttctggtccctctcatgctaacagaagaactggagtaccttctactgcctcagtgggcaaatccaaaaccccattagtggcaaggaagaaagtgttccgagcatcggtggctctaacgccaacagctccttctagaacaggctctgtgcagacacctccagatttggaaagttctgaggaagttgatgcagctgaaggagccccagaagttgtaggacctaaatctgaagtggaagaagggcatggaaaactcccatcaatgccagctgctgaggaaatgcataaaaatgtggagcaagatgagttgcagcaagtcatacgggagattaaagagtctattgttggggaaatcagacgggaaattgtaagtggacttttggcagcagtatcttcaagtaaagcgtctaattctaagcaagattatcattaaacagaaattataggttggcatggatcctattagctgtgtaatactggaattatcaatgatatgcactggtggaggtgttatttgtgctttagaagatacttgctgttgagctgggctactgtatacagtgtacaatgtgtatttcttcaaccatatattttaaaaagacgtacatagaaacttaggcactttgctatttcttttctaaactatcaaaaactctagcagtttgaaaag

SEQ ID NO: 185576 - DNA, 5420 bp, Homo sapiens
  Payload ID: 16543
  Gene Symbol: SSFA2
  Gene Name: sperm specific antigen 2
  ENST ID: ENST00000440623
  CDS Start-End: 194-334
acagaagcgacgacgcaggacgaggaggaggacgaggaggaggacctccccggcgcgcagctgccggcagcggggggaagaggaaacgtgcccaacgagaagatcgcgatatggctcaaggactgccgtacacctttgggagcctcactggatgaacaaagcagtagtacactcaagggtgtgcttgtgagaaatggaggaagttttgaagatgatttgtcattgggagctgaagccaaccacctccatgaaagtgatgctcaaattgaaaactgcaataatatcttggccaaagagagaagattacagtttcatcagaaagggagaagtatgaattccactggatctgggaaaagtagtgggacagtttcaagtgtttcagaattgttggaactttatgaggaagatcctgaagaaattctttataatcttggatttggacgtgatgaaccagatattgcttctaaaattccttccagattttttaattcatcatcctttgccaaagggatagatattaaagtatttttgagtgctcagatgcaacggatggaagtagaaaacccaaattatgctttaacaagccgttttcgtcaaattgaagtgcttactactgtggccaatgcgttttcttctttatattctcaagtctccgggacgcccctgcagagaattggaagtatgtcctcagtgacctctaacaaggagacagacccacctccacctttaactcgaagtaacactgcaaatcgtttaatgaaaacactctcaaaactgaatttatgtgttgataaaacagagaaaggagaaagtagtagtccttctccatcagctgaaaaaggaaagattctaaatgtttcagtgattgaagaaagtggcaataaaaacgatcaaaagtctcaaaaaattatgaagaagaaagagtcatcttctatgttggctacagttaaagaagaagtctctggtagttcagcagctgttacggagaatgctgatagtgatagaatttctgatgaagcaaatagtaattttaaccaaggaactgaaaatgaacaaagtaaagaaactcaaagtcatgagagtaaactgggtgaggaatctggtattgtagaatccaaattagatagtgatttcaacatatccagccacagtgagctggaaaatagcagtgagctgaaaagtgtccatatatccacacctgaaaaagagccttgtgcaccactgacaataccatccataagaaatataatgacacagcagaaggactccttcgaaatggaagaggttcaaagtacggagggagaagctcctcatgttccagccacttaccagctaggtcttacgaagtcgaaaagagatcatctgttacgtactgcaagtcagcattccgatagcagtggttttgctgaagattctacagactgcctatcccttaatcatcttcaggttcaggagtccttgcaggctatggggagtagtgctgatagttgtgacagtgagacaacagttacgtcacttggtgaagaccttgccacaccaacagcacaagaccagccttattttaatgaatcagaggaggagtctcttgtccctcttcagaagggactagagaaggcagcagcagttgcagacaaaagaaaatcaggtagccaggatttccctcagtgcaacaccattgagaatacaggaactaaacagtccacctgtagtccaggggatcatatcattgaaattactgaagtggaagaggatttgtttccagcagagacagtagagctactgagggaagcaagtgctgaaagtgatgtgggtaaaagcagtgaaagtgaatttactcagtataccacacaccatattctgaaatcattggcttctattgaagctaaatgcagtgatatgagctctgaaaatacaactgggcctccctcttccatggacagagttaatacagctttgcaaagagctcaaatgaaggtttgcagtctgtctaatcaaaggatggggcgtagcctgctaaaatcaaaagatttgttaaaacaaaggtacttatttgcaaaagctggctatcctctaagaaggtctcagtctttaccaaccaccttattgagcccagtaagggttgtgtcctctgtcaatgttcgattatctccaggaaaagagaccagatgcagcccaccttccttcacctataagtacacacctgaagaggagcaggaattggaaaagcgggtgatggaacatgatggtcagtctttagttaaatcgaccattttcatctctccatcatctgtgaagaaagaagaagccccccagagtgaggcgccgcgggtggaggaatgccatcatggaaggactcctacctgttcacggcttgctccaccaccaatgtctcagtctacctgttcccttcattccatccactctgagtggcaagaaaggcccctgtgtgagcacacaagaactctgagcactcacagtgttcccaacatatcaggggctacttgtagtgccttcgcttcccctttcgggtgtccttactcacatagacatgccacctacccttaccgagtgtgctctgtgaatcctccttcagccatagaaatgcagttgcgaagagtattacatgatattagaaactcactgcagaatctttcacaggtatgagaaaaagtatgttatcattagcttttttcttttactgctctgagcactttttaattcacagagaagctaaggcacatcaagtatgaactacctcagctttattttctgacatgtctaaacttaatctgcatctgccttcgttttctatcttccctcctgtttcaagggagaagctgtaactaaccctgatcaaagtcgatttctctgctcacaagtctgtctcctttccaagaggagagatttttctcgttaagtatcctcccatttttagtctatcatccactgtctttgttttagtctagaatcttttgtcatttctattattaaaaaatcttccctcttaaagttctttctctctttctctctgctatttgaacatgttgactaccttttccttttccaagttttctccctgttggcttctgtggcaccacgttctcctggttctgctcgtagctctctgactaagctttccccttcacctactgaccctcgatgctgtgcacagagttagtctacttccactggactcaaagactggaactactccagaccagaaaataacaaatcagtaccctatgatgagaggacctgatcctgctgctgctccatatagtactcagaaatcatctgttctacctctttatgaaaatacttttcaggagctccaggtaatgaggcggagcctgaatttgtttagaacacaaatgatggatttagaattggcaatgctgcgtcagcaaaccatggtttatcatcatatgactgaggaggagaggtttgaagttgatcagctccagggtttgagaaattcagtccgaatggaacttcaggacctggaactgcagctggaggagcgcctgctgggcctggaggagcagcttcgtgctgtgcgcatgccttcacccttccgctcctccgcactcatgggaatgtgtggcagtagaagcgctgataacttgtcatgcccttctccattgaatgtaatggaaccagtcactgaactgatgcaggagcagtcatacctgaagtctgaattgggcctgggacttggagaaatgggatttgaaattcctcctggagaaagctcagaatctgttttttcccaagcaacatcagaatcatcttctgtatgttctggtccctctcatgctaacagaagaactggagtaccttctactgcctcagtgggcaaatccaaaaccccattagtggcaaggaagaaagtgttccgagcatcggtggctctaacgccaacagctccttctagaacaggctctgtgcagacacctccagatttggaaagttctgaggaagttgatgcagctgaaggagccccagaagttgtaggacctaaatctgaagtggaagaagggcatggaaaactcccatcaatgccagctgctgaggaaatgcataaaaatgtggagcaagatgagttgcagcaagtcatacgggagattaaagagtctattgttggggaaatcagacgggaaattgtaagtggacttttggcagcagtatcttcaagtaaagcgtctaattctaagcaagattatcattaaacagaaattataggttggcatggatcctattagctgtgtaatactggaattatcaatgatatgcactggtggaggtgttatttgtgctttagaagatacttgctgttgagctgggctactgtatacagtgtacaatgtgtatttcttcaaccatatattttaaaaagacgtacatagaaacttaggcactttgctatttcttttctaaactatcaaaaactctagcagtttgaaaagcctaatatttatttgtatgtcagtatttttcatttgattccctattagaattaattttaaaacttgaagacttccagacttatccaacttataaataacatatttcttcagactaacatcttaaaacactgacctctatgaggtatttactgtgcaataactgattcatttttttcagagcttgaagcatccaatgatttttccctccactgctgttaattaatgtcacttccaagaagaaaaactgttctgttgtaaaaaatataattgctcttaattcttggggaggttactaatagcagtaggatagaattttatgaggttacctacaactacttaatgtacttacactgtaagccttgttgctttacccaagacaaatgtaattttatcattgcttatgtagtatttttcttttggaaatgtgccttatgttaaacactatgtacttttactttttgcattgtccagacttctttattagatggagatgtttctttttctgtcttctagactaaatagagtatcatccaaataatggggcctatgacttgaatgaatagaaatgaataagctggtgtttgttttttcaaaatggaagtaatttagatttgttctcctcatacataaaatgattttagttcagttttaaccagtgaaaactttgtttttatgaaaaaaaaggaaaatggtttcccatttggttttatatgtgttaaataaatgtgtaaagtaaccaccaaatgttattagaatttttcttctagcatttataattttttcaactcctattgtgtttctttgtgtgtgatattttaatcaaaagtggttgagttgttaacagtgttctttgaaagaatctctaaaaggcttataaatgtttgaaatatcacacaaaggctgatttctaaaatatatatatattaaaacaataaagtatttattttgcctaaa

SEQ ID NO: 185577 - DNA, 5067 bp, Homo sapiens
  Payload ID: 16543
  Gene Symbol: SSFA2
  Gene Name: sperm specific antigen 2
  ENST ID: ENST00000416081
  CDS Start-End: 419-559
ggtgtttgctttcgagcatatttttgctttctcaatttagattttcttaatattttgttcaaatattagagttagggtagtttgttttgttttgttgtggaaagtgattcatatgccagtttgcctcctctaaagacagacaagatattggctaccatgatattaatgccttgttttgatgaatcgactggaaccttattgaacactctttattacagaactcgtaccctttattggaagtgtcatagacccttctgaaatatgatgacatatatggaataacttctgtttaaagatgcacagaggcaaatacactgcttgaagtccttggaccccagatttacaatctagcttacacctttgggagcctcactggatgaacaaagcagtagtacactcaagggtgtgcttgtgagaaatggaggaagttttgaagatgatttgtcattgggagctgaagccaaccacctccatgaaagtgatgctcaaattgaaaactgcaataatatcttggccaaagagagaagattacagtttcatcagaaagggagaagtatgaattccactggatctgggaaaagtagtgggacagtttcaagtgtttcagaattgttggaactttatgaggaagatcctgaagaaattctttataatcttggatttggacgtgatgaaccagatattgcttctaaaattccttccagattttttaattcatcatcctttgccaaagggatagatattaaagtatttttgagtgctcagatgcaacggatggaagtagaaaacccaaattatgctttaacaagccgttttcgtcaaattgaagtgcttactactgtggccaatgcgttttcttctttatattctcaagtctccgggacgcccctgcagagaattggaagtatgtcctcagtgacctctaacaaggagacagacccacctccacctttaactcgaagtaacactgcaaatcgtttaatgaaaacactctcaaaactgaatttatgtgttgataaaacagagaaaggagaaagtagtagtccttctccatcagctgaaaaaggaaagattctaaatgtttcagtgattgaagaaagtggcaataaaaacgatcaaaagtctcaaaaaattatgaagaagaaagagtcatcttctatgttggctacagttaaagaagaagtctctggtagttcagcagctgttacggagaatgctgatagtgatagaatttctgatgaagcaaatagtaattttaaccaaggaactgaaaatgaacaaagtaaagaaactcaaagtcatgagagtaaactgggtgaggaatctggtattgtagaatccaaattagatagtgatttcaacatatccagccacagtgagctggaaaatagcagtgagctgaaaagtgtccatatatccacacctgaaaaagagccttgtgcaccactgacaataccatccataagaaatataatgacacagcagaaggactccttcgaaatggaagaggttcaaagtacggagggagaagctcctcatgttccagccacttaccagctaggtcttacgaagtcgaaaagagatcatctgttacgtactgcaagtcagcattccgatagcagtggttttgctgaagattctacagactgcctatcccttaatcatcttcaggttcaggagtccttgcaggctatggggagtagtgctgatagttgtgacagtgagacaacagttacgtcacttggtgaagaccttgccacaccaacagcacaagaccagccttattttaatgaatcagaggaggagtctcttgtccctcttcagaagggactagagaaggcagcagcagttgcagacaaaagaaaatcaggtagccaggatttccctcagtgcaacaccattgagaatacaggaactaaacagtccacctgtagtccaggggatcatatcattgaaattactgaagtggaagaggatttgtttccagcagagacagtagagctactgagggaagcaagtgctgaaagtgatgtgggtaaaagcagtgaaagtgaatttactcagtataccacacaccatattctgaaatcattggcttctattgaagctaaatgcagtgatatgagctctgaaaatacaactgggcctccctcttccatggacagagttaatacagctttgcaaagagctcaaatgaaggtttgcagtctgtctaatcaaaggatggggcgtagcctgctaaaatcaaaagatttgttaaaacaaaggtacttatttgcaaaagctggctatcctctaagaaggtctcagtctttaccaaccaccttattgagcccagtaagggttgtgtcctctgtcaatgttcgattatctccaggaaaagagaccagatgcagcccaccttccttcacctataagtacacacctgaagaggagcaggaattggaaaagcgggtgatggaacatgatggtcagtctttagttaaatcgaccattttcatctctccatcatctgtgaagaaagaagaagccccccagagtgaggcgccgcgggtggaggaatgccatcatggaaggactcctacctgttcacggcttgctccaccaccaatgtctcagtctacctgttcccttcattccatccactctgagtggcaagaaaggcccctgtgtgagcacacaagaactctgagcactcacagtgttcccaacatatcaggggctacttgtagtgccttcgcttcccctttcgggtgtccttactcacatagacatgccacctacccttaccgagtgtgctctgtgaatcctccttcagccatagaaatgcagttgcgaagagtattacatgatattagaaactcactgcagaatctttcacagtaccctatgatgagaggacctgatcctgctgctgctccatatagtactcagaaatcatctgttctacctctttatgaaaatacttttcaggagctccaggtaatgaggcggagcctgaatttgtttagaacacaaatgatggatttagaattggcaatgctgcgtcagcaaaccatggtttatcatcatatgactgaggaggagaggtttgaagttgatcagctccagggtttgagaaattcagtccgaatggaacttcaggacctggaactgcagctggaggagcgcctgctgggcctggaggagcagcttcgtgctgtgcgcatgccttcacccttccgctcctccgcactcatgggaatgtgtggcagtagaagcgctgataacttgtcatgcccttctccattgaatgtaatggaaccagtcactgaactgatgcaggagcagtcatacctgaagtctgaattgggcctgggacttggagaaatgggatttgaaattcctcctggagaaagctcagaatctgttttttcccaagcaacatcagaatcatcttctgtatgttctggtccctctcatgctaacagaagaactggagtaccttctactgcctcagtgggcaaatccaaaaccccattagtggcaaggaagaaagtgttccgagcatcggtggctctaacgccaacagctccttctagaacaggctctgtgcagacacctccagatttggaaagttctgaggaagttgatgcagctgaaggagccccagaagttgtaggacctaaatctgaagtggaagaagggcatggaaaactcccatcaatgccagctgctgaggaaatgcataaaaatgtggagcaagatgagttgcagcaagtcatacgggagattaaagagtctattgttggggaaatcagacgggaaattgtaagtggacttttggcagcagtatcttcaagtaaagcgtctaattctaagcaagattatcattaaacagaaattataggttggcatggatcctattagctgtgtaatactggaattatcaatgatatgcactggtggaggtgttatttgtgctttagaagatacttgctgttgagctgggctactgtatacagtgtacaatgtgtatttcttcaaccatatattttaaaaagacgtacatagaaacttaggcactttgctatttcttttctaaactatcaaaaactctagcagtttgaaaagcctaatatttatttgtatgtcagtatttttcatttgattccctattagaattaattttaaaacttgaagacttccagacttatccaacttataaataacatatttcttcagactaacatcttaaaacactgacctctatgaggtatttactgtgcaataactgattcatttttttcagagcttgaagcatccaatgatttttccctccactgctgttaattaatgtcacttccaagaagaaaaactgttctgttgtaaaaaatataattgctcttaattcttggggaggttactaatagcagtaggatagaattttatgaggttacctacaactacttaatgtacttacactgtaagccttgttgctttacccaagacaaatgtaattttatcattgcttatgtagtatttttcttttggaaatgtgccttatgttaaacactatgtacttttactttttgcattgtccagacttctttattagatggagatgtttctttttctgtcttctagactaaatagagtatcatccaaataatggggcctatgacttgaatgaatagaaatgaataagctggtgtttgttttttcaaaatggaagtaatttagatttgttctcctcatacataaaatgattttagttcagttttaaccagtgaaaactttgtttttatgaaaaaaaaggaaaatggtttcccatttggttttatatgtgttaaataaatgtgtaaagtaaccaccaaatgttattagaatttttcttctagcatttataattttttcaactcctattgtgtttctttgtgtgtgatattttaatcaaaagtggttgagttgttaacagtgttctttgaaagaatctctaaaaggcttataaatgtttgaaatatcacacaaaggctgatttctaaaatatatatatattaaaacaataaagtatttattttgcctaaa

SEQ ID NO: 185578 - DNA, 1613 bp, Homo sapiens
  Payload ID: 16544
  Gene Symbol: SPERT
  Gene Name: spermatid associated
  Uniprot ID: Q8NA61
  ENST ID: ENST00000310521
  CDS Start-End: 81-1427
ctgcctgtcagatgcctcattcccacctgtgatgctcagagagaaaccatgagccctgaaaaacaccatattgttttgtgatgtcacctctggaatgttctgagtgttttggtgaccaacttctgcataggacctatacctggcaactcacattgcactcaaggccaaattatacaagaaaaagagataccagatctgaaagcctagaaattccaatcagtgtggttctacctcagaggggcacagccgaacccttcccgaggctccacaacttgtacagcacccctcgctgcgcgcagcaggccgccctgccccggctgagccgcaggatggcgagccagcactcctatccactgaaccgcttctcctccgtgcctttagaccccatggagcgccccatgtcccaggccgacctggagctggactacaacccgccgcgggtgcagctcagcgacgagatgttcgtgttccaggacgggcgctgggtaaatgagaactgccgcctgcagtctccctacttctccccatccgcctccttccaccacaagctgcaccacaagaggctggccaaggagtgcatgctgcaggaggagaacaagtctctgcgggaggagaacaaggccctgcgcgaggagaaccggatgctcagcaaggagaacaagatcctacaggtcttctgggaggagcacaaggcctcgctgggccgagaggagagccgggccccctcgccactgctgcacaaagacagcgcgtccctggaggtggtgaagaaggaccacgtcgccctgcaggtgccccgtggcaaggaggacagcaccctgcagctcctccgggaggagaatcgcgcgctgcagcagctgctggagcagaaacaggcctactgggcgcaggcagaggacacggccgcccctgccgaggaaagcaagcccgccccctcaccccacgaggagccctgcagccccgggctgctgcaggaccagggctccggcctctcctcccgcttcgaggagcccaaagggcctccggcccggcaggaggactccaaggagctgcgcgccctgcggaagatggtcagcaacatgtccgggccctccggggaggaggaggccaaggtgggcccgggcctgcccgacggctgccagcccctgcagctgctgagagagatgaggcaggcgctgcaggccctgctcaaggagaaccggctcctgcaggaggagaacaggaccctgcaggtgctacgggcagagcacaggggcttccaggaggagaacaaggccctgtgggagaacaacaagctgaagctgcagcagaagctggtcattgacaccgtgaccgaggtcaccgcgcgcatggaaatgctcatcgaggagctctacgccttcatgccggccaggagccaggaccccaagaagcctagcagggtctgaggcctcggccttgcaccgggacgccgagtttgggacaccgaacactgggcaaaagagaatcccctgccttcctttgtcgtcctcgccttccccagccagttcgtacctattgaaaagcagcgttagcagccttcctaaactcagagttttaataaaggtgtgaggaggctggggccagttgacacc

SEQ ID NO: 185579 - DNA, 1842 bp, Homo sapiens
  Payload ID: 16544
  Gene Symbol: SPERT
  Gene Name: spermatid associated
  Uniprot ID: Q8NA61
  ENST ID: ENST00000378966
  CDS Start-End: 417-1655
gaagtaacccagccttctcaaaacgagatcttttggtgcttagtgttgtgcaatcactctggatttctgggggagaattagaactgggacttgaaatcaaatgcataagaatgaatccatgagaagaaaacctcatccgtggacaaaggggtacagagttatttggagctgtcaagagaattaagccctgctatgcatcaaagacagatgtaggggccatgggcatagatgctttttcagtcaatgaattggtgaagtcctcacaggctatagagtctcaggtctcctcctgcctgcaatcagctgtttccttagtggagtcctcttgattgaattgtttctactgctgctatgtcacaaaggggtggctttgctttctccagagtcacctaagtcctcattggaagaccagggccatgcaaccagaggggttgaaatgtaggatggaggaatccaatgcagagaggggcacagccgaacccttcccgaggctccacaacttgtacagcacccctcgctgcgcgcagcaggccgccctgccccggctgagccgcaggatggcgagccagcactcctatccactgaaccgcttctcctccgtgcctttagaccccatggagcgccccatgtcccaggccgacctggagctggactacaacccgccgcgggtgcagctcagcgacgagatgttcgtgttccaggacgggcgctgggtaaatgagaactgccgcctgcagtctccctacttctccccatccgcctccttccaccacaagctgcaccacaagaggctggccaaggagtgcatgctgcaggaggagaacaagtctctgcgggaggagaacaaggccctgcgcgaggagaaccggatgctcagcaaggagaacaagatcctacaggtcttctgggaggagcacaaggcctcgctgggccgagaggagagccgggccccctcgccactgctgcacaaagacagcgcgtccctggaggtggtgaagaaggaccacgtcgccctgcaggtgccccgtggcaaggaggacagcaccctgcagctcctccgggaggagaatcgcgcgctgcagcagctgctggagcagaaacaggcctactgggcgcaggcagaggacacggccgcccctgccgaggaaagcaagcccgccccctcaccccacgaggagccctgcagccccgggctgctgcaggaccagggctccggcctctcctcccgcttcgaggagcccaaagggcctccggcccggcaggaggactccaaggagctgcgcgccctgcggaagatggtcagcaacatgtccgggccctccggggaggaggaggccaaggtgggcccgggcctgcccgacggctgccagcccctgcagctgctgagagagatgaggcaggcgctgcaggccctgctcaaggagaaccggctcctgcaggaggagaacaggaccctgcaggtgctacgggcagagcacaggggcttccaggaggagaacaaggccctgtgggagaacaacaagctgaagctgcagcagaagctggtcattgacaccgtgaccgaggtcaccgcgcgcatggaaatgctcatcgaggagctctacgccttcatgccggccaggagccaggaccccaagaagcctagcagggtctgaggcctcggccttgcaccgggacgccgagtttgggacaccgaacactgggcaaaagagaatcccctgccttcctttgtcgtcctcgccttccccagccagttcgtacctattgaaaagcagcgttagcagccttcctaaactcagagttttaataaaggtgtgaggaggctggggccagttgacacca

SEQ ID NO: 185580 - DNA, 551 bp, Homo sapiens
  Payload ID: 16544
  Gene Symbol: SPERT
  Gene Name: spermatid associated
  ENST ID: ENST00000533564
  CDS Start-End: 72-551
agatgcctcattcccacctgtgatgctcagagagaaaccatgagccctgaaaaacaccatattgttttgtgatgtcacctctggaatgttctgagtgttttggtgaccaacttctgcataggacctatacctggcaactcacattgaggggcacagccgaacccttcccgaggctccacaacttgtacagcacccctcgctgcgcgcagcaggccgccctgccccggctgagccgcaggatggcgagccagcactcctatccactgaaccgcttctcctccgtgcctttagaccccatggagcgccccatgtcccaggccgacctggagctggactacaacccgccgcgggtgcagctcagcgacgagatgttcgtgttccaggacgggcgctgggtaaatgagaactgccgcctgcagtctccctacttctccccatccgcctccttccaccacaagctgcaccacaagaggctggccaaggagtgcatgctgcaggaggagaacaagtctctgcgggaggagaacaaggccctgcgcgaggagaaccgg

SEQ ID NO: 185581 - DNA, 1505 bp, Homo sapiens
  Payload ID: 16544
  Gene Symbol: SPERT
  Gene Name: spermatid associated
  Uniprot ID: Q8NA61
  ENST ID: ENST00000610924
  CDS Start-End: 81-1319
tggctttttacttgagatagaaataatcatcttagacagggaagcagagtcacctaagtcctcattggaagaccagggccatgcaaccagaggggttgaaatgtaggatggaggaatccaatgcagagaggggcacagccgaacccttcccgaggctccacaacttgtacagcacccctcgctgcgcgcagcaggccgccctgccccggctgagccgcaggatggcgagccagcactcctatccactgaaccgcttctcctccgtgcctttagaccccatggagcgccccatgtcccaggccgacctggagctggactacaacccgccgcgggtgcagctcagcgacgagatgttcgtgttccaggacgggcgctgggtaaatgagaactgccgcctgcagtctccctacttctccccatccgcctccttccaccacaagctgcaccacaagaggctggccaaggagtgcatgctgcaggaggagaacaagtctctgcgggaggagaacaaggccctgcgcgaggagaaccggatgctcagcaaggagaacaagatcctacaggtcttctgggaggagcacaaggcctcgctgggccgagaggagagccgggccccctcgccactgctgcacaaagacagcgcgtccctggaggtggtgaagaaggaccacgtcgccctgcaggtgccccgtggcaaggaggacagcaccctgcagctcctccgggaggagaatcgcgcgctgcagcagctgctggagcagaaacaggcctactgggcgcaggcagaggacacggccgcccctgccgaggaaagcaagcccgccccctcaccccacgaggagccctgcagccccgggctgctgcaggaccagggctccggcctctcctcccgcttcgaggagcccaaagggcctccggcccggcaggaggactccaaggagctgcgcgccctgcggaagatggtcagcaacatgtccgggccctccggggaggaggaggccaaggtgggcccgggcctgcccgacggctgccagcccctgcagctgctgagagagatgaggcaggcgctgcaggccctgctcaaggagaaccggctcctgcaggaggagaacaggaccctgcaggtgctacgggcagagcacaggggcttccaggaggagaacaaggccctgtgggagaacaacaagctgaagctgcagcagaagctggtcattgacaccgtgaccgaggtcaccgcgcgcatggaaatgctcatcgaggagctctacgccttcatgccggccaggagccaggaccccaagaagcctagcagggtctgaggcctcggccttgcaccgggacgccgagtttgggacaccgaacactgggcaaaagagaatcccctgccttcctttgtcgtcctcgccttccccagccagttcgtacctattgaaaagcagcgttagcagccttcctaaactcagagttttaataaaggtgtgaggaggctggggccagttgacacc

SEQ ID NO: 185582 - DNA, 982 bp, Homo sapiens
  Payload ID: 16545
  Gene Symbol: SPEM1
  Gene Name: spermatid maturation 1
  Uniprot ID: Q8N4L4
  ENST ID: ENST00000323675
  CDS Start-End: 26-955
gggccccggtggtcctagggaccccatggccatggttgagcggccgaggcccgagtgggcctcgtatcacaactgcaacagcaacagctgccaggacctgggcaactctgtcctgttgctgctgggcctcatcatctgcattaacattagcatcaatatagtgaccctgctctggagccgattccgtggtgtcttataccaagtgttccatgataccatttgtgagaaagaagctcccaagtcatcattactcagaaagcagacccagccccctaagaagcagagttctcctgcagtccatcttcggtgcaccatggaccctgtgatgatgactgtgtccccgcccccagctcaccgccatcgccgtcgaggctctcccacacgctgtgctcactgcccagtagcttgggctcctgacactgatgacgagaagcctcatcagtacccagccatctgctcctaccactgggatgtccctgaggactgggaaggcttccaacacactcaggggacctgggttccctggtctcaggatgccccagagtcccctccccagaccatccgcttccagcctaccgtagaggaaaggcccctcaaaacaggcatatggtccgagctgggcctaagggcctatgtgtatcctgtgaaccccccacctcccagccctgaggctcctagccacaagaacggtggggagggggcggtgccagaggcagaggcggctcagtaccagcctgtcccagctcccaccctgggcccagcagtcatccctgaattttcccggcaccgctcctcaggccgaatagtgtatgatgcccgggacatgagacggcggcttcgggaactgacccgggaggtggaggccctgtccggctgctaccccctagcctctggatccagcactgccgaggagacaagcaagaattgggtgtaccgttccctaactgggaggtgactggaaaaaaataaaaaggagagagga

SEQ ID NO: 185583 - DNA, 3337 bp, Homo sapiens
  Payload ID: 16546
  Gene Symbol: STRBP
  Gene Name: spermatid perinuclear RNA binding protein
  Uniprot ID: Q96SI9
  ENST ID: ENST00000348403
  CDS Start-End: 431-2449
gcgccaccagggcagcagccgccgcagccgccgccgctgggcagaggagccggagacgcgagcgggcgaggtggcggcggcggcggagcgggagcgggtaccgggcgcgggcagagcgcggcggcgcggagacggggttttgccatgttgacctggctggtctcgaactcctgaacgcaagtgatccgcctgcctcagcctcccaaggtgctgggattacaggcacgagccactgtgcctggcctcaactgttgcttcttataaaggtgtgttccagagaacaagccttcagacatttgctatattgacgctgagctgtcaggggactcaggcttatgaggaggtattgttacacaaaacagtgtctagtgaagacgacaagaaagaggggaaaggatcggaaaaagaagctaaaatactatagaaaaccatgagatctattcgatcttttgctaatgatgatcgccatgttatggtgaaacattcaacaatctatccatctccggaggaacttgaagctgttcagaatatggtatctactgttgaatgtgctcttaaacatgtctcagattggttggatgaaacaaataaaggcacaaaaacagagggtgagacagaagtgaagaaagatgaggccggagaaaactattccaaggatcaaggtggtcggacattgtgtggtgtaatgaggattggcctggttgcaaaaggcttgctgattaaagatgatatggacttggagctggttttaatgtgcaaagacaaacccacagagaccctgttaaatacagtcaaagataatcttcctattcagattcagaaactcacagaagagaaatatcaagtggaacaatgtgtaaatgaggcatctattataattcggaatacaaaagagcccacgctaactttgaaggtgatacttacctcacctctaattagggacgaattggagaagaaggatggagaaaatgtttcgatgaaagatcctccggacttattggacaggcagaaatgcctgaacgccttggcgtctcttcgacatgccaaatggtttcaggcaagggcaaatggattaaaatcatgtgtaattgtcctccgcattctgcgtgatttgtgcaacagagtccccacatgggcaccattgaaaggatggccactagaacttatatgtgaaaagtctataggtacttgtaatagacctttgggcgctggggaggccttgagacgagtaatggagtgtttggcatctggaatactacttcctgggggtcctggtcttcatgatccttgtgagcgagacccaacagatgctctgagctatatgaccatccagcaaaaagaagatattacccacagtgcacagcatgcactcagactatcagcctttggccagatttacaaagtgctggagatggacccccttccatctagtaagccttttcagaagtattcctggtcagttactgataaagaaggtgctgggtcttcagctctaaagaggccatttgaagatggattaggggatgataaagaccccaacaagaagatgaaacgaaacttaaggaaaattctggatagtaaagcaatagaccttatgaatgcactaatgaggctaaatcagatcaggcctgggcttcagtataagctcctatctcagtctggccccgttcatgccccagtcttcacaatgtctgtagatgtggatggcacaacatatgaagcctcaggaccatccaagaaaacagcaaaacttcacgtagcggtgaaggtattgcaggcaatgggatatccaacaggctttgatgcagatattgaatgtatgagttccgatgaaaaatcagataatgaaagtaaaaatgaaacagtgtcttcaaactcaagcaataatactggaaattctacaactgaaacctccagtaccttagaggtaagaactcagggccctatcctcacagcaagtggcaaaaaccctgtaatggagctcaatgaaaaaagaagaggtctcaagtatgaactcatctcagagactggtggaagccatgacaagcgctttgtaatggaggtagaagtagatggacagaaattcagaggcgcaggtccaaataagaaagtggcaaaggcgagtgcagctttagctgccttggagaaactgttttctggacccaatgcggcaaataataagaaaaagaagattatccctcaggcaaagggcgttgtgaatacagctgtgtctgcagcagtccaagctgttcggggcagaggaagaggaactctaacaaggggagcttttgttggggcgacagctgctcctggctacatagctccaggctatggaacaccatatggttacagcacagctgcccctgcctatggtttacccaagagaatggttctgttacccgttatgaaatttccaacatatcctgttccccactactcattcttttagcaaatgacagaagctaattcctattgaacaacaatacagtacaacacagaatgttagagaaaaagcctttttatcctgctttctttgaacacatacttgatcaaaattatttgtaaagaacatctttcctactttttgattttaacaaatgcaaatttagttctctaaaacttgaaaaaaaaaaaagaaaccagttctgtgaaaacggtacctcatttctggaaaataacttataccagcccttctgttctagggaaataaaagtctagcagttcaaagtttaagttttaagagacgtatcagattatgtaaaattaaatttgtgaaggatgtatagagtctcaaacactgatcacaaataaactgctttgttgtaacacagagtactgcctggttcctgatgcagtcactgattcttagttgattgatatgtatttgccccagggcactttaatttgggctgtagttattttttttaatacaatagagacttttcatttaactttaactttgtaaatattgaagtgtgtaataaagccaataaaatatgggtttgaatattgttttagcttattatttttgatatgttttggtatcaaattacaaggaattgaaaactaataacttagccctagaagcccattcacttgtaagcaaagtgctaaaacaaagcaaaggtgattgttagtttgagccagtctactcactttgtaagccctttgtactcctgttgtacaagggccatccccatgataaaggttccattctgttatttgagcattgcttattaaaatgatggcactacccagagatggggaaggagaatgtgattatcctagtttatgaatttccaagtttttaaaaataataaattaatcaatcaatcac

SEQ ID NO: 185584 - DNA, 2990 bp, Homo sapiens
  Payload ID: 16546
  Gene Symbol: STRBP
  Gene Name: spermatid perinuclear RNA binding protein
  Uniprot ID: Q96SI9
  ENST ID: ENST00000360998
  CDS Start-End: 456-2432
ccggagccgcgagcgccaccagggcagcagccgccgcagccgccgccgctgggcagaggagccggagacgcgagcgggcgaggtggcggcggcggcggagcgggagcgggtaccgggcgcgggcagagcgcggcggcgcgggtgtgttccagagaacaagccttcagacatttgctatattgacgctgagctgtcaggggactcaggcttatgaggaggtattgttacacaaaacagtgtctagtgaagacgacaagaaagaggggaaaggatcggaaaaagaagctaaaatactatagaaaaccatgataaacaagaacaaaagaggcaagactgttcataaaaaattgagaatgttttagtttgcgatggacttcaaaacaaaatatttaccatgtactaacatataatttcatagatctattcgatcttttgctaatgatgatcgccatgttatggtgaaacattcaacaatctatccatctccggaggaacttgaagctgttcagaatatggtatctactgttgaatgtgctcttaaacatgtctcagattggttggatgaaacaaataaaggcacaaaaacagagggtgagacagaagtgaagaaagatgaggccggagaaaactattccaaggatcaaggtggtcggacattgtgtggtgtaatgaggattggcctggttgcaaaaggcttgctgattaaagatgatatggacttggagctggttttaatgtgcaaagacaaacccacagagaccctgttaaatacagtcaaagataatcttcctattcagattcagaaactcacagaagagaaatatcaagtggaacaatgtgtaaatgaggcatctattataattcggaatacaaaagagcccacgctaactttgaaggtgatacttacctcacctctaattagggacgaattggagaagaaggatggagaaaatgtttcgatgaaagatcctccggacttattggacaggcagaaatgcctgaacgccttggcgtctcttcgacatgccaaatggtttcaggcaagggcaaatggattaaaatcatgtgtaattgtcctccgcattctgcgtgatttgtgcaacagagtccccacatgggcaccattgaaaggatggccactagaacttatatgtgaaaagtctataggtacttgtaatagacctttgggcgctggggaggccttgagacgagtaatggagtgtttggcatctggaatactacttcctgggggtcctggtcttcatgatccttgtgagcgagacccaacagatgctctgagctatatgaccatccagcaaaaagaagatattacccacagtgcacagcatgcactcagactatcagcctttggccagatttacaaagtgctggagatggacccccttccatctagtaagccttttcagaagtattcctggtcagttactgataaagaaggtgctgggtcttcagctctaaagaggccatttgaagatggattaggggatgataaagaccccaacaagaagatgaaacgaaacttaaggaaaattctggatagtaaagcaatagaccttatgaatgcactaatgaggctaaatcagatcaggcctgggcttcagtataagctcctatctcagtctggccccgttcatgccccagtcttcacaatgtctgtagatgtggatggcacaacatatgaagcctcaggaccatccaagaaaacagcaaaacttcacgtagcggtgaaggtattgcaggcaatgggatatccaacaggctttgatgcagatattgaatgtatgagttccgatgaaaaatcagataatgaaagtaaaaatgaaacagtgtcttcaaactcaagcaataatactggaaattctacaactgaaacctccagtaccttagaggtaagaactcagggccctatcctcacagcaagtggcaaaaaccctgtaatggagctcaatgaaaaaagaagaggtctcaagtatgaactcatctcagagactggtggaagccatgacaagcgctttgtaatggaggtagaagtagatggacagaaattcagaggcgcaggtccaaataagaaagtggcaaaggcgagtgcagctttagctgccttggagaaactgttttctggacccaatgcggcaaataataagaaaaagaagattatccctcaggcaaagggcgttgtgaatacagctgtgtctgcagcagtccaagctgttcggggcagaggaagaggaactctaacaaggggagcttttgttggggcgacagctgctcctggctacatagctccaggctatggaacaccatatggttacagcacagctgcccctgcctatggtttacccaagagaatggttctgttacccgttatgaaatttccaacatatcctgttccccactactcattcttttagcaaatgacagaagctaattcctattgaacaacaatacagtacaacacagaatgttagagaaaaagcctttttatcctgctttctttgaacacatacttgatcaaaattatttgtaaagaacatctttcctactttttgattttaacaaatgcaaatttagttctctaaaacttgaaaaaaaaaaaagaaaccagttctgtgaaaacggtacctcatttctggaaaataacttataccagcccttctgttctagggaaataaaagtctagcagttcaaagtttaagttttaagagacgtatcagattatgtaaaattaaatttgtgaaggatgtatagagtctcaaacactgatcacaaataaactgctttgttgtaacacagagtactgcctggttcctgatgcagtcactgattcttagttgattgatatgtatttgccccagggcactttaatttgggctgtagttattttttttaatacaatagagacttttcatttaactttaactttgtaaatattgaagtgtgtaataaagccaataaaatatgggtttgaa

SEQ ID NO: 185585 - DNA, 2751 bp, Homo sapiens
  Payload ID: 16546
  Gene Symbol: STRBP
  Gene Name: spermatid perinuclear RNA binding protein
  ENST ID: ENST00000407982
  CDS Start-End: 294-578
gcgccaccagggcagcagccgccgcagccgccgccgctgggcagaggagccggagacgcgagcgggcgaggtggcggcggcggcggagcgggagcgggtaccgggcgcgggcagagcgcggcggcgcgggtgtgttccagagaacaagccttcagacatttgctatattgacgctgagctgtcaggggactcaggcttatgaggaggtattgttacacaaaacagtgtctagtgaagacgacaagaaagaggggaaaggatcggaaaaagaagctaaaatactatagaaaaccatgagatctattcgatcttttgctaatgatgatcgccatgttatggtgaaacattcaacaatctatccatctccggaggaacttgaagctgttcagaatatggtatctactgttgaatgtgctcttaaacatgtctcagattggttggatgaaacaaataaaggcacaaaaacagagggtgagacagaagtgaagaaagatgaggccggagaaaactattccaagtggtcggacattgtgtggtgtaatgaggattggcctggttgcaaaaggcttgctgattaaagatgatatggacttggagctggttttaatgtgcaaagacaaacccacagagaccctgttaaatacagtcaaagataatcttcctattcagattcagaaactcacagaagagaaatatcaagtggaacaatgtgtaaatgaggcatctattataattcggaatacaaaagagcccacgctaactttgaaggtgatacttacctcacctctaattagggacgaattggagaagaaggatggagctttacagttcaccattaactgtagaactataaaatgatttctgaagtgtcaagataaatgttaattctgaaaatgtttcgatgaaagatcctccggacttattggacaggcagaaatgcctgaacgccttggcgtctcttcgacatgccaaatggtttcaggcaagggcaaatggattaaaatcatgtgtaattgtcctccgcattctgcgtgatttgtgcaacagagtccccacatgggcaccattgaaaggatggccactagaacttatatgtgaaaagtctataggtacttgtaatagacctttgggcgctggggaggccttgagacgagtaatggagtgtttggcatctggaatactacttcctgggggtcctggtcttcatgatccttgtgagcgagacccaacagatgctctgagctatatgaccatccagcaaaaagaagatattacccacagtgcacagcatgcactcagactatcagcctttggccagatttacaaagtgctggagatggacccccttccatctagtaagccttttcagaagtattcctggtcagttactgataaagaaggtgctgggtcttcagctctaaagaggccatttgaagatggattaggggatgataaagaccccaacaagaagatgaaacgaaacttaaggaaaattctggatagtaaagcaatagaccttatgaatgcactaatgaggctaaatcagatcaggcctgggcttcagtataagctcctatctcagtctggccccgttcatgccccagtcttcacaatgtctgtagatgtggatggcacaacatatgaagcctcaggaccatccaagaaaacagcaaaacttcacgtagcggtgaaggtattgcaggcaatgggatatccaacaggctttgatgcagatattgaatgtatgagttccgatgaaaaatcagataatgaaagtaaaaatgaaacagtgtcttcaaactcaagcaataatactggaaattctacaactgaaacctccagtaccttagaggtaagaactcagggccctatcctcacagcaagtggcaaaaaccctgtaatggagctcaatgaaaaaagaagaggtctcaagtatgaactcatctcagagactggtggaagccatgacaagcgctttgtaatggaggtagaagtagatggacagaaattcagaggcgcaggtccaaataagaaagtggcaaaggcgagtgcagctttagctgccttggagaaactgttttctggacccaatgcggcaaataataagaaaaagaagattatccctcaggcaaagggcgttgtgaatacagctgtgtctgcagcagtccaagctgttcggggcagaggaagaggaactctaacaaggggagcttttgttggggcgacagctgctcctggctacatagctccaggctatggaacaccatatggttacagcacagctgcccctgcctatggtttacccaagagaatggttctgttacccgttatgaaatttccaacatatcctgttccccactactcattcttttagcaaatgacagaagctaattcctattgaacaacaatacagtacaacacagaatgttagagaaaaagcctttttatcctgctttctttgaacacatacttgatcaaaattatttgtaaagaacatctttcctactttttgattttaacaaatgcaaatttagttctctaaaacttgaaaaaaaaaaaagaaaccagttctgtgaaaacggtacctcatttctggaaaataacttataccagcccttctgttctagggaaataaaagtctagcagttcaaagtttaagttttaagagacgtatcagattatgtaaaattaaatttgtgaaggatgtatagagtctcaaacactgatcacaaataaactgctttgttgtaa

SEQ ID NO: 185586 - DNA, 6161 bp, Homo sapiens
  Payload ID: 16546
  Gene Symbol: STRBP
  Gene Name: spermatid perinuclear RNA binding protein
  Uniprot ID: Q96SI9
  ENST ID: ENST00000447404
  CDS Start-End: 177-2195
cttctcttgcaggtgtgttccagagaacaagccttcagacatttgctatattgacgctgagctgtcaggggactcaggcttatgaggaggtattgttacacaaaacagtgtctagtgaagacgacaagaaagaggggaaaggatcggaaaaagaagctaaaatactatagaaaaccatgagatctattcgatcttttgctaatgatgatcgccatgttatggtgaaacattcaacaatctatccatctccggaggaacttgaagctgttcagaatatggtatctactgttgaatgtgctcttaaacatgtctcagattggttggatgaaacaaataaaggcacaaaaacagagggtgagacagaagtgaagaaagatgaggccggagaaaactattccaaggatcaaggtggtcggacattgtgtggtgtaatgaggattggcctggttgcaaaaggcttgctgattaaagatgatatggacttggagctggttttaatgtgcaaagacaaacccacagagaccctgttaaatacagtcaaagataatcttcctattcagattcagaaactcacagaagagaaatatcaagtggaacaatgtgtaaatgaggcatctattataattcggaatacaaaagagcccacgctaactttgaaggtgatacttacctcacctctaattagggacgaattggagaagaaggatggagaaaatgtttcgatgaaagatcctccggacttattggacaggcagaaatgcctgaacgccttggcgtctcttcgacatgccaaatggtttcaggcaagggcaaatggattaaaatcatgtgtaattgtcctccgcattctgcgtgatttgtgcaacagagtccccacatgggcaccattgaaaggatggccactagaacttatatgtgaaaagtctataggtacttgtaatagacctttgggcgctggggaggccttgagacgagtaatggagtgtttggcatctggaatactacttcctgggggtcctggtcttcatgatccttgtgagcgagacccaacagatgctctgagctatatgaccatccagcaaaaagaagatattacccacagtgcacagcatgcactcagactatcagcctttggccagatttacaaagtgctggagatggacccccttccatctagtaagccttttcagaagtattcctggtcagttactgataaagaaggtgctgggtcttcagctctaaagaggccatttgaagatggattaggggatgataaagaccccaacaagaagatgaaacgaaacttaaggaaaattctggatagtaaagcaatagaccttatgaatgcactaatgaggctaaatcagatcaggcctgggcttcagtataagctcctatctcagtctggccccgttcatgccccagtcttcacaatgtctgtagatgtggatggcacaacatatgaagcctcaggaccatccaagaaaacagcaaaacttcacgtagcggtgaaggtattgcaggcaatgggatatccaacaggctttgatgcagatattgaatgtatgagttccgatgaaaaatcagataatgaaagtaaaaatgaaacagtgtcttcaaactcaagcaataatactggaaattctacaactgaaacctccagtaccttagaggtaagaactcagggccctatcctcacagcaagtggcaaaaaccctgtaatggagctcaatgaaaaaagaagaggtctcaagtatgaactcatctcagagactggtggaagccatgacaagcgctttgtaatggaggtagaagtagatggacagaaattcagaggcgcaggtccaaataagaaagtggcaaaggcgagtgcagctttagctgccttggagaaactgttttctggacccaatgcggcaaataataagaaaaagaagattatccctcaggcaaagggcgttgtgaatacagctgtgtctgcagcagtccaagctgttcggggcagaggaagaggaactctaacaaggggagcttttgttggggcgacagctgctcctggctacatagctccaggctatggaacaccatatggttacagcacagctgcccctgcctatggtttacccaagagaatggttctgttacccgttatgaaatttccaacatatcctgttccccactactcattcttttagcaaatgacagaagctaattcctattgaacaacaatacagtacaacacagaatgttagagaaaaagcctttttatcctgctttctttgaacacatacttgatcaaaattatttgtaaagaacatctttcctactttttgattttaacaaatgcaaatttagttctctaaaacttgaaaaaaaaaaaagaaaccagttctgtgaaaacggtacctcatttctggaaaataacttataccagcccttctgttctagggaaataaaagtctagcagttcaaagtttaagttttaagagacgtatcagattatgtaaaattaaatttgtgaaggatgtatagagtctcaaacactgatcacaaataaactgctttgttgtaacacagagtactgcctggttcctgatgcagtcactgattcttagttgattgatatgtatttgccccagggcactttaatttgggctgtagttattttttttaatacaatagagacttttcatttaactttaactttgtaaatattgaagtgtgtaataaagccaataaaatatgggtttgaatattgttttagcttattatttttgatatgttttggtatcaaattacaaggaattgaaaactaataacttagccctagaagcccattcacttgtaagcaaagtgctaaaacaaagcaaaggtgattgttagtttgagccagtctactcactttgtaagccctttgtactcctgttgtacaagggccatccccatgataaaggttccattctgttatttgagcattgcttattaaaatgatggcactacccagagatggggaaggagaatgtgattatcctagtttatgaatttccaagtttttaaaaataataaattaatcaatcaatcaccctctcttgttcttgtggccttcttcactctgtaagatattgtgttcactccctggcttttttcatgcagatagaagattagtgattttgctgggattcattgaagggtctcctttcctcttcaattacatcagaatctaaagcagcaacagggtccccataaaaacttgctcttcgattgtcccagttcttgttgagtgctgctgtgaaaagtgacaggtttcagccatgggtcagcatttctttttaagacacctgatgatgctggtggaaatggatcagtgggtaacattgtgctgttctgtaaagggtgcagacctaagtcctccacttgcattctcaccttgtttggaaagccaatgatgttactaggtcaatggtttcattaaggtactcacccccatgaaggagcagcagtgtggtcccctgtcaatatttataaggcaccatgtcttaaaaatgtctgtttttagtatgaattagctttcattttccctattcagttctgcttttgggaacttgacagggcccatccatgagaatgggcttcacaaaatatggcaaatgtatgtaccaaattccttcgggaccactaaataaaggtgaaatgggcaatgtacaacaaatgttagtgtcacttctcagatatatattacacaatgattagtttgtttcttctccttggtcttttgtctttattagtggtgggtgatactttaataaaacctcatcacttgctggaaatagctgtaacttatcattctcatcctgtgcattagtggctagacataaacaagagggcccatttcagctgggagttttcatgtttcattgatgcgttttgctgacctatggatgaaacagagccatcactgagaagaaaaagcatggctgatagtgtccagtttttattaattaaatctttacagtagtcctcattgtctttggaatactattaattggcagctgcggctgtattgttatttgaaattggtcatcaaatttggattccacgttggaatctctagatatttctcgttagaaaattcttttgaagtagctgactctgcttcataactcacgcgctctgtaatggtgaaaagggagctgtgctgttttccaacatgatggcagtcatttcaaatggtttctaccaagtcttttttttttttttttaattttgttgtttgttggaagttactaaccatgttgtaaacctgcccagttgctgcaaacttttacatttctctgctttacttaaaataatcgagctgtcagtcctttgttagaagtggtaaccatgcaagttcaactgtttaaattctgtaatgaattaagtgtccccccacctgttgcccttcccacccttccattttgtaatgaaaattccacttacagctgaaagagcagagaaatataaatgaagctcttggcttcaccaaattgcctgagattaacatgaagttttgcttctctgctcttttctccactgtaggtggttttttcattgacagcccctattgccagcctctgagcgtcgcaccatttattattcacttgggccctcaagatttcttctctgacttctagaaccatcaggttgtctggcttgaaatggcaatttctatgtcttggtcttaagagcaatgtgacaccctgaggctatccagctttcagacactccactctgacaccctctttttgaaagcaatgactgatcattttaaagaagagcaatactttgttcaaagccacggtgtctgttttaaaacttttcctttggaaacctagcaatatctgtacttaacccctttttagcatagtttcttgtcagggagtttacaggtcagtgtagagcttaaaattagcgtgtgagctgtgctatgttctgacagttttttacactttttagcacataaatagttacattcctgactgcgtcagttagcgttactataatttctcagagataggggtcctccttgaagccatatcctctgcacggggactggcccctagccagggatgtggcttgcagcttgtgtttcttcaggctgcaggagtaccccatctcttgtgcaaggtaattggtccagtagatttccaacatacctcatgctgactagatgaagtgcatgggtggtgaagtaaggagttgagtttatatagttctgaagtcgtttgtagtctctctcaaattgttagcctggggaacaaaccactgagagattttgctggtattggccttttctttttttttttttttttaattttgggtgaatgtttgaaaatcatgaatcagccaccattattaattgaagagctgggaatacctcgttaatgtatttttaaaactggtgttggaccctctgtgtatttcaggttaatacttttaagcagttttcagcacgtttatctcactttattctcgttctcctcggaccttcgtagccatatcacttgtataaaataggctgagatatagtgactgtaagctgtgatctcagtatacaaaggtaagctcttttattttctgattaaagagaaaaatagtcaattaagacaacatgcatatatgacaatcatatatgatgtatttgatctcttaggtcatatgtcatcgcattacctttaaaaattgtatggtctaaatgtaaaatagttatttttcaacatttgttttaatacccttgtaactgctttttactcaagacagacatttcacttacactaagtgtgtgtgtgtgtgtgtgtgtgtgtagaaacttaggatataacacgtatgtaaattacacacacatacctgtttaaatgtaagaattcagtgataggaacagttcatctaagaagattttaatgacagggcactcttttggccaaagcagtggaatttcctaagcagcaaggttggtaatagtgctggtaggatctgtatgtgtaagctgttacacaagctgaggatcaaagtgccaatttctcaaggagaaaaacttctccgagaaatgaaagtctctgatctgtgttgtatgccctaatacaacaacagcaagaagccatagaaaaaagcaatagaaaatg

SEQ ID NO: 185587 - DNA, 657 bp, Homo sapiens
  Payload ID: 16546
  Gene Symbol: STRBP
  Gene Name: spermatid perinuclear RNA binding protein
  ENST ID: ENST00000496533
  CDS Start-End: 1-270
aaagtggcaaaggcgagtgcagctttagctgccttggagaaactgttttctggacccaatgcggcaaataataagaaaaagaagattatccctcaggcaaagggcgttgtgaatacagctgtgtctgcagcagtccaagctgttcggggcagaggaagaggaactctaacaaggggagcttttgttggggcgacagctgctcctggctacatagctccaggctatggaacaccatatggttacagcacagctgcccctgcctatggttaatacttttaagcagttttcagcacgtttatctcactttattctcgttctcctcggaccttcgtagccatatcacttgtataaaataggctgagatatagtgactgtaagctgtgatctcagtatacaaagaaccaacttcagcaagactcgggtggtgaatatcgagtctgcagagaccaaatagacttaaagcaatccatctgtcttttccaggttaggtagctagattatttatttcccaccttattcaaccatcatggagttcatgtaaagatgtgagggttaggcagacattttaataaagatttgcttcatttaggtgtgtcccataaatgcatttaattgtgttagatgttgtgtgctaaggctgtatttgatatatgtaga

SEQ ID NO: 185588 - DNA, 832 bp, Homo sapiens
  Payload ID: 16546
  Gene Symbol: STRBP
  Gene Name: spermatid perinuclear RNA binding protein
  ENST ID: ENST00000479114
  CDS Start-End: 609-832
gctttgtcacgctggctggagtacagtggcgcaatctcggctcactgcaatctccgcctcccaggttcaagcaattctgcctcggcttcctgagtagctgggactacaggtgcgcaccaccatgcctggctaatttttgtatttttagtagcgtcggggtttcaccatgttggccaggctggtctcgaactcctgacctcaggtgatccacccgccttggctcctaaagtgctggaattacaggtatgagccactgtgactggccgcaggtggtctgattctagtcctggctctgtcgcagactagctgcttgatctcaggaaatgtctctatttctagattgtcttcaatgttcttatcctgcttatctgtggataatattcttgatagtcatgtgaaggatctatcttgggaaagccaaggacatctgggaatgtttgacaggtgtgttccagagaacaagccttcagacatttgctatattgacgctgagctgtcaggggactcaggcttatgaggaggtattgttacacaaaacagtgtctagtgaagacgacaagaaagaggggaaaggatcggaaaaagaagctaaaatactatagaaaaccatgagatctattcgatcttttgctaatgatgatcgccatgttatggtgaaacattcaacaatctatccatctccggaggaacttgaagctgttcagaatatggtatctactgttgaatgtgctcttaaacatgtctcagattggttggatgaaacaaataaaggcacaaaaacagagggtgagacagaagtgaagaaagatgaggccggagaaaactattccaa

SEQ ID NO: 185589 - DNA, 663 bp, Homo sapiens
  Payload ID: 16546
  Gene Symbol: STRBP
  Gene Name: spermatid perinuclear RNA binding protein
  ENST ID: ENST00000478973
  CDS Start-End: 1-174
gcaaagggcgttgtgaatacagctgtgtctgcagcagtccaagctgttcggggcagaggaagaggaactctaacaaggggagcttttgttggggcgacagctgctcctggctacatagctccaggctatggaacaccatatggttacagcacagctgcccctgcctatggttaatacttttaagcagttttcagcacgtttatctcactttattctcgttctcctcggaccttcgtagccatatcacttgtataaaataggctgagatatagtgactgtaagctgtgatctcagtatacaaagggtgaaagacaattatgggaagccagtggggcaatttgagctaaaatacacctcccgcgatgacagacgcagccttgagagagcagctgaggtgcgacatgagctccctgtaaccagcatcgtgactgaagcagcagcctgcacatgtggatggtcatcagtgcctcgcccagagatacctggccttcatccaaagggaccctgctgccacaagtcctccaggcagcacccgcactgtggctccttcgcactgagtatgttggactctgccatagactgaccctcttgtctggctgctgcagtttgtctgtaatgccctgacatgttgcattctccccatttggataaataaaaacaaac

SEQ ID NO: 185590 - DNA, 535 bp, Homo sapiens
  Payload ID: 16546
  Gene Symbol: STRBP
  Gene Name: spermatid perinuclear RNA binding protein
  ENST ID: ENST00000471564
  CDS Start-End: 1-254
caaagggcgttgtgaatacagctgtgtctgcagcagtccaagctgttcggggcagaggaagaggaactctaacaaggggagcttttgttggggcgacagctgctcctggctacatagctccaggctatggaacaccatatggttacagcacagctgcccctgcctatgaggctacgttaaaggaatatggtagccatcatctgggaggtaaaaaacctatggaaattggcacctggggaactcaggaaagctgaaagcaccttgaaatgagatggaaggaccagaaggttaaggctggtgaagaggagacctggagagaacgtgggcactcctgccagcgtgactgaagcagcagcctgcacatgtggatggtcatcagtgcctcgcccagagatacctggccttcatccaaagggaccctgctgccacaagtcctccaggcagcacccgcactgtggctccttcgcactgagtatgttggactctgccatagactgaccctcttgtctggctgctgcagtttgtctgtaatgcc

SEQ ID NO: 185591 - DNA, 2007 bp, Homo sapiens
  Payload ID: 16547
  Gene Symbol: SPATC1
  Gene Name: spermatogenesis and centriole associated 1
  Uniprot ID: Q76KD6
  ENST ID: ENST00000377470
  CDS Start-End: 103-1878
agactctgcaccctccttcagcccaggcaaggcctggggccctgggcagcctccaggtgcagtgccctcccgtgggccgcacccttgccactgccccagggcatgtctctactcaccaattatgaagggcttcggcatcagatagagaggctggtgcgggaaaatgaggaactgaagaagttggtgcggctcattcgggagaatcacgagctcaagtcagcgatcaagactcaggcaggcgggctcggcatcagcgggttcacgagtgggcttggtgaggcaacagcaggcctttcctcacgccagaacaatggtgtcttcctgcccccgtccccagcagtggcaaacgaacgagtcctcgaagaagtggggatcatggccttggcacccctggccgagatgctaaccagcttgcagcccagcgccacaccgggctcactcatgagccccctgacaggcaccctcagcacgctgctgtctggcccagcacccacgtcacagagcagccccctcaccagcttcctgaccagtcccattgcgggacccctaacaggcacactggccagttccctgggcctgccctccactggcaccctgactcccagcagcctcgtggcaggccctgtggccatgtcccagagcagccccctgatagcccctgtgatgggcacggtggctgtctctctgagcagccccctcctcagctccactgccaccccaccaggggtctctcagaacctgctggccaaccccatgagcaacctggtcctgccagaggccccaaggctgcggctggctgagccactccgcggaggccccactgggccccagtccccagcttgcgtggtacccactgccaccaccaaagtcccactctccactgagcccccccagtcgacccaggacccagagcctctcagcatggcgtttgcaggagcacccctccagacctccacccctatcggagccatgggcacacctgctcccaagacggccttctccttcaacacttcggacacacaggcccagcccagtgccgcccaggaacaagtggtccctgcatctgtccccacctcccccaccacctcccccacggtcaccgtccttgcctctgcccccgcccttgccccccaggttgccaccagctacacaccctcaagcaccacccacatcgcccagggtgccccccatcccccttcccgaatgcataattccccaacccagaacctgcctgtcccccactgtcctccacacaacgcccactccccacctcgtacctcatcctccccggcttcagtcaatgactctcgaggtccacgcaccacagaaccgtcgacgaagagcatgatggaggtggaacggaagctggcccaccgcaagaccagcaagttccccgagaacccccgagagtcgaagcagctggcctgggagaggctggtgggtgagattgccttccagctggaccgcaggatcctgtccagcatcttcccagagcgcgtacggctctacggcttcactgtctccaacatcccagagaagatcatccaggcttccctgaaccccagtgaccacaagctggatgagaagctgtgccagaggctcacacagcgctatgtgagcgtcatgaacaggctgcagagtctgggctacaacgggcgggtgcaccctgcgctgaccgagcagctggtgaacgcttatggcatcctgcgagagcgcccggagctggcggcgtctgagggcggcccctacaccgtggacttcctgcagcgtgtggtggtggagaccgtgcaccccggcatgctcgccgacgcgctgctgctgctctcctgcctcagccagctggcgcacgatgacggcaagcccatgttcatctggtgacgctggagctgggaggtccaggctcgctcagccccacagccctgtgcacggccattaaagcttcccacagacactggtcgctgggcctgtgccagcgctcctgggtggtgctgcctcctctggggtggc

SEQ ID NO: 185592 - DNA, 1795 bp, Homo sapiens
  Payload ID: 16547
  Gene Symbol: SPATC1
  Gene Name: spermatogenesis and centriole associated 1
  Uniprot ID: Q76KD6
  ENST ID: ENST00000447830
  CDS Start-End: 91-1416
ctccttcagcccaggcaaggcctggggccctgggcagcctccaggtgcagtgccctcccgtgggccgcacccttgccactgccccagggcatgtctctactcaccaattatgaagggcttcggcatcagatagagaggctggtgcgggaaaatgaggaactgaagaagttggtgcggctcattcgggagaatcacgagctcaagtcagcgatcaagactcaggcaggcgggctcggcatcagcgggttcacgagtgggcttggtgaggcaacagcaggcctttcctcacgccagaacaatggtgtcttcctgcccccgtccccagcagtggcaaacgaacgagtcctcgaagaagtggggatcatggccttggcacccctggccgagatgctaaccagcttgcagcccagcgccacaccgggctcactcatgagccccctgacaggcaccctcagcacgctgctgtctggcccagcacccacgtcacagagcagccccctcaccagcttcctgaccagtcccattgcgggacccctaacaggcacactggccagttccctgggcctgccctccactggcaccctgactcccagcagcctcgtggcaggccctgtggccatgtcccagagcagccccctgatagcccctgtgatgggcacggtggctgtctctctgagcagccccctcctcagctccactgccaccccaccaggggtctctcagaacctgctggccaaccccatgagcaacctggtcctgccagaggccccaaggctgcggctggctgagccactccgcggaggccccactgggccccagtccccagcttgcgtggtacccactgccaccaccaaagtcccactctccactgagcccccccagtcgacccaggacccagagcctctcagcatggcgtttgcaggagcacccctccagacctccacccctatcggagccatgggcacacctgctcccaagacggccttctccttcaacacttcggacacacaggcccagcccagtgccgcccaggaacaagtggtccctgcatctgtccccacctcccccaccacctcccccacggtcaccgtccttgcctctgcccccgcccttgccccccaggttgccaccagctacacaccctcaagcaccacccacatcgcccagggtgccccccatcccccttcccgaatgcataattccccaacccagaacctgcctgtcccccactgtcctccacacaacgcccactccccacctcgtacctcatcctccccggcttcagtcaatgactctcgaggtccacgcaccacagaaccgtcgacgaagagcatgatggaggtggaacggaagctggcccaccgcaagaccagcaagttccccgagaacccccgaggcttccctgaaccccagtgaccacaagctggatgagaagctgtgccagaggctcacacagcgctatgtgagcgtcatgaacaggctgcagagtctgggctacaacgggcgggtgcaccctgcgctgaccgagcagctggtgaacgcttatggcatcctgcgagagcgcccggagctggcggcgtctgagggcggcccctacaccgtggacttcctgcagcgtgtggtggtggagaccgtgcaccccggcatgctcgccgacgcgctgctgctgctctcctgcctcagccagctggcgcacgatgacggcaagcccatgttcatctggtgacgctggagctgggaggtccaggctcgctcagccccacagccctgtgcacggccattaaagcttcccaca

SEQ ID NO: 185593 - DNA, 2303 bp, Homo sapiens
  Payload ID: 16548
  Gene Symbol: SPATC1L
  Gene Name: spermatogenesis and centriole associated 1-like
  Uniprot ID: Q9H0A9
  ENST ID: ENST00000291672
  CDS Start-End: 1063-2085
gtgctttctgccgtacgtcccttcccatgaggatgagatgacccatctgttgcatcccggctgctgataaaacaagaccctcggagccaagaaacaacactgaggctgatctccccgcccaggctggtctcccccgcaggctggtctcccccgcaagctggtctcctcccccaggctggtctcctcaccaggctggtctcctcccccaggctgatctccccgcccaggctggtctcccccgcaggctggtctcccccacaaggctggtctcctcccccaggctggtctcctcaccaggctggtctcctcccccaggctgatctccccgcccaggctggtctcccccgcaggctggtctcccccgcaagctggtctcccctgcaggctggtctcctccccaggctggtctcccccgcagactggtctcccccacaagctggtctccccaccaggctggtctcccccacatgctggtctcctcccactgcccttgccagtccctccctcctcaagtgtgggtgccaaggacggaccctgatgaacacctgcacatcagttgctgccctgggtgccagggtccacaggaagctgcactgggaaccctgtgtcctgggcaggtcctatgggaagtgcagcccacatgttactcgggtgaaggcagcgtccccacccagcttgaggacaccacacagggtggacacccgaccctggctgggccgctcaatggggagtggcttggacgcccctcttggagtacagtcgctacatcccgtagctgcctaatgtccttggcattctcgggccctggtcataatgtgggagtggctgcctgtgcacgccacgggcctccagcttcactgcctcaacggggccatgagccatcgcgggggcaggcagggtgctgggcacctcatcactagggcagtgacatcacaaggcgtggaaggcggtggtggctacggaactccgtgcctgggctgtttctgtggtgcctgcgggctctgggctcccacctccatggggctgcaggagccgtgagggacaaggagggacgcacccgccatggctgaaggcggcgagctgatgagccggctcctgagcgagaacgcggacctgaagaagcaggtgcgcctcctgaaggagaatcagatgctgcggcggctgctcagccagagctgccaggagggcggcggccacgacctgctcccacccagggcgcatgcctaccctgaggccggctcccccgggagcggagttccagatttcggaaggttcacgagtgttgccgacacgccctcccaactgcagacatcctccctggaggacctgctgtgctcacatgcccccctgtccagcgaggacgacacctccccgggctgtgcagccccctcccaggcacccttcaaggccttcctcagtcccccagagccacatagccaccgaggcaccgacaggaagctgtccccgctcctgagccccttgcaagactcactggtggacaagaccctgctggagcccagggagatggtccggcctaagaaggtgtgtttctcggagagcagcctgcccaccggggacaggaccaggaggagctactacctcaatgagatccagagcttcgcgggcgccgagaaggacgcgcgcgtggtgggcgagatcgccttccagctggaccgccgcatcctggcctacgtgttcccgggcgtgacgcggctctacggcttcacggtggccaacatccccgagaagatcgagcagacctccaccaagtctctggacggctccgtggacgagaggaagctgcgcgagctgacgcagcgctacctggccctgagcgcgcgcctggagaagctgggctacagccgcgacgtgcacccggcgttcagcgagttcctcatcaacacctacggaatcctgaagcagcggcccgacctgcgcgccaaccccctgcacagcagcccggccgcgctgcgcaagctggtcatcgacgtggtgccccccaagttcctgggcgactcgctgctgctgctcaactgcctgtgcgagctctccaaggaggacggcaagcccctcttcgcctggtgagccgccccgcgcccgccgccttgcctgcagtaaacgcgtttgttccaacccggggccgcggtgcctcctgcgcgtccccccggaggggaaagggccgcgtcccccgcgcgcgaggccagagaaggccccgctcccaccggtgctgggccccgaccgcagcccgccgctgcccgcacctgcggagtgcttctcacccctcattaaaatcatccgtttgc

SEQ ID NO: 185594 - DNA, 1182 bp, Homo sapiens
  Payload ID: 16548
  Gene Symbol: SPATC1L
  Gene Name: spermatogenesis and centriole associated 1-like
  Uniprot ID: Q9H0A9
  ENST ID: ENST00000330205
  CDS Start-End: 391-951
ggccggcccactgggttgtgctttctgccgtacgtcccttcccatgaggatgagatgacccatctgttgcatcccggctgctgataaaacaagaccctcggagccaagaaacaacactgagttccagatttcggaaggttcacgagtgttgccgacacgccctcccaactgcagacatcctccctggaggacctgctgtgctcacatgcccccctgtccagcgaggacgacacctccccgggctgtgcagccccctcccaggcacccttcaaggccttcctcagtcccccagagccacatagccaccgaggcaccgacaggaagctgtccccgctcctgagccccttgcaagactcactggtggacaagaccctgctggagcccagggagatggtccggcctaagaaggtgtgtttctcggagagcagcctgcccaccggggacaggaccaggaggagctactacctcaatgagatccagagcttcgcgggcgccgagaaggacgcgcgcgtggtgggcgagatcgccttccagctggaccgccgcatcctggcctacgtgttcccgggcgtgacgcggctctacggcttcacggtggccaacatccccgagaagatcgagcagacctccaccaagtctctggacggctccgtggacgagaggaagctgcgcgagctgacgcagcgctacctggccctgagcgcgcgcctggagaagctgggctacagccgcgacgtgcacccggcgttcagcgagttcctcatcaacacctacggaatcctgaagcagcggcccgacctgcgcgccaaccccctgcacagcagcccggccgcgctgcgcaagctggtcatcgacgtggtgccccccaagttcctgggcgactcgctgctgctgctcaactgcctgtgcgagctctccaaggaggacggcaagcccctcttcgcctggtgagccgccccgcgcccgccgccttgcctgcagtaaacgcgtttgttccaacccggggccgcggtgcctcctgcgcgtccccccggaggggaaagggccgcgtcccccgcgcgcgaggccagagaaggccccgctcccaccggtgctgggccccgaccgcagcccgccgctgcccgcacctgcggagtgcttctcacccctcattaaaatcatccgtttgcatgtctgccttta

SEQ ID NO: 185595 - DNA, 1182 bp, Homo sapiens; identical to SEQ ID NO: 185594
  Payload ID: 16548
  Gene Symbol: SPATC1L
  Gene Name: spermatogenesis and centriole associated 1-like
  Uniprot ID: Q9H0A9
  ENST ID: ENST00000618495
  CDS Start-End: 391-951

SEQ ID NO: 185596 - DNA, 2303 bp, Homo sapiens; identical to SEQ ID NO: 185593
  Payload ID: 16548
  Gene Symbol: SPATC1L
  Gene Name: spermatogenesis and centriole associated 1-like
  Uniprot ID: Q9H0A9
  ENST ID: ENST00000621926
  CDS Start-End: 1063-2085

SEQ ID NO: 185597 - DNA, 1987 bp, Homo sapiens
  Payload ID: 16549
  Gene Symbol: SOHLH1
  Gene Name: spermatogenesis and oogenesis specific basic helix-loop-helix 1
  Uniprot ID: Q5JUK2
  ENST ID: ENST00000298466
  CDS Start-End: 62-1048
gggggcggggctgcctgcggaaggggccgtgcgcgtggggtcgctccgcagctgcgagttcatggcgtcccggtgctccgagccctacccggaggtctccagaatccctaccgtcaggggatgcaacggctccctgtctggtgccctctcctgctgcgaggactcggcccggggctcgggcccgcccaaggcccctacggtggccgagggtcccagctcctgccttcggcggaacgtgatcagcgagagggagcgcaggaagcggatgtcgttgagctgtgagcgtctgcgggccctgctgccccagttcgatggccggcgggaggacatggcctcggtcctggagatgtctgtgcagttcctgcggcttgccagcgccctggggcccagtcaggagcagcacgctattcttgcttcctccaaggaaatgtggcactcgttgcaggaggatgttttacagttgacgttgtcgagtcagattcaagcaggtgtgccagaccctgggacgggagcgtccagcgggactcgaaccccagatgtgaaggcgtttctggaaagtccttggtccctggatccagcgtcggccagcccagagcccgtgccgcacatccttgcgtcctccaggcagtgggaccccgcgagctgcacgtccctgggcacggacaagtgtgaggcactgttggggctgtgccaggtgcggggtgggctgccccctttctcagaaccttccagcctggtgccgtggcccccaggccggagtcttcctaaggctgtgaggccacccctgtcctggcctccgttctcgcagcagcagaccttgcccgtgatgagcggggaggcccttggctggctgggccaggctgggcccctggccatgggggctgcacctctgggggagccagccaaggaggaccccatgctggcgcaggaggccgggtctgcgttggggtctgatgtggacgatgggacgtccttcctgctgactgctggtcccagctcgtggccgggtgagtggggccctgggttcagggctggtccccccgcgtaagcacctgatatgagctggggaattgggactcaggcctagcgtgtgtcagggggccccagggtctgtgtctgagcccccgttttctccaccgttggtgcttagctgttgggccgtgtctggtattgagcgttataggtgatatgtgagtgtgtgagtgaacgtgatgtggacgagcctgcatgagagctggcggtgcttggagccctgtattcttccccttgaccctgtgtcagcgaggcccctggtccagcccgtgctggccggcaaaggtgtatggccctgtgacatggcgtgtgtccattccatttaggatttagtgtttgggagcccgttcctggttctggtccaacaggtgtcctgggtctggggccaccaggtatgagctcacccacctcatcacagcctctgtgcagcggggacagggcagggcagacggactgaggtgggagctctgttcctccgaccccacctgtctgcctcaagctcccagagcacctgcctgccctgccgatgtgtcctgtttgcttccagggtctctggagggtcgaggaggcagtggccctgcatgggccccagctgagagcagtccactggatgttggagagccaggcttcctaggggaccctgagcttggctcccaggagctccaggacagccctctggagccgtggggcctggatgtggactgtgcaggcctggccctgaaggacgaggtggagagcatcttccctgacttctttgcctgctagcagccaggctgtggagaggaggcgggcggggccggtggatctggagccgtgtgtgtccctgtcgcgtgcttgggcattttattttgggtttgggttgcagctgcaccctaatttgagcgaggcttacaggctgtgagaagaggatagtgaatattaaagagggaaagcagttttcctggaggaagcaaaa

SEQ ID NO: 185598 - DNA, 1411 bp, Homo sapiens
  Payload ID: 16549
  Gene Symbol: SOHLH1
  Gene Name: spermatogenesis and oogenesis specific basic helix-loop-helix 1
  Uniprot ID: Q5JUK2
  ENST ID: ENST00000425225
  CDS Start-End: 62-1225
gggggcggggctgcctgcggaaggggccgtgcgcgtggggtcgctccgcagctgcgagttcatggcgtcccggtgctccgagccctacccggaggtctccagaatccctaccgtcaggggatgcaacggctccctgtctggtgccctctcctgctgcgaggactcggcccggggctcgggcccgcccaaggcccctacggtggccgagggtcccagctcctgccttcggcggaacgtgatcagcgagagggagcgcaggaagcggatgtcgttgagctgtgagcgtctgcgggccctgctgccccagttcgatggccggcgggaggacatggcctcggtcctggagatgtctgtgcagttcctgcggcttgccagcgccctggggcccagtcaggagcagcacgctattcttgcttcctccaaggaaatgtggcactcgttgcaggaggatgttttacagttgacgttgtcgagtcagattcaagcaggtgtgccagaccctgggacgggagcgtccagcgggactcgaaccccagatgtgaaggcgtttctggaaagtccttggtccctggatccagcgtcggccagcccagagcccgtgccgcacatccttgcgtcctccaggcagtgggaccccgcgagctgcacgtccctgggcacggacaagtgtgaggcactgttggggctgtgccaggtgcggggtgggctgccccctttctcagaaccttccagcctggtgccgtggcccccaggccggagtcttcctaaggctgtgaggccacccctgtcctggcctccgttctcgcagcagcagaccttgcccgtgatgagcggggaggcccttggctggctgggccaggctgggcccctggccatgggggctgcacctctgggggagccagccaaggaggaccccatgctggcgcaggaggccgggtctgcgttggggtctgatgtggacgatgggacgtccttcctgctgactgctggtcccagctcgtggccggggtctctggagggtcgaggaggcagtggccctgcatgggccccagctgagagcagtccactggatgttggagagccaggcttcctaggggaccctgagcttggctcccaggagctccaggacagccctctggagccgtggggcctggatgtggactgtgcaggcctggccctgaaggacgaggtggagagcatcttccctgacttctttgcctgctagcagccaggctgtggagaggaggcgggcggggccggtggatctggagccgtgtgtgtccctgtcgcgtgcttgggcattttattttgggtttgggttgcagctgcaccctaatttgagcgaggcttacaggctgtgagaagaggatagtgaatattaaagagggaaagcagttttcctggaggaagc

SEQ ID NO: 185599 - DNA, 1909 bp, Homo sapiens
  Payload ID: 16550
  Gene Symbol: SOHLH2
  Gene Name: spermatogenesis and oogenesis specific basic helix-loop-helix 2
  Uniprot ID: Q9NX45
  ENST ID: ENST00000317764
  CDS Start-End: 63-740
agcggctgtggagctcctcctgctgggaggctgccccaggacccagcacgtgcgcagcggccatggcttcctcaattatctgccaggagcactgccagatctcgggccaggcaaaaatagacatcttattagttggagatgtcactgtgggctacctggctgatactgtacagaaactatttgcaaacatagcagaagtcaccatcaccatcagtgacacgaaggaggcagcagcgcttttggatgattgcatattcaacatggttctcttgaaggtgccttcttcactaagtgccgaggagctggaagccatcaagttaattagatttggcaaaaagaaaaatacacattcactgtttgtttttataatccctgaaaattttaaaggttgtatttcagggcatggaatggatattgctttaactgaaccactgacaatggaaaaaatgagtaatgtggtaaaatactggacaacatgtccctcaaacactgttaagactgaaaacgcaactgggcctgaagaacttggattgcccctgcagaggtcctacagcgaacacctgggatattttcctactgatctatttgcctgctctgaatctttaaggaatggcaatgggcttgaattaaatgcttcgttgtcagagttcgagaaaaacaaaaagatctctcttcttcattcaagcaaggaaaaactaagaaggctgtacaggaagcatagcagcttctgtttctggtgagccctcaggaagcttacaatcatggcaggaggcaaagtggagccaatgtgtcacatagcaagaggaggagcaagagagagagaaaggagaggccccaaactcttttaaaccaccagatcttgcatgaactgagtgagaactcactcatcaccaaggggatggcgctaagctaagccctagagtgcccccatgatttaacacctcccaccaggttccacctccaacattgggcatcacatttcaccataagatttggaggggacaaaacatccaagccacatcagttatcaacccagcattgttatttgttttgcttaaacagtaagctgtcgcccagttatctaatactgtacaacagattactctgaaacttggtagtggaaatcaacaaactgtttatcatatctcatgattttgtgagtcaccagtttgggcagagcttggctctgtgattcttctcagtgtggtgttaaccatggcactccgtgatgttcagccagcaaaactggcctgtctggagattccagcgcagcgtcatccacacatgtggtcttctggtgggtgtggctgcaggttgtgctcaaatgggctgttcttccctgtggtctcatcacttctccacatggtatctccagcaagctagaaggacctcttacatgaaggcttaggattccatgagaccagtgtgaaagctacatcttctgaaatgctggtcccagaactgtcatagagtcactctccagatatcttttgattaaagcaggcacaggccagtgaagattcaagaggagaggaaatggaccctgactctttgttggagaaataagtaattttcagtgactttaatcttaactcttatctttttaacccaaatttcagattcttgtttgcagtagaacaggctcttcactgtatacaagattttgtctgagttgcaaaaattctctccccatgaatttccctgtattaccatcttttgctcctgcatttccccactcagtcttggctgccacaatcaaagggacataaagtacaaggacacttttttcttgcctctgtagtagaaatcttagcagtatacagctgctctaggcctgtcaaataaatatatactattggtttttaaaacattaataaattagaaaactaccctttaatgtatgccacca

SEQ ID NO: 185600 - DNA, 2193 bp, Homo sapiens
  Payload ID: 16550
  Gene Symbol: SOHLH2
  Gene Name: spermatogenesis and oogenesis specific basic helix-loop-helix 2
  Uniprot ID: Q9NX45
  ENST ID: ENST00000379881
  CDS Start-End: 90-1367
ttagtgcagggggcgggcccgggacgcagcggctgtggagctcctcctgctgggaggctgccccaggacccagcacgtgcgcagcggccatggcttcctcaattatctgccaggagcactgccagatctcgggccaggcaaaaatagacatcttattagttggagatgtcactgtgggctacctggctgatactgtacagaaactatttgcaaacatagcagaagtcaccatcaccatcagtgacacgaaggaggcagcagcgcttttggatgattgcatattcaacatggttctcttgaaggtgccttcttcactaagtgccgaggagctggaagccatcaagttaattagatttggcaaaaagaaaaatacacattcactgtttgtttttataatccctgaaaattttaaaggttgtatttcagggcatggaatggatattgctttaactgaaccactgacaatggaaaaaatgagtaatgtggtaaaatactggacaacatgtccctcaaacactgttaagactgaaaacgcaactgggcctgaagaacttggattgcccctgcagaggtcctacagcgaacacctgggatattttcctactgatctatttgcctgctctgaatctttaaggaatggcaatgggcttgaattaaatgcttcgttgtcagagttcgagaaaaacaaaaagatctctcttcttcattcaagcaaggaaaaactaagaagggaaagaatcaaatattgctgtgagcagctgcgtactctcttgccgtatgtaaaagggagaaagaatgatgcggcttcagttcttgaggcaacagttgattatgtgaaatatatccgggagaaaatctctccagccgttatggcccagattacagaagcacttcagagcaacatgaggttttgtaagaaacaacaaacacccattgagctgtctctcccaggcactgtcatggcacagcgggaaaacagtgtgatgagcacttactcccctgagagagggctccaattcctgactaatacgtgctggaatgggtgctccactcctgatgcagagagctccttggatgaagctgtgagagttccatcaagctccgcctcagagaatgctattggtgatccatataaaactcacatttccagtgcagcgctgtctctgaattccttgcatactgtcagatattattctaaagtcaccccttcctacgatgcaactgctgtaacaaatcagaacatttcaattcatttaccttcagccatgcccccggtctcaaagcttctccctcggcactgcacttctgggttgggccagacgtgcactacacatcccaactgtctgcaacagttttgggcgtattaaaagcacatgtttgaaattcacactctcaaccacctactgggcgcagtttgacaatctaggaaaagtggaacaaagaatgattttgaaagctccacccaaagacctaatatcaaaagagttggcatggtttggcttctgataaatgcactcaaagcttctgcagatagaaagaccagcagcgaaaaagctggccacacactgtcactcatcttcatacacacttggatccccgccagccagagagctacaagaacaaatggcctcagtgacctacactctcttttctcaaaaaatattccacaatttatgaaaaaagcatgctataaggaagatccatgtagacacgataaaatgattagattgggaaggtgtgttgataccttgtgtcactgagtacagatattacaacttgattcttatttttagtatccctgtgaattactgtcactcatttctaggtggtcttttccttatttgacattttagagagtttccttcttcattcaccatccaaactaagatatgcagagagatgctgaaagaggggtttacctcctcacttgacaactaatgaataaattgatgtgtgcttttgcatttcacaatcccttgagtgaaacgatggctaataggtaaatatttctttctggaccttaagttacagactagcaggttttttgtttttcatctcttcctccctatgggtattagaaaggacagttgaaaataagggggaaaaaggtttgttttatatttcactgaattgttcttatatgtaagttttattattaaataaaatactcagttttcaccctgagcattgtaa

SEQ ID NO: 185601 - DNA, 2413 bp, Homo sapiens
  Payload ID: 16551
  Gene Symbol: SPATA12
  Gene Name: spermatogenesis associated 12
  Uniprot ID: Q7Z6I5
  ENST ID: ENST00000334325
  CDS Start-End: 676-1248
ccaggaagtgggtacacctgtccccacccccacagtaggagtcagaatcagggactggaagggatggggttcctggaggaagctcacagcagcagcagcctctgagtcacaactcagcccctccctggcatatccctttgtttgctgggagttgagctgtgactcacaaaggctctggtcccgggctgggcccatgtgacccagggtcctgactgccctgcccacagtcactgagaaaattctttgtgcaggctcaccttcccctcatctcccccactcttcctgatcctgcagcgtcagatcccagcctgcagtatcagacctcaaaaggagcctctggtgtcttccaaaagggaaggaaagagagagaaagccactggagttgggcagcgtgggaagctgtgaaagtggacaagcgtgaaagagcttccaagtagtggaaacagcagaagcaaagatgtgaacatgggaaaacctctgcagtatctgggtgactgtggggtttggctctgtttgagcaccccgggatgattggtggtggggtgtggctgaaggtgaattggaacagtgcactcagagccaggttgcaagagtgctgcatgctcctcagggattggctccggccaagtgccccagcctccttttctggagaattctgtttttgacttgggccccatgtccagttctgctctgacttgtgggtccaccttagaaaagtcaggagacacctgggaaatgaaggcactagactcttccagactcgttccatggccacccagaggccttgggtcatccacccaacatcccaacaaaccccactgtgcactggcatcatgccagggtccaggtgtcctgccaggagcagcctctgccctcccagagctgacatttcagggggatgtgtgccaaagtgagacctgtcagagatatttacaagcagccatctctcttgacatcgctgtatcccaaataaatcttctgggaagaccctcttcacctccagctctcctgatacagcaaggcagttgtgagcaagttattcataactctacacctcaatttcttggtatggaagatggggataatgagaggaccacaggatggttgtggagactgtgtgaggatatagatgccgagcccagtagcacagggtgcagccgttcaaaccaactgacatttactgagggctgctttgtcaggtccctctctacagtatactccaacacacacatacacacacatctgtaatcaataataatcctgcaacatctgagagtctggcagctgtttgtctgggcctttgcacatgctatgccctcccttccatcccccacccccaccaggggtgactcgtagccatccctttctgcatcttcttagatatcactttttccaagaagcctccctgtcacacttccccaatatcacagatgaagaaatcaagattcagaaaggttaagttactggcacaaggtcacacaatccagatctcatactcttagcccccggggaaccttcactgtattaaatgacatcaattgatcaatcaatcgatcaatcaatgaaagagtgggaggcatgcatctcctgatccccgatcctatacattttcatctctttattgtttctatcaaagcctgctaagtaattactttccctctgggtaagtgccactaggtgatgaggtgaggtaatcaaatgacatagaagaggaaggagtccactgccagggtaggtgcagtggagcaagtcttacaatgtgcaggattataactccagcaatgacccctaggctcatgctcattccccaggtggcagtttcagaacacattgctcaggtctcaccctgtaaatgtaggtaccagccttctagttgaccatcagaacacacaacgccaagatcttactccagccacctgccaggacctggagggcaggaggagagttctgcctacattgtctcattttccctccccttctgcagtgagatagaccatgtccagtgctcaggagttgactggccacactggggagtttgaccacaacattgggctccatatgcatggaatgaggttgcatgcaattgtccatgaggctgctccctcatttgtctgggtttctgctccaatgctatctcctcagaaagaccttctctgactgaagccagctctgcctccatcccatcactctggatctccttccccagcttcatctccattacactggccactctccctcacatcttattactgatctagttgtctactgtccatctccaccactgggatgtaaactccacaagggaggaatgctgtcagtttctttgactgctgtgtggtcagtaccagggcaatgcctcgcacagagtagccctctctccctaaatgtttttgaataaatgaaataaatgagc

SEQ ID NO: 185602 - DNA, 6405 bp, Homo sapiens
  Payload ID: 16552
  Gene Symbol: SPATA13
  Gene Name: spermatogenesis associated 13
  Uniprot ID: Q96N96
  ENST ID: ENST00000343003
  CDS Start-End: 314-2104
agtttctgggcaggctctggccgggaacgcatacaacgtcaaagcagtgaataagcgatttctgcagttcccgtagctgccagcctgtgcagtcctctgtgatgcttggggaccggctcctcggtcacaccccagtcctgctctgaaggttgccgttttccaaacagaaggatggtagctagaggggagatagcaagattctggagtctggaaagccttcacttggggtgctttcatgtatcatcattccacttgaggctcaaagcacaccaataacaagtacttgttcagaatgtataaacaaccctgagagatgggttttatcatccacattcaacaggtgaaaaaacaaagaaagaaacttgaccaaggactcatactcaaaaaagaaaaatatagaaaagaaaaaaaatgtgcatcgctatcatttgaagtttcttcagatggaggtactgagccctctgccttagtggatgacaacggtagtgaggaggacttcagctatgaagacctctgccaggccagccctcggtacctgcagcccggcggggagcagctggccatcaatgagctgatcagtgatggcaacgtggtctgcgcagaagccctgtgggaccatgtgaccatggatgaccaggaactgggcttcaaagccggggatgtcatccaggttctggaagcctccaacaaggactggtggtggggccgcagtgaagataaggaagcctggttccccgcgagcttcgtcagattgcgagtgaatcaggaagagctgtcggaaaactccagcagcacccccagtgaggagcaggacgaggaggccagccagagccgccacagacactgtgagaacaagcagcagatgcggaccaacgtcatccgggagatcatggacaccgagcgggtgtacatcaaacacctcagggacatctgtgagggctatatccgacagtgccgcaagcacacaggaatgttcaccgttgcgcagctagccactatttttggaaacattgaagatatttacaaattccaaagaaagtttctgaaagaccttgagaaacagtacaacaaagaggaacctcacttaagtgaaataggatcttgctttcttcaaaatcaagagggctttgccatctattccgagtactgcaacaaccacccgggcgcctgcctggagctcgccaacctcatgaagcagggcaagtacagacatttctttgaagcctgccgcctgctgcagcagatgattgacatcgccatcgacgggttcctgctcacaccagtgcagaagatctgcaaatacccgctgcagctggccgagctgctcaagtataccacacaggaacacggtgattacagcaacataaaggcagcatatgaggccatgaagaatgtggcctgtctgatcaacgagcgcaagcgcaagctggagagcatcgacaagatagctcgctggcaggtgtctatcgtgggctgggagggactggatatcttagaccgaagctcagaattgattcattctggggagctgaccaaaatcactaagcaaggcaaaagccagcagcggacgttcttcctgtttgaccaccagctggtgtcctgcaagaaggacctgctgcgcagggacatgctgtactacaagggccggctggacatggatgagatggagcttgtggacctgggggatgggcgcgacaaggactgcaacctcagcgtgaaaaatgccttcaagctcgtcagtaggaccacagacgaggtttatttgttttgtgccaaaaaacaagaagacaaggcgaggtggctgcaggcctgtgcagatgaaaggaggcgggtgcaagaggacaaggagatgggaatggaaatttcagaaaaccagaagaaacttgccatgttaaatgctcaaaaggcaggacatggaaagtcaaaaggctacaacaggtgccctgtggccccaccgcaccagggcctgcaccccatccaccagcgccacatcactatgcccacaagcgtcccccagcagcaggtctttggcctggcggaacccaagaggaagtcctcgctcttctggcacaccttcaacaggctcacccccttccggaaatgaaaacaggaggctgtgcttccatggagctgggtgtcaagagaagaactgtctttgtttcttgtgtgcttcaatccagggaaagtttcttggacccagtgataaaaacttccttttagggatcaatgaaggagagaaggtcttggaatcaccttcagtctttggagacccagctgcctttgtggaagggaggagacggtcatgacacaaagctttatcctacacagaaacacccgtgacccactatgagatggcccagatgtgggacccggtaccatgctctaaagcgagtgattaggcagcagctgaagccacccctgctgatgatgagcaagtgcctgctgcaggtccaaacacagcatccagggctttgcagttcctaaggagtgatgaggttagaggatcacttctgcatttgattttcaaggatgccgtcaagacggggttgacacaatgctgcacgtgtctggtcacacttagaaattgagctcttactctcttctgtaatactgggggacctacagctgccgtggggctgaccacggtgttccctggcatcgtctgtgtccacacagatgctaactggtagtgcaaatgtcatcctgcaaggttcctcttcctgcaagcaaagtggagagaaagaagatgcatctgtcaccttcatcagggtcctcagtgcagagcaacttacgcatcctcaagaatccactgcttttcaggcaaggagggagaaatcctgctgcacactggctttgtcccggagtcggattccctcctgcctgcacgccttcagtaactccgagcagaaatcacatcttgcccacatgctgtaacctaagaaactgctatgcaaggctgggtgctgtggctcatgcctgtaatcccagcactttgggaggccaaggcaggtggatcacctgaggtcaggagttcgagacaagcgtggccaatatggcaaagcccagtctctactaataatacaaaaattagctgggcatggtggcgcatgcctgtaatcccagctactgggaaggctgaggtaggagaatcttttgaatctgggaagcggaggttgcagtgagctgagatcgcaccactgcactccagcctgggagatacagcgagactgtctccaaaaacaaaaacaaaaacaaaaaacattcaaacaactgtttgcaatataaaaagctcatttactgtaatatttatgatacagtgaatatgaaaatgcactggtcagaaggcactctcaaagagccgcactgctcctgacatcgtccttagcaatgaagtcacaaagacagccaaagcagtcctgcttcttggaaatcagaagctgcctttatcacatataaagccaaacagggcataaccatgtcacgtgagcatgtcatcaggcttctgaggacttgttctttataaaaaaagaccttcacaaaatatcttggcttagagatagcagtctttattaacaaaggccacctaggctgacacctgcagataatcatctccttttctttgtctatgttgtacattttcatgatataacttttaactatgtctagagaaggcaggctctgcaagagaggtgccctttcaacccgctcagtgccctggacaggagatgctgtgttaaactgttaatggatatctatatgagaagctcatttttgtatgctatccctgcagtttttttttttctaacaggcccatgtttgagaataaacaagtctgtgatgtcagagacaaaggtgtattcttcagtctgcaggtgtgtggcacctcccttctcccctgcagccccccacatccagagccgttcctgagagtgacatcatgcatcaagaaaacataaccttggtcctcaggtgaacccttggaacattctgtgaccgcctgatgtccattctgagccaccttggcacacatgcttacaggcagcactgctaagggttcaggtgccccatggctgacagcccgagttgcttctgtggaccatcatgccgctcggcacgtcctgagacagaagttgctgcaggaaggagcttctggagaggtcctgtggcatgtgtgggggtgtgtgtgtgtatgtttccttcttgaacagacattccaactttagatgtgtttatagaactgacctttttactaacaaaatacaatgatatatgttggaaactacttaatatgcttttcctgcacaccttagcaataactgtaggggtctctgctagagttgtttgtatgtacagcaattttgaacaaattgttttaaatgtaatataagagaattagtttaaggaagtaaagagaatcatttgcttgtgttacattttcagtgaggattcagtttaagagtcattcttaggacttccatttcctaatatttattcatgggtaatgaagaaatggtttgcattttgtggccagtcctaatttattttccagctgagccctaacttccggctcccacctacctccacggacttcctaacagagacttatgaataccaggatgtgtttttgttaagtcaggttcaattcgttgcccctgtcagttttatagagtgtgagggtcactccattaaagatctctcctgggtggatcctacttggatgttcaggtgattttgaaaactgctaacatttttaaaaggctagaacatcctttgacttcttgaaaatctgcatgtctggcttgggttttattaccacatgcctgagttcttcaagaatggaaggctcaagtattctcatcttccatttgccaaacttccttcctgatttgagtcacgtgttccacttggaaagaaagggaacagagagcctcctccatggacagtgtatgaatttcattgggaatcttgctctctcccgcctctatgcctttctctctttttaaccttactttacataatattatagatgggccaagaaaagaaaagatgacataacattttgatgaatttcacctattccattcttcacgtttcagaattggtcgactttgttagaagataattgaagtagccttgggtcaaaagcaaccttttcaattgtgatcatacctaaaacatataaaaaccctgccgtagattaaaagcaattataaaatcataaaattgaatgtttgcagaatcctggagcagtagatttctttgtctttggcctgcggactagaaagagggcagcagtagtatgctggagcttccctgggataccagccacatggtttcttttcattagatctgatttttgtttcccactgtagatctgattttgtagttgaaaacatttcaccaccatcaaacactatttctgaatattgtgcctttttatacctagcctagatgaaaaccgatgccattcttattcagaaaatccccccatcctacatgactgttatctagacataaagcaaagtgcatttaattcaaaatttggttcacaatataagtattttgtaaaagccagctgaaccagcattttatcaggtggaaatctctgcaagccaaattgctgatactccttcatgcagatcaacttggtgtcccagtcagaatagaacagcataattacctggagttagggggagtatttctgcactattacttgtcagggagagaagaaacttagaattgtccctcaaaggagtgtcaagaagtatgaataaatgtcctttcaccagctcacaggccagaaatggaggacccaagtcaactaggtgaaactactagcagacccagctttcccataataacctaatctgcaaattgttctattaaagtctcattgttttcaggatgcaatgaaagtggatttcaaaaggctttggaaaaataagtggaacatgactgatcttgaaaaaaaaagcaaaagcttaaatatttgatacaagtttacttagctacaacatactttacattgttgcctttagttatctcacaggcactgacattttatatttagaaaatacttttaatctttctaatctttttttgtaaatattagtgtccattctgtatgactcgctaacctactttgcaaggctttgggcaacattttagctcattaacttcaagatgatgtgtcatctgtataggtcaaagaatgggacttctgaactgaggaatttgctgttgacagccaaagtatagtgtacaagattgatgtaacttgatatgtatttttgttgaagttttttgtaaaaaaaaattatttacaatgttatttgaatgatttttttaaatgctgtgaatctatatttgttgttttgtatattaaaattcatttgccaaactcgt

SEQ ID NO: 185603 - DNA, 6665 bp, Homo sapiens
  Payload ID: 16552
  Gene Symbol: SPATA13
  Gene Name: spermatogenesis associated 13
  Uniprot ID: Q96N96
  ENST ID: ENST00000382095
  CDS Start-End: 408-2366
gtgtgcgttgcgctttctcccgcgatcgccctgccggtcgctagctccgagggcgcgcactggatcccaggctcctccgagagtgcggcgacctcggggctccgccggcaccggaggtggctctgagggcagggacgtgttggacacgctgactttgtaggctccgccaagaggcgccgcaggaggtcgtccctgatggcccctggaggcgaagctcatcacaggatgaggaaaggacagaggcacagagaacccccaagaggagatggggctctgggagacggccaaggcctcggccattctctgactacggccagctggccagccgcagtttgtctattcctgaagactcggttgctgcagacccccagaaggaagaccgtgtggacgaggacccccaggcaagcatgacttctgccagccctgaagaccagaatgctccagtgggctgccccaaaggagcccggagaaggcgccccatttccgtgataggtggggtcagcttgtatgggaccaaccagacggaggaactggacaatcttctgacccaaccggcttccaggccgcccatgcctgctcaccaggtgccaccctacaaggctgtgtcggcccggttccggcccttcacattctcccagagcacccccattgggttggaccgtgtgggacgccggcggcagatgagagcatccaacgtttcttcagatggaggtactgagccctctgccttagtggatgacaacggtagtgaggaggacttcagctatgaagacctctgccaggccagccctcggtacctgcagcccggcggggagcagctggccatcaatgagctgatcagtgatggcaacgtggtctgcgcagaagccctgtgggaccatgtgaccatggatgaccaggaactgggcttcaaagccggggatgtcatccaggttctggaagcctccaacaaggactggtggtggggccgcagtgaagataaggaagcctggttccccgcgagcttcgtcagattgcgagtgaatcaggaagagctgtcggaaaactccagcagcacccccagtgaggagcaggacgaggaggccagccagagccgccacagacactgtgagaacaagcagcagatgcggaccaacgtcatccgggagatcatggacaccgagcgggtgtacatcaaacacctcagggacatctgtgagggctatatccgacagtgccgcaagcacacaggaatgttcaccgttgcgcagctagccactatttttggaaacattgaagatatttacaaattccaaagaaagtttctgaaagaccttgagaaacagtacaacaaagaggaacctcacttaagtgaaataggatcttgctttcttcaaaatcaagagggctttgccatctattccgagtactgcaacaaccacccgggcgcctgcctggagctcgccaacctcatgaagcagggcaagtacagacatttctttgaagcctgccgcctgctgcagcagatgattgacatcgccatcgacgggttcctgctcacaccagtgcagaagatctgcaaatacccgctgcagctggccgagctgctcaagtataccacacaggaacacggtgattacagcaacataaaggcagcatatgaggccatgaagaatgtggcctgtctgatcaacgagcgcaagcgcaagctggagagcatcgacaagatagctcgctggcaggtgtctatcgtgggctgggagggactggatatcttagaccgaagctcagaattgattcattctggggagctgaccaaaatcactaagcaaggcaaaagccagcagcggacgttcttcctgtttgaccaccagctggtgtcctgcaagaaggacctgctgcgcagggacatgctgtactacaagggccggctggacatggatgagatggagcttgtggacctgggggatgggcgcgacaaggactgcaacctcagcgtgaaaaatgccttcaagctcgtcagtaggaccacagacgaggtttatttgttttgtgccaaaaaacaagaagacaaggcgaggtggctgcaggcctgtgcagatgaaaggaggcgggtgcaagaggacaaggagatgggaatggaaatttcagaaaaccagaagaaacttgccatgttaaatgctcaaaaggcaggacatggaaagtcaaaaggctacaacaggtgccctgtggccccaccgcaccagggcctgcaccccatccaccagcgccacatcactatgcccacaagcgtcccccagcagcaggtctttggcctggcggaacccaagaggaagtcctcgctcttctggcacaccttcaacaggctcacccccttccggaaatgaaaacaggaggctgtgcttccatggagctgggtgtcaagagaagaactgtctttgtttcttgtgtgcttcaatccagggaaagtttcttggacccagtgataaaaacttccttttagggatcaatgaaggagagaaggtcttggaatcaccttcagtctttggagacccagctgcctttgtggaagggaggagacggtcatgacacaaagctttatcctacacagaaacacccgtgacccactatgagatggcccagatgtgggacccggtaccatgctctaaagcgagtgattaggcagcagctgaagccacccctgctgatgatgagcaagtgcctgctgcaggtccaaacacagcatccagggctttgcagttcctaaggagtgatgaggttagaggatcacttctgcatttgattttcaaggatgccgtcaagacggggttgacacaatgctgcacgtgtctggtcacacttagaaattgagctcttactctcttctgtaatactgggggacctacagctgccgtggggctgaccacggtgttccctggcatcgtctgtgtccacacagatgctaactggtagtgcaaatgtcatcctgcaaggttcctcttcctgcaagcaaagtggagagaaagaagatgcatctgtcaccttcatcagggtcctcagtgcagagcaacttacgcatcctcaagaatccactgcttttcaggcaaggagggagaaatcctgctgcacactggctttgtcccggagtcggattccctcctgcctgcacgccttcagtaactccgagcagaaatcacatcttgcccacatgctgtaacctaagaaactgctatgcaaggctgggtgctgtggctcatgcctgtaatcccagcactttgggaggccaaggcaggtggatcacctgaggtcaggagttcgagacaagcgtggccaatatggcaaagcccagtctctactaataatacaaaaattagctgggcatggtggcgcatgcctgtaatcccagctactgggaaggctgaggtaggagaatcttttgaatctgggaagcggaggttgcagtgagctgagatcgcaccactgcactccagcctgggagatacagcgagactgtctccaaaaacaaaaacaaaaacaaaaaacattcaaacaactgtttgcaatataaaaagctcatttactgtaatatttatgatacagtgaatatgaaaatgcactggtcagaaggcactctcaaagagccgcactgctcctgacatcgtccttagcaatgaagtcacaaagacagccaaagcagtcctgcttcttggaaatcagaagctgcctttatcacatataaagccaaacagggcataaccatgtcacgtgagcatgtcatcaggcttctgaggacttgttctttataaaaaaagaccttcacaaaatatcttggcttagagatagcagtctttattaacaaaggccacctaggctgacacctgcagataatcatctccttttctttgtctatgttgtacattttcatgatataacttttaactatgtctagagaaggcaggctctgcaagagaggtgccctttcaacccgctcagtgccctggacaggagatgctgtgttaaactgttaatggatatctatatgagaagctcatttttgtatgctatccctgcagtttttttttttctaacaggcccatgtttgagaataaacaagtctgtgatgtcagagacaaaggtgtattcttcagtctgcaggtgtgtggcacctcccttctcccctgcagccccccacatccagagccgttcctgagagtgacatcatgcatcaagaaaacataaccttggtcctcaggtgaacccttggaacattctgtgaccgcctgatgtccattctgagccaccttggcacacatgcttacaggcagcactgctaagggttcaggtgccccatggctgacagcccgagttgcttctgtggaccatcatgccgctcggcacgtcctgagacagaagttgctgcaggaaggagcttctggagaggtcctgtggcatgtgtgggggtgtgtgtgtgtatgtttccttcttgaacagacattccaactttagatgtgtttatagaactgacctttttactaacaaaatacaatgatatatgttggaaactacttaatatgcttttcctgcacaccttagcaataactgtaggggtctctgctagagttgtttgtatgtacagcaattttgaacaaattgttttaaatgtaatataagagaattagtttaaggaagtaaagagaatcatttgcttgtgttacattttcagtgaggattcagtttaagagtcattcttaggacttccatttcctaatatttattcatgggtaatgaagaaatggtttgcattttgtggccagtcctaatttattttccagctgagccctaacttccggctcccacctacctccacggacttcctaacagagacttatgaataccaggatgtgtttttgttaagtcaggttcaattcgttgcccctgtcagttttatagagtgtgagggtcactccattaaagatctctcctgggtggatcctacttggatgttcaggtgattttgaaaactgctaacatttttaaaaggctagaacatcctttgacttcttgaaaatctgcatgtctggcttgggttttattaccacatgcctgagttcttcaagaatggaaggctcaagtattctcatcttccatttgccaaacttccttcctgatttgagtcacgtgttccacttggaaagaaagggaacagagagcctcctccatggacagtgtatgaatttcattgggaatcttgctctctcccgcctctatgcctttctctctttttaaccttactttacataatattatagatgggccaagaaaagaaaagatgacataacattttgatgaatttcacctattccattcttcacgtttcagaattggtcgactttgttagaagataattgaagtagccttgggtcaaaagcaaccttttcaattgtgatcatacctaaaacatataaaaaccctgccgtagattaaaagcaattataaaatcataaaattgaatgtttgcagaatcctggagcagtagatttctttgtctttggcctgcggactagaaagagggcagcagtagtatgctggagcttccctgggataccagccacatggtttcttttcattagatctgatttttgtttcccactgtagatctgattttgtagttgaaaacatttcaccaccatcaaacactatttctgaatattgtgcctttttatacctagcctagatgaaaaccgatgccattcttattcagaaaatccccccatcctacatgactgttatctagacataaagcaaagtgcatttaattcaaaatttggttcacaatataagtattttgtaaaagccagctgaaccagcattttatcaggtggaaatctctgcaagccaaattgctgatactccttcatgcagatcaacttggtgtcccagtcagaatagaacagcataattacctggagttagggggagtatttctgcactattacttgtcagggagagaagaaacttagaattgtccctcaaaggagtgtcaagaagtatgaataaatgtcctttcaccagctcacaggccagaaatggaggacccaagtcaactaggtgaaactactagcagacccagctttcccataataacctaatctgcaaattgttctattaaagtctcattgttttcaggatgcaatgaaagtggatttcaaaaggctttggaaaaataagtggaacatgactgatcttgaaaaaaaaagcaaaagcttaaatatttgatacaagtttacttagctacaacatactttacattgttgcctttagttatctcacaggcactgacattttatatttagaaaatacttttaatctttctaatctttttttgtaaatattagtgtccattctgtatgactcgctaacctactttgcaaggctttgggcaacattttagctcattaacttcaagatgatgtgtcatctgtataggtcaaagaatgggacttctgaactgaggaatttgctgttgacagccaaagtatagtgtacaagattgatgtaacttgatatgtatttttgttgaagttttttgtaaaaaaaaattatttacaatgttatttgaatgatttttttaaatgctgtgaatctatatttgttgttttgtatattaaaattcatttgccaaactc

SEQ ID NO: 185604 - DNA, 8463 bp, Homo sapiens
  Payload ID: 16552
  Gene Symbol: SPATA13
  Gene Name: spermatogenesis associated 13
  Uniprot ID: Q96N96
  ENST ID: ENST00000382108
  CDS Start-End: 329-4162
ggctgagtgtgctgccgcggcgcgggaggagagtgtgcgttgcgctttctcccgcgatcgccctgccggtcgctagctccgagggcgcgcactggatcccaggctcctccgagagtgcggcgacctcggggctccgccggcaccggaggtggctctgagggcagggacgtgttggacacgctgactttgtaggctccgccaagaggcgccgcaggagcccgtggccacccaggagcccgatgtgcaaggcaggtgtgagtgccaggacggcattcctggagatgaaggcctggagctgcggtctgcggactcggcagtgcccgtggccatgacccaggctgccgtgcggccctgggcaccctgcctggagaacatgaccactgccccaaacggcctcgggccaggccccgcagccccctgtgcaggctcggacctgaaagacgccaagatggtgacctcccttgcgtgtggaaatggagtctgtggctgcagccctggtggcgacacggacacccaggaagccaaactcagcccagccaagcttgtgcgcctcttttccaccagtcggaagaggacgggtgcccaccccgagcggccccactccatggtcctggtggggaactcctccacatggaacaccctcgcctccttccggaaaatgggatcctttaagaaactgaagtcctcagtcctgaaaggaattcagagccgagaggggtcaaatgcctgttcaaagggagaggcttcggagcatggcctgggaaagtccatcccaaatggcgctgtcccaggagcccaggcaagcaggggctcccccttagcaccgggaccagcatgtggtgccctcaggccagcagagtggggcacattggatggctccgacctcgaggacacggacgatgccttccagcggagcacacaccgctcccgcagcctccgcagagcctacggcctgggccgcatctgcctgctggatgcgccccagaaccatgcgacacccacgatagccactggccaggtgcccgccgtgtgtgagattctcgtgagggaccctgaaaacaacagcatgggctacaggaggagcaagagcacggacaatcttgcctttctgaagaagagctcctttaagcggaagtccacctccaatcttgcagacctcaggacggcccatgacgcacgggtaccacagaggaccctgagcagttcctccactgactcccaaaagcttgggtcaggaaggaccaaacgctggaggagcccgataagggccaaggactttgacagagtcttcaaacttgtgagcaatgtgactgaggctgcctggaggagggagagtcctaggagtggggccccatcccctggagaggccagcctgagacttcaggcacacagccggctgcatgacgactactcccgccgcgtctccaggagcactgagcaggacagcaggcggggcggggcggtcatgcatgggaccactgcaacctgcaccgtggcccccggtttcggctcagccacctctaaggggccccacctagacgctgacactgccgtatttcctcttgaaaccaaaagttcctgggcggtggaaagcgacagttcctgcacttgcagctctttgccaagcccgattgtccaggatgtgttgagcaaagactcctgtgacccaaacgctggcagccagttgacatttgaccctgagcagcctcccacccctctaaggcccaccacacccaagccccagagccctcagagcccccagagccccggggcaggaagtgccagctgtcacagcaatcacagtgccctgtccgcgaattcagaggaaagtgaaggaagggcagaagagcctgctcagagagagccagggcctgtgtccttgcaggatcccctggaagccacacatggtgatgagggcagcaaggaccttctggtgaacattggtgtggcagccggcccagaagaaaaggagaaggaggaggtcgtccctgatggcccctggaggcgaagctcatcacaggatgaggaaaggacagaggcacagagaacccccaagaggagatggggctctgggagacggccaaggcctcggccattctctgactacggccagctggccagccgcagtttgtctattcctgaagactcggttgctgcagacccccagaaggaagaccgtgtggacgaggacccccaggcaagcatgacttctgccagccctgaagaccagaatgctccagtgggctgccccaaaggagcccggagaaggcgccccatttccgtgataggtggggtcagcttgtatgggaccaaccagacggaggaactggacaatcttctgacccaaccggcttccaggccgcccatgcctgctcaccaggtgccaccctacaaggctgtgtcggcccggttccggcccttcacattctcccagagcacccccattgggttggaccgtgtgggacgccggcggcagatgagagcatccaacgtttcttcagatggaggtactgagccctctgccttagtggatgacaacggtagtgaggaggacttcagctatgaagacctctgccaggccagccctcggtacctgcagcccggcggggagcagctggccatcaatgagctgatcagtgatggcaacgtggtctgcgcagaagccctgtgggaccatgtgaccatggatgaccaggaactgggcttcaaagccggggatgtcatccaggttctggaagcctccaacaaggactggtggtggggccgcagtgaagataaggaagcctggttccccgcgagcttcgtcagattgcgagtgaatcaggaagagctgtcggaaaactccagcagcacccccagtgaggagcaggacgaggaggccagccagagccgccacagacactgtgagaacaagcagcagatgcggaccaacgtcatccgggagatcatggacaccgagcgggtgtacatcaaacacctcagggacatctgtgagggctatatccgacagtgccgcaagcacacaggaatgttcaccgttgcgcagctagccactatttttggaaacattgaagatatttacaaattccaaagaaagtttctgaaagaccttgagaaacagtacaacaaagaggaacctcacttaagtgaaataggatcttgctttcttcaaaatcaagagggctttgccatctattccgagtactgcaacaaccacccgggcgcctgcctggagctcgccaacctcatgaagcagggcaagtacagacatttctttgaagcctgccgcctgctgcagcagatgattgacatcgccatcgacgggttcctgctcacaccagtgcagaagatctgcaaatacccgctgcagctggccgagctgctcaagtataccacacaggaacacggtgattacagcaacataaaggcagcatatgaggccatgaagaatgtggcctgtctgatcaacgagcgcaagcgcaagctggagagcatcgacaagatagctcgctggcaggtgtctatcgtgggctgggagggactggatatcttagaccgaagctcagaattgattcattctggggagctgaccaaaatcactaagcaaggcaaaagccagcagcggacgttcttcctgtttgaccaccagctggtgtcctgcaagaaggacctgctgcgcagggacatgctgtactacaagggccggctggacatggatgagatggagcttgtggacctgggggatgggcgcgacaaggactgcaacctcagcgtgaaaaatgccttcaagctcgtcagtaggaccacagacgaggtttatttgttttgtgccaaaaaacaagaagacaaggcgaggtggctgcaggcctgtgcagatgaaaggaggcgggtgcaagaggacaaggagatgggaatggaaatttcagaaaaccagaagaaacttgccatgttaaatgctcaaaaggcaggacatggaaagtcaaaaggctacaacaggtgccctgtggccccaccgcaccagggcctgcaccccatccaccagcgccacatcactatgcccacaagcgtcccccagcagcaggtctttggcctggcggaacccaagaggaagtcctcgctcttctggcacaccttcaacaggctcacccccttccggaaatgaaaacaggaggctgtgcttccatggagctgggtgtcaagagaagaactgtctttgtttcttgtgtgcttcaatccagggaaagtttcttggacccagtgataaaaacttccttttagggatcaatgaaggagagaaggtcttggaatcaccttcagtctttggagacccagctgcctttgtggaagggaggagacggtcatgacacaaagctttatcctacacagaaacacccgtgacccactatgagatggcccagatgtgggacccggtaccatgctctaaagcgagtgattaggcagcagctgaagccacccctgctgatgatgagcaagtgcctgctgcaggtccaaacacagcatccagggctttgcagttcctaaggagtgatgaggttagaggatcacttctgcatttgattttcaaggatgccgtcaagacggggttgacacaatgctgcacgtgtctggtcacacttagaaattgagctcttactctcttctgtaatactgggggacctacagctgccgtggggctgaccacggtgttccctggcatcgtctgtgtccacacagatgctaactggtagtgcaaatgtcatcctgcaaggttcctcttcctgcaagcaaagtggagagaaagaagatgcatctgtcaccttcatcagggtcctcagtgcagagcaacttacgcatcctcaagaatccactgcttttcaggcaaggagggagaaatcctgctgcacactggctttgtcccggagtcggattccctcctgcctgcacgccttcagtaactccgagcagaaatcacatcttgcccacatgctgtaacctaagaaactgctatgcaaggctgggtgctgtggctcatgcctgtaatcccagcactttgggaggccaaggcaggtggatcacctgaggtcaggagttcgagacaagcgtggccaatatggcaaagcccagtctctactaataatacaaaaattagctgggcatggtggcgcatgcctgtaatcccagctactgggaaggctgaggtaggagaatcttttgaatctgggaagcggaggttgcagtgagctgagatcgcaccactgcactccagcctgggagatacagcgagactgtctccaaaaacaaaaacaaaaacaaaaaacattcaaacaactgtttgcaatataaaaagctcatttactgtaatatttatgatacagtgaatatgaaaatgcactggtcagaaggcactctcaaagagccgcactgctcctgacatcgtccttagcaatgaagtcacaaagacagccaaagcagtcctgcttcttggaaatcagaagctgcctttatcacatataaagccaaacagggcataaccatgtcacgtgagcatgtcatcaggcttctgaggacttgttctttataaaaaaagaccttcacaaaatatcttggcttagagatagcagtctttattaacaaaggccacctaggctgacacctgcagataatcatctccttttctttgtctatgttgtacattttcatgatataacttttaactatgtctagagaaggcaggctctgcaagagaggtgccctttcaacccgctcagtgccctggacaggagatgctgtgttaaactgttaatggatatctatatgagaagctcatttttgtatgctatccctgcagtttttttttttctaacaggcccatgtttgagaataaacaagtctgtgatgtcagagacaaaggtgtattcttcagtctgcaggtgtgtggcacctcccttctcccctgcagccccccacatccagagccgttcctgagagtgacatcatgcatcaagaaaacataaccttggtcctcaggtgaacccttggaacattctgtgaccgcctgatgtccattctgagccaccttggcacacatgcttacaggcagcactgctaagggttcaggtgccccatggctgacagcccgagttgcttctgtggaccatcatgccgctcggcacgtcctgagacagaagttgctgcaggaaggagcttctggagaggtcctgtggcatgtgtgggggtgtgtgtgtgtatgtttccttcttgaacagacattccaactttagatgtgtttatagaactgacctttttactaacaaaatacaatgatatatgttggaaactacttaatatgcttttcctgcacaccttagcaataactgtaggggtctctgctagagttgtttgtatgtacagcaattttgaacaaattgttttaaatgtaatataagagaattagtttaaggaagtaaagagaatcatttgcttgtgttacattttcagtgaggattcagtttaagagtcattcttaggacttccatttcctaatatttattcatgggtaatgaagaaatggtttgcattttgtggccagtcctaatttattttccagctgagccctaacttccggctcccacctacctccacggacttcctaacagagacttatgaataccaggatgtgtttttgttaagtcaggttcaattcgttgcccctgtcagttttatagagtgtgagggtcactccattaaagatctctcctgggtggatcctacttggatgttcaggtgattttgaaaactgctaacatttttaaaaggctagaacatcctttgacttcttgaaaatctgcatgtctggcttgggttttattaccacatgcctgagttcttcaagaatggaaggctcaagtattctcatcttccatttgccaaacttccttcctgatttgagtcacgtgttccacttggaaagaaagggaacagagagcctcctccatggacagtgtatgaatttcattgggaatcttgctctctcccgcctctatgcctttctctctttttaaccttactttacataatattatagatgggccaagaaaagaaaagatgacataacattttgatgaatttcacctattccattcttcacgtttcagaattggtcgactttgttagaagataattgaagtagccttgggtcaaaagcaaccttttcaattgtgatcatacctaaaacatataaaaaccctgccgtagattaaaagcaattataaaatcataaaattgaatgtttgcagaatcctggagcagtagatttctttgtctttggcctgcggactagaaagagggcagcagtagtatgctggagcttccctgggataccagccacatggtttcttttcattagatctgatttttgtttcccactgtagatctgattttgtagttgaaaacatttcaccaccatcaaacactatttctgaatattgtgcctttttatacctagcctagatgaaaaccgatgccattcttattcagaaaatccccccatcctacatgactgttatctagacataaagcaaagtgcatttaattcaaaatttggttcacaatataagtattttgtaaaagccagctgaaccagcattttatcaggtggaaatctctgcaagccaaattgctgatactccttcatgcagatcaacttggtgtcccagtcagaatagaacagcataattacctggagttagggggagtatttctgcactattacttgtcagggagagaagaaacttagaattgtccctcaaaggagtgtcaagaagtatgaataaatgtcctttcaccagctcacaggccagaaatggaggacccaagtcaactaggtgaaactactagcagacccagctttcccataataacctaatctgcaaattgttctattaaagtctcattgttttcaggatgcaatgaaagtggatttcaaaaggctttggaaaaataagtggaacatgactgatcttgaaaaaaaaagcaaaagcttaaatatttgatacaagtttacttagctacaacatactttacattgttgcctttagttatctcacaggcactgacattttatatttagaaaatacttttaatctttctaatctttttttgtaaatattagtgtccattctgtatgactcgctaacctactttgcaaggctttgggcaacattttagctcattaacttcaagatgatgtgtcatctgtataggtcaaagaatgggacttctgaactgaggaatttgctgttgacagccaaagtatagtgtacaagattgatgtaacttgatatgtatttttgttgaagttttttgtaaaaaaaaattatttacaatgttatttgaatgatttttttaaatgctgtgaatctatatttgttgttttgtatattaaaattcatttgccaaactcgt

SEQ ID NO: 185605 - DNA, 3026 bp, Homo sapiens
  Payload ID: 16552
  Gene Symbol: SPATA13
  Gene Name: spermatogenesis associated 13
  Uniprot ID: Q96N96
  ENST ID: ENST00000399949
  CDS Start-End: 171-1895
gtttctgggcaggctctggccgggaacgcatacaacgtcaaagcagtgaataagcgatttctgcagttcccgtagctgccagcctgtgcagtcctctgtgatgcttggggaccggctcctcggtcacaccccagtcctgctctgaaggttgccgttttccaaacagaaggatggtagctagaggggagatagcaagattctggagtctggaaagccttcacttggtttcttcagatggaggtactgagccctctgccttagtggatgacaacggtagtgaggaggacttcagctatgaagacctctgccaggccagccctcggtacctgcagcccggcggggagcagctggccatcaatgagctgatcagtgatggcaacgtggtctgcgcagaagccctgtgggaccatgtgaccatggatgaccaggaactgggcttcaaagccggggatgtcatccaggttctggaagcctccaacaaggactggtggtggggccgcagtgaagataaggaagcctggttccccgcgagcttcgtcagattgcgagtgaatcaggaagagctgtcggaaaactccagcagcacccccagtgaggagcaggacgaggaggccagccagagccgccacagacactgtgagaacaagcagcagatgcggaccaacgtcatccgggagatcatggacaccgagcgggtgtacatcaaacacctcagggacatctgtgagggctatatccgacagtgccgcaagcacacaggaatgttcaccgttgcgcagctagccactatttttggaaacattgaagatatttacaaattccaaagaaagtttctgaaagaccttgagaaacagtacaacaaagaggaacctcacttaagtgaaataggatcttgctttcttcaaaatcaagagggctttgccatctattccgagtactgcaacaaccacccgggcgcctgcctggagctcgccaacctcatgaagcagggcaagtacagacatttctttgaagcctgccgcctgctgcagcagatgattgacatcgccatcgacgggttcctgctcacaccagtgcagaagatctgcaaatacccgctgcagctggccgagctgctcaagtataccacacaggaacacggtgattacagcaacataaaggcagcatatgaggccatgaagaatgtggcctgtctgatcaacgagcgcaagcgcaagctggagagcatcgacaagatagctcgctggcaggtgtctatcgtgggctgggagggactggatatcttagaccgaagctcagaattgattcattctggggagctgaccaaaatcactaagcaaggcaaaagccagcagcggacgttcttcctgtttgaccaccagctggtgtcctgcaagaaggacctgctgcgcagggacatgctgtactacaagggccggctggacatggatgagatggagcttgtggacctgggggatgggcgcgacaaggactgcaacctcagcgtgaaaaatgccttcaagctcgtcagtaggaccacagacgaggtttatttgttttgtgccaaaaaacaagaagacaaggcgaggtggctgcaggcctgtgcagatgaaaggaggcgggtgcaagaggacaaggagatgggaatggaaatttcagaaaaccagaagaaacttgccatgttaaatgctcaaaaggcaggacatggaaagtcaaaaggctacaacaggtgccctgtggccccaccgcaccagggcctgcaccccatccaccagcgccacatcactatgcccacaagcgtcccccagcagcaggtctttggcctggcggaacccaagaggaagtcctcgctcttctggcacaccttcaacaggctcacccccttccggaaatgaaaacaggaggctgtgcttccatggagctgggtgtcaagagaagaactgtctttgtttcttgtgtgcttcaatccagggaaagtttcttggacccagtgataaaaacttccttttagggatcaatgaaggagagaaggtcttggaatcaccttcagtctttggagacccagctgcctttgtggaagggaggagacggtcatgacacaaagctttatcctacacagaaacacccgtgacccactatgagatggcccagatgtgggacccggtaccatgctctaaagcgagtgattaggcagcagctgaagccacccctgctgatgatgagcaagtgcctgctgcaggtccaaacacagcatccagggctttgcagttcctaaggagtgatgaggttagaggatcacttctgcatttgattttcaaggatgccgtcaagacggggttgacacaatgctgcacgtgtctggtcacacttagaaattgagctcttactctcttctgtaatactgggggacctacagctgccgtggggctgaccacggtgttccctggcatcgtctgtgtccacacagatgctaactggtagtgcaaatgtcatcctgcaaggttcctcttcctgcaagcaaagtggagagaaagaagatgcatctgtcaccttcatcagggtcctcagtgcagagcaacttacgcatcctcaagaatccactgcttttcaggcaaggagggagaaatcctgctgcacactggctttgtcccggagtcggattccctcctgcctgcacgccttcagtaactccgagcagaaatcacatcttgcccacatgctgtaacctaagaaactgctatgcaaggctgggtgctgtggctcatgcctgtaatcccagcactttgggaggccaaggcaggtggatcacctgaggtcaggagttcgagacaagcgtggccaatatggcaaagcccagtctctactaataatacaaaaattagctgggcatggtggcgcatgcctgtaatcccagctactgggaaggctgaggtaggagaatcttttgaatctgggaagcggaggttgcagtgagctgagatcgcaccactgcactccagcctgggagatacagcgagactgtctcc

SEQ ID NO: 185606 - DNA, 2111 bp, Homo sapiens
  Payload ID: 16552
  Gene Symbol: SPATA13
  Gene Name: spermatogenesis associated 13
  ENST ID: ENST00000409126
  CDS Start-End: 140-1678
acaacgtcaaagcagtgaataagcgatttctgcagttcccgtagctgccagcctgtgcagtcctctgtgatgcttggggaccggctcctcggtcacaccccagtcctgctctgaaggttgccgttttccaaacagaaggatggtagctagaggggagatagcaagattctggagtctggaaagccttcacttggtttcttcagatggaggtactgagccctctgccttagtggatgacaacggtagtgaggaggacttcagctatgaagacctctgccaggccagccctcggtacctgcagcccggcggggagcagctggccatcaatgagctgatcagtgatggcaacgtggtctgcgcagaagccctgtgggaccatgtgaccatggatgaccaggaactgggcttcaaagccggggatgtcatccaggttctggaagcctccaacaaggactggtggtggggccgcagtgaagataaggaagcctggttccccgcgagcttcgtcagaggctatatccgacagtgccgcaagcacacaggaatgttcaccgttgcgcagctagccactatttttggaaacattgaagatatttacaaattccaaagaaagtttctgaaagaccttgagaaacagtacaacaaagaggaacctcacttaagtgaaataggatcttgctttcttcaaaatcaagagggctttgccatctattccgagtactgcaacaaccacccgggcgcctgcctggagctcgccaacctcatgaagcagggcaagtacagacatttctttgaagcctgccgcctgctgcagcagatgattgacatcgccatcgacgggttcctgctcacaccagtgcagaagatctgcaaatacccgctgcagctggccgagctgctcaagtataccacacaggaacacggtgattacagcaacataaaggcagcatatgaggccatgaagaatgtggcctgtctgatcaacgagcgcaagcgcaagctggagagcatcgacaagatagctcgctggcaggtgtctatcgtgggctgggagggactggatatcttagaccgaagctcagaattgattcattctggggagctgaccaaaatcactaagcaaggcaaaagccagcagcggacgttcttcctgtttgaccaccagctggtgtcctgcaagaaggacctgctgcgcagggacatgctgtactacaagggccggctggacatggatgagatggagcttgtggacctgggggatgggcgcgacaaggactgcaacctcagcgtgaaaaatgccttcaagctcgtcagtaggaccacagacgaggtttatttgttttgtgccaaaaaacaagaagacaaggcgaggtggctgcaggcctgtgcagatgaaaggaggcgggtgcaagaggacaaggagatgggaatggaaatttcagaaaaccagaagaaacttgccatgttaaatgctcaaaaggcaggacatggaaagtcaaaaggctacaacaggtgccctgtggccccaccgcaccagggcctgcaccccatccaccagcgccacatcactatgcccacaagcgtcccccagcagcaggtctttggcctggcggaacccaagaggaagtcctcgctcttctggcacaccttcaacaggctcacccccttccggaaatgaaaacaggaggctgtgcttccatggagctgggtgtcaagagaagaactgtctttgtttcttgtgtgcttcaatccagggaaagtttcttggacccagtgataaaaacttccttttagggatcaatgaaggagagaaggtcttggaatcaccttcagtctttggagacccagctgcctttgtggaagggaggagacggtcatgacacaaagctttatcctacacagaaacacccgtgacccactatgagatggcccagatgtgggacccggtaccatgctctaaagcgagtgattaggcagcagctgaagccacccctgctgatgatgagcaagtgcctgctgcaggtccaaacacagcatccagggctttgcagttcctaaggagtgatgaggttagaggatcacttctgcatttgattttcaaggatgccgtc

SEQ ID NO: 185607 - DNA, 597 bp, Homo sapiens
  Payload ID: 16552
  Gene Symbol: SPATA13
  Gene Name: spermatogenesis associated 13
  ENST ID: ENST00000454083
  CDS Start-End: 160-597
gttttccaaacagaaggatggtagctagaggggagatagcaagattctggagtctggaaagccttcacttggggtgctttcatgtatcatcattccacttgaggctcaaagcacaccaataacaagtacttgttcagaatgtataaacaaccctgagagatgggttttatcatccacattcaacaggtgaaaaaacaaagaaagaaacttgaccaaggactcatactcaaaaaagaaaaatatagaaaagaaaaaaaatgtgcatcgctatcatttgaagtttcttcagatggaggtactgagccctctgccttagtggatgacaacggtagtgaggaggacttcagctatgaagacctctgccaggccagccctcggtacctgcagcccggcggggagcagctggccatcaatgagctgatcagtgatggcaacgtggtctgcgcagaagccctgtgggaccatgtgaccatggatgaccaggaactgggcttcaaagccggggatgtcatccaggttctggaagcctccaacaaggactggtggtggggccgcagtgaagataaggaagcctggttccccgcgagcttcgtcaga

SEQ ID NO: 185608 - DNA, 8603 bp, Homo sapiens
  Payload ID: 16552
  Gene Symbol: SPATA13
  Gene Name: spermatogenesis associated 13
  Uniprot ID: Q96N96
  ENST ID: ENST00000424834
  CDS Start-End: 474-4307
gcgcacccgggacagtttccagtcggcttctccgtgaccttcctcccccttccagctcggagcgggatgctgggatccctccaaggaccctctgaggacgtaggagggatgctgagacagggccagcttcaaaccttgtcaagctctgacaagggaagatgaagcctagttccagctaggggtgacctgtctatctgcattttttgagctgcagagtgatgggagtcatattcgctgcctgtgcagcaccacaggcctgatgaaaatgaaatggcaacaccgtgcagatggcaaagcgtaggcctcacaaacatcctggccgtgaagagcttgtcttcaagagtagctggtgcagaaactcgcccgtggccacccaggagcccgatgtgcaaggcaggtgtgagtgccaggacggcattcctggagatgaaggcctggagctgcggtctgcggactcggcagtgcccgtggccatgacccaggctgccgtgcggccctgggcaccctgcctggagaacatgaccactgccccaaacggcctcgggccaggccccgcagccccctgtgcaggctcggacctgaaagacgccaagatggtgacctcccttgcgtgtggaaatggagtctgtggctgcagccctggtggcgacacggacacccaggaagccaaactcagcccagccaagcttgtgcgcctcttttccaccagtcggaagaggacgggtgcccaccccgagcggccccactccatggtcctggtggggaactcctccacatggaacaccctcgcctccttccggaaaatgggatcctttaagaaactgaagtcctcagtcctgaaaggaattcagagccgagaggggtcaaatgcctgttcaaagggagaggcttcggagcatggcctgggaaagtccatcccaaatggcgctgtcccaggagcccaggcaagcaggggctcccccttagcaccgggaccagcatgtggtgccctcaggccagcagagtggggcacattggatggctccgacctcgaggacacggacgatgccttccagcggagcacacaccgctcccgcagcctccgcagagcctacggcctgggccgcatctgcctgctggatgcgccccagaaccatgcgacacccacgatagccactggccaggtgcccgccgtgtgtgagattctcgtgagggaccctgaaaacaacagcatgggctacaggaggagcaagagcacggacaatcttgcctttctgaagaagagctcctttaagcggaagtccacctccaatcttgcagacctcaggacggcccatgacgcacgggtaccacagaggaccctgagcagttcctccactgactcccaaaagcttgggtcaggaaggaccaaacgctggaggagcccgataagggccaaggactttgacagagtcttcaaacttgtgagcaatgtgactgaggctgcctggaggagggagagtcctaggagtggggccccatcccctggagaggccagcctgagacttcaggcacacagccggctgcatgacgactactcccgccgcgtctccaggagcactgagcaggacagcaggcggggcggggcggtcatgcatgggaccactgcaacctgcaccgtggcccccggtttcggctcagccacctctaaggggccccacctagacgctgacactgccgtatttcctcttgaaaccaaaagttcctgggcggtggaaagcgacagttcctgcacttgcagctctttgccaagcccgattgtccaggatgtgttgagcaaagactcctgtgacccaaacgctggcagccagttgacatttgaccctgagcagcctcccacccctctaaggcccaccacacccaagccccagagccctcagagcccccagagccccggggcaggaagtgccagctgtcacagcaatcacagtgccctgtccgcgaattcagaggaaagtgaaggaagggcagaagagcctgctcagagagagccagggcctgtgtccttgcaggatcccctggaagccacacatggtgatgagggcagcaaggaccttctggtgaacattggtgtggcagccggcccagaagaaaaggagaaggaggaggtcgtccctgatggcccctggaggcgaagctcatcacaggatgaggaaaggacagaggcacagagaacccccaagaggagatggggctctgggagacggccaaggcctcggccattctctgactacggccagctggccagccgcagtttgtctattcctgaagactcggttgctgcagacccccagaaggaagaccgtgtggacgaggacccccaggcaagcatgacttctgccagccctgaagaccagaatgctccagtgggctgccccaaaggagcccggagaaggcgccccatttccgtgataggtggggtcagcttgtatgggaccaaccagacggaggaactggacaatcttctgacccaaccggcttccaggccgcccatgcctgctcaccaggtgccaccctacaaggctgtgtcggcccggttccggcccttcacattctcccagagcacccccattgggttggaccgtgtgggacgccggcggcagatgagagcatccaacgtttcttcagatggaggtactgagccctctgccttagtggatgacaacggtagtgaggaggacttcagctatgaagacctctgccaggccagccctcggtacctgcagcccggcggggagcagctggccatcaatgagctgatcagtgatggcaacgtggtctgcgcagaagccctgtgggaccatgtgaccatggatgaccaggaactgggcttcaaagccggggatgtcatccaggttctggaagcctccaacaaggactggtggtggggccgcagtgaagataaggaagcctggttccccgcgagcttcgtcagattgcgagtgaatcaggaagagctgtcggaaaactccagcagcacccccagtgaggagcaggacgaggaggccagccagagccgccacagacactgtgagaacaagcagcagatgcggaccaacgtcatccgggagatcatggacaccgagcgggtgtacatcaaacacctcagggacatctgtgagggctatatccgacagtgccgcaagcacacaggaatgttcaccgttgcgcagctagccactatttttggaaacattgaagatatttacaaattccaaagaaagtttctgaaagaccttgagaaacagtacaacaaagaggaacctcacttaagtgaaataggatcttgctttcttcaaaatcaagagggctttgccatctattccgagtactgcaacaaccacccgggcgcctgcctggagctcgccaacctcatgaagcagggcaagtacagacatttctttgaagcctgccgcctgctgcagcagatgattgacatcgccatcgacgggttcctgctcacaccagtgcagaagatctgcaaatacccgctgcagctggccgagctgctcaagtataccacacaggaacacggtgattacagcaacataaaggcagcatatgaggccatgaagaatgtggcctgtctgatcaacgagcgcaagcgcaagctggagagcatcgacaagatagctcgctggcaggtgtctatcgtgggctgggagggactggatatcttagaccgaagctcagaattgattcattctggggagctgaccaaaatcactaagcaaggcaaaagccagcagcggacgttcttcctgtttgaccaccagctggtgtcctgcaagaaggacctgctgcgcagggacatgctgtactacaagggccggctggacatggatgagatggagcttgtggacctgggggatgggcgcgacaaggactgcaacctcagcgtgaaaaatgccttcaagctcgtcagtaggaccacagacgaggtttatttgttttgtgccaaaaaacaagaagacaaggcgaggtggctgcaggcctgtgcagatgaaaggaggcgggtgcaagaggacaaggagatgggaatggaaatttcagaaaaccagaagaaacttgccatgttaaatgctcaaaaggcaggacatggaaagtcaaaaggctacaacaggtgccctgtggccccaccgcaccagggcctgcaccccatccaccagcgccacatcactatgcccacaagcgtcccccagcagcaggtctttggcctggcggaacccaagaggaagtcctcgctcttctggcacaccttcaacaggctcacccccttccggaaatgaaaacaggaggctgtgcttccatggagctgggtgtcaagagaagaactgtctttgtttcttgtgtgcttcaatccagggaaagtttcttggacccagtgataaaaacttccttttagggatcaatgaaggagagaaggtcttggaatcaccttcagtctttggagacccagctgcctttgtggaagggaggagacggtcatgacacaaagctttatcctacacagaaacacccgtgacccactatgagatggcccagatgtgggacccggtaccatgctctaaagcgagtgattaggcagcagctgaagccacccctgctgatgatgagcaagtgcctgctgcaggtccaaacacagcatccagggctttgcagttcctaaggagtgatgaggttagaggatcacttctgcatttgattttcaaggatgccgtcaagacggggttgacacaatgctgcacgtgtctggtcacacttagaaattgagctcttactctcttctgtaatactgggggacctacagctgccgtggggctgaccacggtgttccctggcatcgtctgtgtccacacagatgctaactggtagtgcaaatgtcatcctgcaaggttcctcttcctgcaagcaaagtggagagaaagaagatgcatctgtcaccttcatcagggtcctcagtgcagagcaacttacgcatcctcaagaatccactgcttttcaggcaaggagggagaaatcctgctgcacactggctttgtcccggagtcggattccctcctgcctgcacgccttcagtaactccgagcagaaatcacatcttgcccacatgctgtaacctaagaaactgctatgcaaggctgggtgctgtggctcatgcctgtaatcccagcactttgggaggccaaggcaggtggatcacctgaggtcaggagttcgagacaagcgtggccaatatggcaaagcccagtctctactaataatacaaaaattagctgggcatggtggcgcatgcctgtaatcccagctactgggaaggctgaggtaggagaatcttttgaatctgggaagcggaggttgcagtgagctgagatcgcaccactgcactccagcctgggagatacagcgagactgtctccaaaaacaaaaacaaaaacaaaaaacattcaaacaactgtttgcaatataaaaagctcatttactgtaatatttatgatacagtgaatatgaaaatgcactggtcagaaggcactctcaaagagccgcactgctcctgacatcgtccttagcaatgaagtcacaaagacagccaaagcagtcctgcttcttggaaatcagaagctgcctttatcacatataaagccaaacagggcataaccatgtcacgtgagcatgtcatcaggcttctgaggacttgttctttataaaaaaagaccttcacaaaatatcttggcttagagatagcagtctttattaacaaaggccacctaggctgacacctgcagataatcatctccttttctttgtctatgttgtacattttcatgatataacttttaactatgtctagagaaggcaggctctgcaagagaggtgccctttcaacccgctcagtgccctggacaggagatgctgtgttaaactgttaatggatatctatatgagaagctcatttttgtatgctatccctgcagtttttttttttctaacaggcccatgtttgagaataaacaagtctgtgatgtcagagacaaaggtgtattcttcagtctgcaggtgtgtggcacctcccttctcccctgcagccccccacatccagagccgttcctgagagtgacatcatgcatcaagaaaacataaccttggtcctcaggtgaacccttggaacattctgtgaccgcctgatgtccattctgagccaccttggcacacatgcttacaggcagcactgctaagggttcaggtgccccatggctgacagcccgagttgcttctgtggaccatcatgccgctcggcacgtcctgagacagaagttgctgcaggaaggagcttctggagaggtcctgtggcatgtgtgggggtgtgtgtgtgtatgtttccttcttgaacagacattccaactttagatgtgtttatagaactgacctttttactaacaaaatacaatgatatatgttggaaactacttaatatgcttttcctgcacaccttagcaataactgtaggggtctctgctagagttgtttgtatgtacagcaattttgaacaaattgttttaaatgtaatataagagaattagtttaaggaagtaaagagaatcatttgcttgtgttacattttcagtgaggattcagtttaagagtcattcttaggacttccatttcctaatatttattcatgggtaatgaagaaatggtttgcattttgtggccagtcctaatttattttccagctgagccctaacttccggctcccacctacctccacggacttcctaacagagacttatgaataccaggatgtgtttttgttaagtcaggttcaattcgttgcccctgtcagttttatagagtgtgagggtcactccattaaagatctctcctgggtggatcctacttggatgttcaggtgattttgaaaactgctaacatttttaaaaggctagaacatcctttgacttcttgaaaatctgcatgtctggcttgggttttattaccacatgcctgagttcttcaagaatggaaggctcaagtattctcatcttccatttgccaaacttccttcctgatttgagtcacgtgttccacttggaaagaaagggaacagagagcctcctccatggacagtgtatgaatttcattgggaatcttgctctctcccgcctctatgcctttctctctttttaaccttactttacataatattatagatgggccaagaaaagaaaagatgacataacattttgatgaatttcacctattccattcttcacgtttcagaattggtcgactttgttagaagataattgaagtagccttgggtcaaaagcaaccttttcaattgtgatcatacctaaaacatataaaaaccctgccgtagattaaaagcaattataaaatcataaaattgaatgtttgcagaatcctggagcagtagatttctttgtctttggcctgcggactagaaagagggcagcagtagtatgctggagcttccctgggataccagccacatggtttcttttcattagatctgatttttgtttcccactgtagatctgattttgtagttgaaaacatttcaccaccatcaaacactatttctgaatattgtgcctttttatacctagcctagatgaaaaccgatgccattcttattcagaaaatccccccatcctacatgactgttatctagacataaagcaaagtgcatttaattcaaaatttggttcacaatataagtattttgtaaaagccagctgaaccagcattttatcaggtggaaatctctgcaagccaaattgctgatactccttcatgcagatcaacttggtgtcccagtcagaatagaacagcataattacctggagttagggggagtatttctgcactattacttgtcagggagagaagaaacttagaattgtccctcaaaggagtgtcaagaagtatgaataaatgtcctttcaccagctcacaggccagaaatggaggacccaagtcaactaggtgaaactactagcagacccagctttcccataataacctaatctgcaaattgttctattaaagtctcattgttttcaggatgcaatgaaagtggatttcaaaaggctttggaaaaataagtggaacatgactgatcttgaaaaaaaaagcaaaagcttaaatatttgatacaagtttacttagctacaacatactttacattgttgcctttagttatctcacaggcactgacattttatatttagaaaatacttttaatctttctaatctttttttgtaaatattagtgtccattctgtatgactcgctaacctactttgcaaggctttgggcaacattttagctcattaacttcaagatgatgtgtcatctgtataggtcaaagaatgggacttctgaactgaggaatttgctgttgacagccaaagtatagtgtacaagattgatgtaacttgatatgtatttttgttgaagttttttgtaaaaaaaaattatttacaatgttatttgaatgatttttttaaatgctgtgaatctatatttgttgttttgtatattaaaattcatttgccaaa

SEQ ID NO: 185609 - DNA, 2001 bp, Homo sapiens
  Payload ID: 16552
  Gene Symbol: SPATA13
  Gene Name: spermatogenesis associated 13
  ENST ID: ENST00000434675
  CDS Start-End: 1-1653
acagattttgctttctttttgcagccggcttccaggccgcccatgcctgctcaccaggtgccaccctacaaggctgtgtcggcccggttccggcccttcacattctcccagagcacccccattgggttggaccgtgtgggacgccggcggcagatgagagcatccaacgtttcttcagatggaggtactgagccctctgccttagtggatgacaacggtagtgaggaggacttcagctatgaagacctctgccaggccagccctcggtacctgcagcccggcggggagcagctggccatcaatgagctgatcagtgatggcaacgtggtctgcgcagaagccctgtgggaccatgtgaccatggatgaccaggaactgggcttcaaagccggggatgtcatccaggttctggaagcctccaacaaggactggtggtggggccgcagtgaagataaggaagcctggttccccgcgagcttcgtcagaggctatatccgacagtgccgcaagcacacaggaatgttcaccgttgcgcagctagccactatttttggaaacattgaagatatttacaaattccaaagaaagtttctgaaagaccttgagaaacagtacaacaaagaggaacctcacttaagtgaaataggatcttgctttcttcaaaatcaagagggctttgccatctattccgagtactgcaacaaccacccgggcgcctgcctggagctcgccaacctcatgaagcagggcaagtacagacatttctttgaagcctgccgcctgctgcagcagatgattgacatcgccatcgacgggttcctgctcacaccagtgcagaagatctgcaaatacccgctgcagctggccgagctgctcaagtataccacacaggaacacggtgattacagcaacataaaggcagcatatgaggccatgaagaatgtggcctgtctgatcaacgagcgcaagcgcaagctggagagcatcgacaagatagctcgctggcaggtgtctatcgtgggctgggagggactggatatcttagaccgaagctcagaattgattcattctggggagctgaccaaaatcactaagcaaggcaaaagccagcagcggacgttcttcctgtttgaccaccagctggtgtcctgcaagaaggacctgctgcgcagggacatgctgtactacaagggccggctggacatggatgagatggagcttgtggacctgggggatgggcgcgacaaggactgcaacctcagcgtgaaaaatgccttcaagctcgtcagtaggaccacagacgaggtttatttgttttgtgccaaaaaacaagaagacaaggcgaggtggctgcaggcctgtgcagatgaaaggaggcgggtgcaagaggacaaggagatgggaatggaaatttcagaaaaccagaagaaacttgccatgttaaatgctcaaaaggcaggacatggaaagtcaaaaggctacaacaggtgccctgtggccccaccgcaccagggcctgcaccccatccaccagcgccacatcactatgcccacaagcgtcccccagcagcaggtctttggcctggcggaacccaagaggaagtcctcgctcttctggcacaccttcaacaggctcacccccttccggaaatgaaaacaggaggctgtgcttccatggagctgggtgtcaagagaagaactgtctttgtttcttgtgtgcttcaatccagggaaagtttcttggacccagtgataaaaacttccttttagggatcaatgaaggagagaaggtcttggaatcaccttcagtctttggagacccagctgcctttgtggaagggaggagacggtcatgacacaaagctttatcctacacagaaacacccgtgacccactatgagatggcccagatgtgggacccggtaccatgctctaaagcgagtgattaggcagcagctgaagccacccctgctgatgatgagcaagtgcctgctgcaggtcc

SEQ ID NO: 185610 - DNA, 301 bp, Homo sapiens
  Payload ID: 16552
  Gene Symbol: SPATA13
  Gene Name: spermatogenesis associated 13
  ENST ID: ENST00000494772
  CDS Start-End: 233-301
ccggcttccaggccgcccatgcctgctcaccaggtgccaccctacaaggctgtgtcggcccggttccggcccttcacattctcccagagcacccccattgggttggaccgtgtgggacgccggcggcagatgagagcatccaacgggtgctttcatgtatcatcattccacttgaggctcaaagcacaccaataacaagtacttgttcagaatgtataaacaaccctgagagatgggttttatcatccacattcaacaggtgaaaaaacaaagaaagaaacttgaccaaggactcatactc

SEQ ID NO: 185611 - DNA, 605 bp, Homo sapiens
  Payload ID: 16552
  Gene Symbol: SPATA13
  Gene Name: spermatogenesis associated 13
  ENST ID: ENST00000488060
  CDS Start-End: 537-605
gagacaggctcatagcaggatcgctttgctggcagacacacctggctttgaatccagccccgcaacttggggaaagttacttaacatctttgagccacggtttcctccttcataaccagacagcaacactccaagatgcttgtgaggctctcaagaggatttattccagcgctgagcgcagtgcctggcgcacattaagatgccaggaagccggatgggtgattgctcaggtctgtccagccagttgggcagccgtcagaaactgggagggctgacgagacaccagcccagagagctgtcagggagcggcagagcagaggagagggcccaggatggatcggcaggtgtcagccaggatggacgggaggagccgtgctcagagccagcagccccaggacgagcagctcctggctaggaacagaagacaggcactgtgggacaagtcaaagggtgctttcatgtatcatcattccacttgaggctcaaagcacaccaataacaagtacttgttcagaatgtataaacaaccctgagagatgggttttatcatccacattcaacaggtgaaaaaacaaagaaagaaacttgaccaaggactcatactc

SEQ ID NO: 185612 - DNA, 2106 bp, Homo sapiens
  Payload ID: 16553
  Gene Symbol: SPATA16
  Gene Name: spermatogenesis associated 16
  Uniprot ID: Q9BXB7
  ENST ID: ENST00000351008
  CDS Start-End: 185-1894
atgggcctcgtggcacgggacgtttcaagtcctggcgtccccgcgagcaagcagcctgatcaggcctcgcagtgggacgttgggaagccggtgttggcagatgctgtggctgggaggagtccagagcttcgccctgtccccgcggggctgagccacaactgcttaggagttttgggcaggatcgatggatgcaggaagcagtaggagtttggagaatgcagtgaataggatctatcatgatcagcttgttccaaagataaacacaagcaagaaaatgtccaccttagcgcacccacctaacatcctggaaatgtcacaagagattaagaaaaactgtggaggtaaacaggtagaaatcacacttgaaagaacaaaaatgacaaagggcatcaaagaaaaacaaagcaatgatttagagaaagcagcctttaaacggaaggcagaaggtgaagaaaagccaactagaaagaaacaggcaaagataacagaacttgacaatcagttaatcaccatgcctctgcctcacatccccttaaagaacataatggatgtggaaatgaagttggtctacattgatgaaatgggtgttcgctatgagtttgtagagtccttcatgtctactgggagtcagccaacatgccaagctgctgaaatagtagaccctttgagtgtacataatttcagctttctgcctcagattgacaaatggcttcaggtagccttaaaggatgccagctcttgctatagacaaaagaaatacgccttggcagcaggacagttcagaacagcacttgagctttgcagcaaaggagcagttctgggagaaccatttgatgcacctgctgaagatatagcaagcgtggcaagtttcattgagacaaagcttgttacctgttatctacggatgaggaaaccagatcttgccctgaatcatgcacacaggagcattgttttaaacccagcctatttccggaatcatcttcgtcaagcaacagtgtttagatgtctggagaggtattcagaggctgcccggagtgccatgattgctgactacatgttctggcttggtggaggaagggaagagagcataagcaagctcatcaaactgtattggcaggccatgattgaggaagccatcaccagagctgaatctttctcggttatgtacacaccatttgcgacaaaaataagagctgataaaatagaaaaagtaaaagatgctttcacaaaaactcatcctgcatatgcagagtatatgtacacagatcttcaagcactccacatgttgcctcagacagttgactggtcatcttttcctccccaacaatatctcttgactcttgggttcaaaaacaaagatgatggaaaatttttggaaaaaatatcaagcaggaagctgccgatattcacagagcataaaacacctttcggtctgaccagagaagatacagtgaggcaaatggagacaatggggaagcgaatcttgccaatattggattttattagaagcacccaattgaatgggagttttcctgcatcctcaggtgtgatggagaagttgcaatatgccagcctcctcagccagctgcagagagtaaaggagcagtcccaggtgattaatcaagcaatggcagagctagcaaccattccctacctacaggacatcagtcaacaggaggcagaattgctgcagtcactaatggcagatgctatggacacccttgaaggaagaagaaacaataatgaacgtgtgtggaatatgatccaaaaggttggacaaattgaagattttctataccaattagaggacagtttcttaaaaactaaaaaactgagaactgctcgaaggcaaaaaacaaaaatgaagcgacttcaaactgttcagcaaaggtagtcattagggagcaggcactaccactaagatatcccagaagaagaggcaagggcatccactccaatgcccacctagtactgtgaagctggataacaaaagcttgtcaccaaaagaaagaggtggtattcccctcagttcatctttaccaaagacactctatgtttcattaatctcaactggcagcaataaatattctcagcaagtttgacttg

SEQ ID NO: 185613 - DNA, 5818 bp, Homo sapiens
  Payload ID: 16554
  Gene Symbol: SPATA17
  Gene Name: spermatogenesis associated 17
  Uniprot ID: Q96L03
  ENST ID: ENST00000366933
  CDS Start-End: 56-1141
cagttaccatggagaccggtagtaacaccagttgtaaacccaaggccaagagaccatggccacgttagcccggctgcaagctaggtcgtcgactgtaggaaatcagtactactttaggaacagtgttgtagatccatttagaaaaaaggagaatgatgcagcagttaaaatccaaagctggtttcgaggatgtcaagttcgggcatatatcaggcatttaaacaggattgtaacaattattcaaaaatggtggagaagtttcttaggcagaaagcaatatcaactaactgtgcaggtagcatattatactatgatgatgaatctctacaatgcaatggctgtcaggattcagagacgatggcgaggctatagggttcggaagtacctctttaattattattatttgaaagagtacctgaaagtcgtttcagagaccaatgatgcaattaggaaggcactggaggagtttgcagaaatgaaagaaagagaagagaagaaggctaacctcgaaagggaagagaagaaaagagattaccaagcccgaaagatgcattacctcctcagcacaaagcagattccaggaatatacaattcacccttcagaaaagagcctgatccatgggagctgcaattacagaaggcaaagcctttaacacaccgaagacctaaagttaagcagaaggactccaccagccttactgattggctagcttgtacaagcgcccgttcttttcctcggtctgaaattctaccacctattaatagaaagcaatgtcaggggcccttccgagatatcaccgaagtattagaacaacgctacaggcctttggagccaacgttgcgggtggcagaaccaatcgatgagttaaagttggccagagaggagctcagaagagaggaatggctgcaaaatgtaaatgacaatatgtttttgccattttcttcataccataaaaatgaaaagtacatcccatcaatgcatttatcaagcaagtatggtcctatttcttacaaagaacaattccgaagtgaaaatcctaagaaatggatctgtgacaaggatttccagactgtattaccatcatttgagctcttctcaaagtatggaaaattatattcaaaagctggacagattgtataaaggcgtcagaagaagaaactgaagccatctgcattttaaaacttaacagttctgaaaggaaaacacagatgaagatcctgtaggaaatatacttgctatgattcaataaactataaaattttgtagctctagtcatgaattaattattgtgtgtatgtatttgaaatctcttagacatatcttttcaaacaaatacttaaacttgagtctgttacctctgagaatgtctgtcacaatcacagcccctggtgaccaacagtgccataaatggttcccctgaaatacccatattctgaccccatcacccgggtcacaaatgatgacaccagtgctgggtacccaaattaagggcgactaacatgtaagtaggatgatgaatggtttgaagtgtaaattgtgtgaaatagttcagcatgaaagctctgccctgagaaataatgactgattataccagttagaaacccttcagactgttgaacttgagacacacagacacaacagacacagactagtgggtgtgggagcagaagcataggcactctcaaatagagaagacatttgcaagtctctgctgccaagggagcaaagagataatctcgatgccagggctgtgtcagatcctgcatggctctgaactacagttggtttccaaaaagctgggcttttgtgaggtttctgttttttatgcgatgcttagattttcctggaatccttggaagttaactcaacatttgaggttcctatatcctttaatcccatcccatgtgtatctttacaataaaacttcctgctagaggtatcctgagggaatctttgtttcttgcatctgaagagaataacactaaacttattgcatatgatttgggggttggatccaatgatagcacagagggacaggaaatgtgatttattgaccataaaagctttaatttaaaattgctggccagcgaaatccagactctgggaaatgttataggccaaatgatctgtttcttcaacaaataaattacaaaactgaggggaaaaaaaggaacctattaaaaagacattatctatcaatcactgtgtgtgtacagttttgagctcctgatttaaataaacaaattgtaaaataaaagatcttttgaaacaattggaagtttgaacactgattggatattggtggtataaaagaattattggttttttttaggtgtcatggtattgttttggtttacaaagttatagatataaatgttgaaatatttacagatgcagtgatatgttggctgggatttaatttgaaagtcaaagaagtgagttaaaatacatatactcctcctcttataatcggttatgtgccaataaatccattgtaaattgaaaatatcctaagttgaaaatattgtaagttaaaaatgcatttaatacagctaacttaccagacagcttagcttagcctcacctaccttaaatatgctcagaacacatacgttagcctatagttgggcaaaatcatctaacacaaagcctattttataatattgaacagcccatgtaatttattgaatattgtactaaaagtgaaaaactgaatagttgtatgcatactcaaagtatggtttctactgaatgcattgtaaaccagaaagtatctgagacaatgttttttttttttttttttttttttttaatttctgagacagagtctcattctgtcacccaggttggagtgcagtggcatgaactcagctcactgcaaccttcacctcccaggctcaagcagtcctcccatctcagcctcccaagtagctgggaccacaggcatgggccaacaagcctggctaaatattttgtacttttggtagacacgggtttttaccatgttgtgcaggctggtcttgaacgcctgagctcaagtgatctgcctgcctcggcctcccaaagtactgggattacaggcatgagtcactgaacccagccctgagacatgtctcaattagtttagaagtttatttggccaaggttaaggacatgcccttgacactgcacctgtcagtacaggtcctgacaacatgtgtccaaggtggtcaagctatacaacttggttttatacattttaaggagacataagacatcaataaatacatggaagatgtacattggttcagtctggaaaggcaggatgcctcaaacttgaaacaagagaatggggggtgggaggatgtgggagatgcttccaggtcatagttggagtcaaagactttccaattggcaattggttcaaagaatttatctaaagacctggaatccatagaaggctttacctggattaaaataaggggaccaaggttctcatgcagatgaagcctccaggtggcagacttcagagagcatagattgtaaatgtttcttatctgacttaaaaaggtgtcagactcttagtaaattatctcctggatcagtgaaaagatgtgaaaaaaggttctctacagaatgtagattttccccataagagatagcttcgcagggccattgcaaaatatgtcaaaaatatatattttagggtaaaatgcctcaatttatttcaaggcctgatatttgtcatgtgatgctatactacagtcaggctgaaacttggcatcttattgctatgaaaaatcttaagatctctattttaatgttaatgctggtcactggtgcctgaattccaaagggaggagggtataatgaagcatgtccaattccccatgccccacccccacccccacatcctataatggcctgaactagtttttcaggttaactttggaatacccttggccaagaagaggggtccatgcagatgtttggaggggggggtcttaaagctttatttttagattacagcatattgcttttgcactatcataaagtaaaaacatcataagtcaagccaccataaatagcggaccatctgtatatctgaaagaagatgaaccaagacttggttattgttaaagctgatgattggctgtatgaagatttactatacaattttgtgtacttttgtaagttcttggttgtttctaaacttataacaaaataaataattggccatcttcattggattgtgaagccatttcctcccacatgttcgtaaaaatggtagccatggcccctgactgaacccaggtatgaatggccttcattgattttgtagaccctgaccttctctgttcttccagagaaggtggtactcagataaaaactttgaagcattttattgttcagaatatgactttgatcttctcataagactcaagtttttgaatgcttaaggctctttatcgctagtgtatgtaagtaatatcattgtccttaaccaccatctgcctctccccccagacacacataagtttatgataactacagaggtgtccagatgagtaaaaactgcctttgcattaaggtgagagaagaccgagatgaaatcttattagaaaatataactggggaaagcagtttgtctgtttctcctggaaaactactagactacatcaacttatatactacttcttttctatattctcaatatgagccacttaagaaaattaatgagactttatgtttgaccaaagctggtaattccttgatcttattctccaaacttgattctgaatgactactgaccactaaaaacactaagagtaccactgtggatgtttaaaaacatacaccctaagagccttcagaattagacgcttcaattcttctgaaatcaaaagtcacaccagctttgctgtagttaatcaggtaatacctttcttctccactactctctaatttccttgagggcaaatattgtctttcttgataaatgccctggacccaacatctaacagaatacctggcataaagtgaaatccatcgaatgtgctaatgataaataaagaagttcaaaaaaatcttttaatagaagctataaaatagcagataagctaagtcattctcataaaacaccatttgtcatttgaatgcgtgcattgtggcctgttacttttaactagtctcactaatttatagttatatatgatgtagatctagattgtgatgtacactaagtgggttgatcctgagatcaagctatgattgctgcttgcgtaaagtgttccttttgggaaataaataatctttcatatctgtaaactttggtataattggttatttatgcaatgtattgttgtggttgtcaactcaagattgtattctcatctggggacattatgaatcttgttattttatccccttttttgctctgttttttcacatttatggcctacctgttacagctgcacggtatccattttctgtgctaaattcatctttaatttattattttttttcaacctcagcttttaactttgccctgattttctcttccattttattttcacttccattttaagctggctcaaagccttttaggaacaataagttactgaattatatgaacctatttgaggtaatgatgatgcctgggaaggagcagtattgctggatcagaattcactttttccaagttacagattttaataaaccactgtgcaaagcattaggataaatttttattgaaaattgagtgaatgactgaacaaatcgctgggtaatgctgtttaggttgttctattttccacggattaaattaaattctatgta

SEQ ID NO: 185614 - DNA, 847 bp, Homo sapiens
  Payload ID: 16554
  Gene Symbol: SPATA17
  Gene Name: spermatogenesis associated 17
  ENST ID: ENST00000470448
  CDS Start-End: 56-298
cagttaccatggagaccggtagtaacaccagttgtaaacccaaggccaagagaccatggccacgttagcccggctgcaagctaggtcgtcgactgtaggaaatcagtactactttaggaacagtgttgtagatccatttagaaaaaaggagaatgatgcagcagttaaaatccaaagctggtttcgaggatgtcaagttcgggcatatatcaggcatttaaacaggattgtaacaattattcaaaaatggtggagaagtttcttaggcagaaagcaatatcaactaactgtgcagtgatctgaaatactcaagtgtgttagttacatcaatcagcccaattaggatgccttgctttaagcaattggaaactattgaaagtctatgatcttaaaaattcaaaaaaggagttgataaaagcaatactttacaaaattaatctagaagaactgttccaaatggattaaacagaagattaagcaggtagcatattatactatgatgatgaatctctacaatgcaatggctgtcaggattcagagacgatggcgaggctatagggttcggaagtacctctttaattattattatttgaaagagtacctgaaagtcgtttcagagaccaatgatgcaattaggcactggaggagtttgcagaaatgaaagaaagagaagagaagaaggctaacctcgaaagggaagagaagaaaagagattaccaagcccgaaagatgcattacctcctcagcacaaagcagattccaggaatatacaattcacccttcagaaaagagcctgatccatgggagctgcaattacagaaggcaaagcctttaacacaccgaagac

SEQ ID NO: 185615 - DNA, 4396 bp, Homo sapiens
  Payload ID: 16555
  Gene Symbol: SPATA18
  Gene Name: spermatogenesis associated 18
  Uniprot ID: Q8TC71
  ENST ID: ENST00000295213
  CDS Start-End: 375-1991
acccagggcggggcggcgcgggcgttgccacgacgcgggccgcgcgcgtccctggcagccaacccgtccacgtcaaggtttgtttaataatcgccagggtatctatggccgggctcaggcggctgctggggagccaggagaccgcgcgggacggcggatgaggcgcggcggctgcggcccagggcacctcccctctggcttcccgaacccggccaggtccgacccgagggggaggatggaaacacctgccgcgctctgagccccccagaagagaacacccttcccgccatatcaccccacggtcctgcggaggccaccgcctggtccccccaagtctccatcgcgcagcgtggggccgagaggaatagtgagcgatggcggaaaacctgaaaagactggtctcaaacgaaactttacgaacgttgcaggaaaagctagacttctggctgaaggagtacaacacaaacacgtgtgatcaaaatctaaaccattgccttgaactcattgagcaagttgccaaggtgcagggacaactctttgggatcctcacagcagcagcccaagaaggaggacgtaatgatggtgtggaaacaatcaagtcacgccttttgccttggctggaggcttcctttactgctgcttccctgggaaaatctgttgacagcaaggtcccctctctgcaggacacgtttgatagggagagacataaagatcccagtcctcgggatcgggatatgcaacagttagactctaatttgaactcaacccggagtcaatgcaaccaggttcaagacgatctggttgaaactgaaaagaatcttgaagaaagcaagaacagatcggccatatcccttttggctgcagaggaggaaataaatcagctgaaaaagcagcttaaatctcttcaagctcaggaggatgcccgccacagaaacacagatcagaggagctcagagaataggcggtcagagccttggagcttggaggagcggaagcgtgagcagtggaactcactcaagcagaatgcagaccagcaggacacagaagccatgtccgattataagaaacagctccgaaacctgaaggaggagatagctgttctgtctgctgagaaaagtgcactccaaggaaggtcctccaggagccggtctcccagccctgcccctcgcagccgtagctgcagccgcagcagatctgccagcccctccaccgctgtcaaggtcaggagaccgtccccaaaccgctccaagctgtccaatgtggcgcgcaaggctgccctcttgtcccggttcagcgattcctattcccaggcccgcctggacgcgcagtgcctgctgcggcgctgcatcgacaaggctgagaccgttcagcggatcatctacatcgccacagtggaggcattccatgtagcaaaaatggcattcagacacttcaagatccatgtgagaaaatcgttgacaccatcttatgtggggtcgaatgactttgagaatgctgtcttggattatgtcatttgtcatcttgatctatatgattctcaaagcagtgtcaatgatgtgatccgagccatgaatgtcaatcccaagatttcattccctcctgtcgttgacttttgccttctcagtgacttcatccaggagatatgttgcattgcctttgcaatgcaggccttagaaccacccctagatattgcatatggagcagatggagaagtttttaatgattgcaaataccgccgcagctacgactcggatttcactgctcccttagtcctctatcacgtgtggcctgctctcatggagaatgactgtgtcattatgaagggagaagctgtcaccaggagaggggctttttggaattcggtgcgatctgtaagtcgttgtcgaagcaggagtttaagtcccatttgcccccgtagccaaattggtttaaacacgatgtctcgaagtcggagtccttctccaataagatgtggattgccaagattttaaaagcaccagacctgctcctttgacccagtgcgtggaaacagctgctttctccagtgccgccatctgtcttctgtgtctgcctcagacctcacttaagataatgtcaaaaggcaattctgtgtatcaccccacacagagagttaaatgttttggcttggcgcatttgtaactttagatatattgcattctattttattttatagatactaattccattaatttcataaaaatgattgtataggcatttaggatcatattcattcgaagcaaagtccgttacaaaggttcaagatttccatctcaaaacactacgctcttttatgggaactgtgtgaactgaagtggaaagcatctaccatgctgaggctaaaagaaaagatgaatcattttagtttgcagatggatcgtaaatataattgttggtatcagctttagctcaaaaccaatattaggtgttttaatttccttttaaggtttggaagacagccctaatctcaggttggggagctcatgttagtagcagtgacttaaggctaagtgtagaagataatttaagatacattttctttatatattagccaacaaattatatttattggttggcttgcttttccgttctgattttgagagtgcccagtttggtttagttgaccaatgaatgtcaaagctacttagttgagagaatttccttgttcataaatgtagagcagtgatttgattagaagccagctttgagataaatgttaattacctcatgcatatctcctgggaatatttcaaactgttttaatgcatgtgttatatataaaagtttcttgggacatgctcttcacctgttctacctagttatttgcaaattcagacctcctattgaactctgtctgaccaaaactacttaaactcaaggcccaaaactaggggcaccatttactgattttaaattgagtatatatcccttgacttcttcactgtcaaatacttttgaaacttcacgttcaagataagaatggaatgttgctttcttgcaataagtaatgttctttctgcctttttttcacttttaagtcagccttaaacacatgcctcacaaacatctactttctccacatacctttgagagagacactgaattggcctcagctcagttttgcataagcttagtgccagaaccagcacctgatgcttttcaggtgaaaataaaacaaacagcttctctaaagcatcttacccctgtgctggaggtttgagggacctcttcagtgcctgccccttgagtctaatggtcaccacctcattctgaagtatgagttgaattttttgccctctttgcatatttacattagtcatcactttgaagcaatgcagtgtgctggaaggagcactatctgcctaggtaactgctagtcatgacttggtcatcagcttgctttgtggcactgagcaagttacttcacttctctgagccttggttttatcatagggtgaggaggttggatacaattagtgcccctcttaaccctgcagactcaatgttcccttttataacaagtattttattctgaatatgaaatgaaaattaaagttaatataatcatctatgtgcatgtataattttaagcagtgaacatagtaccctaactataatataaagcagaaaaaaaggcaacttttaataaaataaaatgtatttcaataaaaaagcttgggtataaccaccctagaagataaaattaagtcattagatggctgaacctgcatgtagagccaccagctacaaatgaaaatcaatgtgtgtattggcaacagaaaatcacggtgttgtcattggatgtgactttctgaagtggtgggcaattcttgttaatgttttaaacaaaaaaaaaaaaaccttacagtcttgccctgatttacacagcagtcacattcctggaaaattcaagtgtttattaaaactatgcaacagttactgtgtgttatacgttgaaaggtcttcactaatatctcactaagtaatgagaatgcctacatatcagaattttttttttcaggagccaagcacatatactgatttggaaaaaggcacaggtagctcagtttatttgctttctaccctgcctggccacttgctgtttcttcagtttctaatttgagctgtaactacacaaggaaagctaaatagtctggaaaatttttggaaagaatccacaaagccaaaggagactggcctatactcattttatctggggatgtaccttacccttagagactttgaaaaatgtgaagctcttattttgtaacctgggtaaatgttagtttctagattttcggcttaacatctaataataacatttaaaaagtgcttttgtaactattagttatttgcaataaaatgctttccttctaca

SEQ ID NO: 185616 - DNA, 2816 bp, Homo sapiens
  Payload ID: 16555
  Gene Symbol: SPATA18
  Gene Name: spermatogenesis associated 18
  Uniprot ID: Q8TC71
  ENST ID: ENST00000419395
  CDS Start-End: 290-1810
aataatcgccagggtatctatggccgggctcaggcggctgctggggagccaggagaccgcgcgggacggcggatgaggcgcggcggctgcggcccagggcacctcccctctggcttcccgaacccggccaggtccgacccgagggggaggatggaaacacctgccgcgctctgagccccccagaagagaacacccttcccgccatatcaccccacggtcctgcggaggccaccgcctggtccccccaagtctccatcgcgcagcgtggggccgagaggaatagtgagcgatggcggaaaacctgaaaagactggtctcaaacgaaactttacgaacgttgcaggaaaagctagacttctggctgaaggagtacaacacaaacacgtgtgatcaaaatctaaaccattgccttgaactcattgagcaagttgccaaggtgcagggacaactctttgggatcctcacagcagcagcccaagaaggaggacgtaatgatggtgtggaaacaatcaagtcacgccttttgccttggctggaggcttcctttactgctgcttccctgggaaaatctgttgacagcaaggtcccctctctgcaggacacgtttgatagggagagacataaagatcccagtcctcgggatcgggatatgcaacagttagactctaatttgaactcaacccggagtcaatgcaaccaggttcaagacgagcttaaatctcttcaagctcaggaggatgcccgccacagaaacacagatcagaggagctcagagaataggcggtcagagccttggagcttggaggagcggaagcgtgagcagtggaactcactcaagcagaatgcagaccagcaggacacagaagccatgtccgattataagaaacagctccgaaacctgaaggaggagatagctgttctgtctgctgagaaaagtgcactccaaggaaggtcctccaggagccggtctcccagccctgcccctcgcagccgtagctgcagccgcagcagatctgccagcccctccaccgctgtcaaggtcaggagaccgtccccaaaccgctccaagctgtccaatgtggcgcgcaaggctgccctcttgtcccggttcagcgattcctattcccaggcccgcctggacgcgcagtgcctgctgcggcgctgcatcgacaaggctgagaccgttcagcggatcatctacatcgccacagtggaggcattccatgtagcaaaaatggcattcagacacttcaagatccatgtgagaaaatcgttgacaccatcttatgtggggtcgaatgactttgagaatgctgtcttggattatgtcatttgtcatcttgatctatatgattctcaaagcagtgtcaatgatgtgatccgagccatgaatgtcaatcccaagatttcattccctcctgtcgttgacttttgccttctcagtgacttcatccaggagatatgttgcattgcctttgcaatgcaggccttagaaccacccctagatattgcatatggagcagatggagaagtttttaatgattgcaaataccgccgcagctacgactcggatttcactgctcccttagtcctctatcacgtgtggcctgctctcatggagaatgactgtgtcattatgaagggagaagctgtcaccaggagaggggctttttggaattcggtgcgatctgtaagtcgttgtcgaagcaggagtttaagtcccatttgcccccgtagccaaattggtttaaacacgatgtctcgaagtcggagtccttctccaataagatgtggattgccaagattttaaaagcaccagacctgctcctttgacccagtgcgtggaaacagctgctttctccagtgccgccatctgtcttctgtgtctgcctcagacctcacttaagataatgtcaaaaggcaattctgtgtatcaccccacacagagagttaaatgttttggcttggcgcatttgtaactttagatatattgcattctattttattttatagatactaattccattaatttcataaaaatgattgtataggcatttaggatcatattcattcgaagcaaagtccgttacaaaggttcaagatttccatctcaaaacactacgctcttttatgggaactgtgtgaactgaagtggaaagcatctaccatgctgaggctaaaagaaaagatgaatcattttagtttgcagatggatcgtaaatataattgttggtatcagctttagctcaaaaccaatattaggtgttttaatttccttttaaggtttggaagacagccctaatctcaggttggggagctcatgttagtagcagtgacttaaggctaagtgtagaagataatttaagatacattttctttatatattagccaacaaattatatttattggttggcttgcttttccgttctgattttgagagtgcccagtttggtttagttgaccaatgaatgtcaaagctacttagttgagagaatttccttgttcataaatgtagagcagtgatttgattagaagccagctttgagataaatgttaattacctcatgcatatctcctgggaatatttcaaactgttttaatgcatgtgttatatataaaagtttcttgggacatgctcttcacctgttctacctagttatttgcaaattcagacctcctattgaactctgtctgaccaaaactacttaaactcaaggcccaaaactaggggcaccatttactgattttaaattgagtatatatcccttgacttcttcactgtcaaatacttttgaaacttcacgttcaagataaga

SEQ ID NO: 185617 - DNA, 1911 bp, Homo sapiens
  Payload ID: 16555
  Gene Symbol: SPATA18
  Gene Name: spermatogenesis associated 18
  ENST ID: ENST00000505320
  CDS Start-End: 245-1795
gagccaggagaccgcgcgggacggcggatgaggcgcggcggctgcggcccagggcacctcccctctggcttcccgaacccggccaggtccgacccgagggggaggatggaaacacctgccgcgctctgagccccccagaagagaacacccttcccgccatatcaccccacggtcctgcggaggccaccgcctggtccccccaagtctccatcgcgcagcgtggggccgagaggaatagtgagcgatggcggaaaacctgaaaagactggtctcaaacgaaactttacgaacgttgcaggaaaagctagacttctggctgaaggagtacaacacaaacacgtgtgatcaaaatctaaaccattgccttgaactcattgagcaagttgccaaggtgcagggacaactctttgggatcctcacagcagcagcccaagaaggaggacgtaatgatggtgtggaaacaatcaagtcacgccttttgccttggctggaggcttcctttactgctgcttccctgggaaaatctgttgacagcaaggtcccctctctgcaggacacgtttgatagggagagacataaagatcccagtcctcgggatcgggatatgcaacagttagactctaatttgaactcaacccggagtcaatgcaaccaggttcaagacgatctggttgaaactgaaaagaatcttgaagaaagcaagaacagatcggccatatcccttttggctgcagaggaggaaataaatcagctgaaaaagcagcttaaatctcttcaagctcaggaggatgcccgccacagaaacacagatcagaggagctcagagaataggcggtcagagccttggagcttggaggagcggaagcgtgagcagtggaactcactcaagcagaatgcagaccagcaggacacagaagccatgtccgattataagaaacagctccgaaacctgaaggaggagatagctgttctgtctgctgagaaaagtgcactccaaggaaggtcctccaggagccggtctcccagccctgcccctcgcagccgtagctgcagccgcagcagatctgccagcccctccaccgctgtcaaggtcaggagaccgtccccaaaccgctccaagctgtccaatgtggcgcgcaaggctgccctcttgtcccggttcagcgattcctattcccaggcccgcctggacgcgcagtgcctgctgcggcgctgcatcgacaaggctgagaccgttcagcggatcatctacatcgccacagtggaggcattccatgtagcaaaaatggcattcagacacttcaagatccatgtgagaaaatcgttgacaccatcttatgtggggtcgaatgactttgagaatgctgtcttggattatgtcatttgtcatcttgatctatatgattctcaaagcagtgtcaatgatgtgatccgagccatgaatgtcaatcccaagatttcattccctcctgtcgttgacttttgccttctcagtgacttcatccaggagatatgttgcattgcctttgcaatgcaggccttagaaccacccctagatattgcatatggagcagatggagaagtttttaatgattgcaaataccgccgcagctacgactcggatttcactgctcccttagtcctctatcacgtgtggcctgctctcatggagaatgactgtgtcattatgaagggagaagctgtcaccaggagaggggcttttgtacggtggccttgcatagtgacaattcatcccaagtgtttgattcacaatggaattcggtgcgatctgtaagtcgttgtcgaagcaggagtttaagtcccatttgcccccgtagccaaattggtttaaacacgatgtctcgaagtcggagtccttctccaataagatgtggattgccaagattttaa

SEQ ID NO: 185618 - DNA, 588 bp, Homo sapiens
  Payload ID: 16555
  Gene Symbol: SPATA18
  Gene Name: spermatogenesis associated 18
  ENST ID: ENST00000505038
  CDS Start-End: 164-478
gccaggtccgacccgagggggaggatggaaacacctgccgcgctctgagccccccagaagagaacacccttcccgccatatcaccccacggtcctgcggaggccaccgcctggtccccccaagtctccatcgcgcagcgtggggccgagaggaatagtgagcgatggcggaaaacctgaaaagactggtctcaaacgaaactttacgaacgttgcaggaaaagctagacttctggctgaaggagtacaacacaaacacgtgtgatcaaaatctaaaccattgccttgaactcattgagcaagttgccaaggtgcagggacaactctttgggatcctcacagcagcagcccaagaaggaggacgtaatgatggtgtggaaacaatcaagtcacgccttttgccttggctggaggcttcctttactgctgcttccctgggaaaatctgttgacagcaaggtcccctctctgcaggcttaaatctcttcaagctcaggaggatgcccgccacagaaacacagatcagaggagctcagagaataggcggtcagagccttggagcttggaggagcggaagcgtgagcagtgga

SEQ ID NO: 185619 - DNA, 552 bp, Homo sapiens
  Payload ID: 16555
  Gene Symbol: SPATA18
  Gene Name: spermatogenesis associated 18
  ENST ID: ENST00000503055
  CDS Start-End: 245-511
gagccaggagaccgcgcgggacggcggatgaggcgcggcggctgcggcccagggcacctcccctctggcttcccgaacccggccaggtccgacccgagggggaggatggaaacacctgccgcgctctgagccccccagaagagaacacccttcccgccatatcaccccacggtcctgcggaggccaccgcctggtccccccaagtctccatcgcgcagcgtggggccgagaggaatagtgagcgatggcggaaaacctgaaaagactggtctcaaacgaaactttacgaacgttgcaggaaaagctagacttctggctgaaggagtacaacgaggacgtaatgatggtgtggaaacaatcaagtcacgccttttgccttggctggaggcttcctttactgctgcttccctgggaaaatctgttgacagcaaggtcccctctctgcaggacacgtttgatagggagagacataaagatcccagtcctcgggatcgggatatgcaacagttagactctaatttgaactcaacccggagtcaatgcaaccaggtt

SEQ ID NO: 185620 - DNA, 569 bp, Homo sapiens
  Payload ID: 16555
  Gene Symbol: SPATA18
  Gene Name: spermatogenesis associated 18
  ENST ID: ENST00000508915
  CDS Start-End: 290-385
aataatcgccagggtatctatggccgggctcaggcggctgctggggagccaggagaccgcgcgggacggcggatgaggcgcggcggctgcggcccagggcacctcccctctggcttcccgaacccggccaggtccgacccgagggggaggatggaaacacctgccgcgctctgagccccccagaagagaacacccttcccgccatatcaccccacggtcctgcggaggccaccgcctggtccccccaagtctccatcgcgcagcgtggggccgagaggaatagtgagcgatggcggaaaacctgaaaagactggtctcaaacgaaactttacgaacgttgcaggaaaagctagacttctggctgaaggagtacaactctggttgaaactgaaaagaatcttgaagaaagcaagaacagatcggccatatcccttttggctgcagaggaggaaataaatcagctgaaaaagcagcttaaatctcttcaagctcaggaggatgcccgccacagaaacacagatcagaggagctcagagaataggcggtcagagccttggagcttggaggag

SEQ ID NO: 185621 - DNA, 861 bp, Homo sapiens
  Payload ID: 16556
  Gene Symbol: SPATA19
  Gene Name: spermatogenesis associated 19
  Uniprot ID: Q7Z5L4
  ENST ID: ENST00000299140
  CDS Start-End: 56-559
aggcagcttcaatggaaggagggagccaagaagggggcctggtatacattcaaagatgataattacgacatggattgtgtatattcttgctcggaaaggtgtagggcttcccttcctaccaataaccagttcggacattgacgttgtggaaagtgaggctgtgtctgtactacatcattggttgaaaaaaacagaagaagaggcttctcggggcataaaggaaaagctgtccatcaaccacccttcccagggtgtaagggagaagatgtccactgactcccctcccacccatggccaggacatccacgtgaccagagatgtggtgaagcaccacctctctaagtctgatttgttggcaaaccagagccaagaggtcctagaggagagaacacgaatccagttcataagatggagccacactcgtatcttccaagtgccaagtgagatgacagaggacatcatgcgagatcgaatagagcaggtgagacgaagcatatcccgtcttacagatgtctcagctcaggacttcagtatgagaccctcctcctcagactgctgagagcaacagatggagctttgggaacgcggagaacagtggggttacagggagtcatcatcagccctaccccttggccaaccacatctccctgctgtgtcccctgggcatttctctacctcccaggtggaagtccttcagggtccagcagcaacctgtatcagaagaacatccttctctgcttgacctgaagaagggccagacctgggcagaaagactccagcaggtgagctcttcatgcgacagtgtcagcactggagtcttcttgctgaactgcgaataaagagatgtgctgtttaacaacc

SEQ ID NO: 185622 - DNA, 653 bp, Homo sapiens
  Payload ID: 16556
  Gene Symbol: SPATA19
  Gene Name: spermatogenesis associated 19
  Uniprot ID: Q7Z5L4
  ENST ID: ENST00000532889
  CDS Start-End: 93-596
ctcccttcaatgaccttcctgtcccataggagttctcaggcagcttcaatggaaggagggagccaagaagggggcctggtatacattcaaagatgataattacgacatggattgtgtatattcttgctcggaaaggtgtagggcttcccttcctaccaataaccagttcggacattgacgttgtggaaagtgaggctgtgtctgtactacatcattggttgaaaaaaacagaagaagaggcttctcggggcataaaggaaaagctgtccatcaaccacccttcccagggtgtaagggagaagatgtccactgactcccctcccacccatggccaggacatccacgtgaccagagatgtggtgaagcaccacctctctaagtctgatttgttggcaaaccagagccaagaggtcctagaggagagaacacgaatccagttcataagatggagccacactcgtatcttccaagtgccaagtgagatgacagaggacatcatgcgagatcgaatagagcaggtgagacgaagcatatcccgtcttacagatgtctcagctcaggacttcagtatgagaccctcctcctcagactgctgagagcaacaggtggaagtccttcagggtccagcagcaacctgtatcagaagaacatcc

SEQ ID NO: 185623 - DNA, 4022 bp, Homo sapiens
  Payload ID: 16557
  Gene Symbol: SPATA2
  Gene Name: spermatogenesis associated 2
  Uniprot ID: Q9UM82
  ENST ID: ENST00000289431
  CDS Start-End: 232-1794
cccgggtactggtctcagtacccctgcagccggccggagaggctagagcccgacggggcccggctccggcggcagccgcgcctctcgcttgcttccctcggccgggccgtcctcggcggcagtgtcaggagcactccgctggtccaggcggcaacatgtccatgcttttagtgatgtccctgcctctaatccagaagccatggaggagataaggtagcccccctcgatcggatggggaagcccagttcaatggatactaaattcaaggatgacttatttcggaagtacgtgcagttccatgagagcaaagtggataccaccaccagcaggcagcggcctggcagcgatgagtgcctgcgggtggcagcctcaaccctgctcagcctgcacaaggtggatcccttttatcgattccggctgatccagttctatgaggtggtggagagctccttgcgctcgctcagctcctctagcctgcgggctctgcacggcgccttcagcatgctggagacggtgggcatcaacctcttcctctacccgtggaagaaggaattcagaagcatcaagacctacacgggcccttttgtttattatgtcaagtcgacattactggaagaggacatccgagccatcctgagctgcatgggctacacacctgagctgggcactgcatacaagctcagagagctcgtggagaccctccaggtgaagatggtctcctttgagctctttctggccaaagtcgagtgtgagcagatgctagaaatccactcacaagtgaaggacaagggctactccgagctggacattgtgagcgagcgcaagagcagtgcagaggatgtgcgcggctgctcggacgccctgcggcggcgggcagagggccgggagcacctgacggcctccatgtcacgagtggcactccagaagtcggccagcgagcgggcggccaaggactactacaagccccgcgtgaccaagccctcgaggtcagtggatgcctatgacagctactgggagagccggaagccacccctgaaggcctcattgagtcttcggaaggagcctgtggcaacggatgtgggggacgacctcaaggatgagatcatccgcccatccccttcgctgctgaccatggccagctccccccacggcagcccggatgtgcttccacccgcctcccccagcaacggcccggccctgctgcgcggtacctacttctccactcaggatgacgtggatctgtacacagactctgaacccagggccacctaccgtcggcaggatgctctgcggccggatgtgtggctgctcagaaacgatgcccactccctctaccacaagcgctcgccccctgccaaagagtccgccctctccaagtgccaaagctgcgggctgtcctgcagctcctccctctgccagcgctgtgacagcctgctcacctgtcctccagcttccaagcccagcgccttccccagcaaggcctcgactcatgacagcctggcccacggggcatctctgcgggagaagtacccaggccagactcagggcctcgaccgcctcccgcaccttcactccaaatccaagccctccaccacgcccacttcccgctgtggcttctgcaaccgcccaggcgccaccaacacctgcacccagtgttcaaaagtctcatgtgacgcctgcctcagcgcttaccattatgacccctgctacaaaaagagtgagctgcacaagttcatgcccaacaaccagctgaactacaagtccacccagctctcccatctcgtgtacagatagaccggcctcgccccttccagctccaagggctacatcaaccgacctttcgggtttcacggtgaagaagtactaacgcattgatctcagaggcggaggcctgcacttgaccatgtaggtggcagagatcgtgggctggctgtgtccacgtgggagttcacttagcgactcagatatctcaaccaatggctgctttgttgtctgacaagggagaaggtggcacttccgttcagattcattttgctaatctctccactccctgttcagttggttctttttttggggttttgttttgttttgttttgttgttttgttttttcctttaaagaggatttctgtctctgggaccctcgctgcacctacccctcccattgcaaagccaacttggactgggaagggcccttcaggtcaccaaacatccacctggagcggcgagctagaggcctgttggcttgtgaaatgagccctcctgccacacggggcctctcccaaaggctcatcccttggccgcccccttcctaaacacaaggatccccagctggactccccaccccctggcttccccacctctccaggtgtcaaaggtgaaccgagtccagtattagctgaatgtcatttcgtacaccacagctcagtcagcccatggccttcgtgaactttgctccaacacactgatgtgtgggcttcccacagcaggactgacttccccctttctgttgtttgcacatgcccctcttactgtactgtcaatagatatttttgagatttatttttaaataaatattcaacttgctgtgtgtttcaacgtggttaaaaaaatgaattatgtagctatttattaaatgccctgggttctttagtcttccaagggagggcctcgcgcccattcgtgttgtatcctccactcactatggcccgaggggagaggagagtttggggcagggaggaacagacatgaagcctccttttcttgagctggtggagagccactgtcttccctgcagtaactatctatacacctacctccagtgtgcacttagggggtgagcgcgggtgtcgaggtctgtgtgtctgcagactgctaacctatgacaattcagggacctcacctgtcggacctatagcttgctgagcaggaaccttgcacttcacacttcttgagtctcgtttcagaaggaaaatcatttgggattcctactgcccctccatctcaatcctcttctcttcaccagtttccaggactcatctgcaacatttgcaatctttttgcactaaaagtgggcaggagtcggcatgtgcccatcagagagacggctcctcagatgctcagctaagcctaagcgcttccaagcctgaaggccccttcagcttctcatgtgaattaccaacccctggattttccttgtgggggtacaagagcaggagtggggcaagagtttgaaaataaagccgcttccttgtgaactaactatattttagccataactgtttgtgatgtacacaatgttaagggatttatatgcagtgggcttttctgggagaaagttattcagctcttgagcaagtttaagtctggctgaatcctgaggccactgtgaatttgctgatgttcttccaactcagttgagtgattttaaggttttccaaatcttctatggctctctttttaatatatatatatatatatatatatatatatatatatatatatatatatatctatctggtagatcacatgtagatgtacagtgtgtatattaagctgaatttcaaccaactttattactaagaccagcctagcagggcattcatctttgatgttcttccttttcacatttcagaatcggcaatgcctggcccactcctgagagctctagttttctagttttccatttccagattgcgccagcattacagtaactaactctttctaaccaaccgtgatgccacgtaacttaccctatggacaaaagcaggaatgactaacacatcctaggagggaaagtccagtgtacctgtcatcacggacgcactgtggtcacagactggaatacgaaatactacagccctgctcccaggtgtgcatcttactggatgaggttgctgtgattgagatagttaaatacatgctaatttaaaaatgcagatgttttacatttgatttctaccaagagttgaaatgttgagagatgattaaaaataataataataaagtgtcttccattgttaaa

SEQ ID NO: 185624 - DNA, 4138 bp, Homo sapiens
  Payload ID: 16557
  Gene Symbol: SPATA2
  Gene Name: spermatogenesis associated 2
  Uniprot ID: Q9UM82
  ENST ID: ENST00000422556
  CDS Start-End: 351-1913
gagcttacatcatatagagattagctctcctagccccattcggtgtgggaagatgggaattttgctactacaggaatttttgtaactcaactctgctcgcgccgccataaggcattctaacttagccaaacactttcgagtagagctgtccagcagatgcagcaggatggctttgcaagagtcggagttttggcgttagacctaggttcagagctcagatccacttcttcctagccttacgacttaggagcactccgctggtccaggcggcaacatgtccatgcttttagtgatgtccctgcctctaatccagaagccatggaggagataaggtagcccccctcgatcggatggggaagcccagttcaatggatactaaattcaaggatgacttatttcggaagtacgtgcagttccatgagagcaaagtggataccaccaccagcaggcagcggcctggcagcgatgagtgcctgcgggtggcagcctcaaccctgctcagcctgcacaaggtggatcccttttatcgattccggctgatccagttctatgaggtggtggagagctccttgcgctcgctcagctcctctagcctgcgggctctgcacggcgccttcagcatgctggagacggtgggcatcaacctcttcctctacccgtggaagaaggaattcagaagcatcaagacctacacgggcccttttgtttattatgtcaagtcgacattactggaagaggacatccgagccatcctgagctgcatgggctacacacctgagctgggcactgcatacaagctcagagagctcgtggagaccctccaggtgaagatggtctcctttgagctctttctggccaaagtcgagtgtgagcagatgctagaaatccactcacaagtgaaggacaagggctactccgagctggacattgtgagcgagcgcaagagcagtgcagaggatgtgcgcggctgctcggacgccctgcggcggcgggcagagggccgggagcacctgacggcctccatgtcacgagtggcactccagaagtcggccagcgagcgggcggccaaggactactacaagccccgcgtgaccaagccctcgaggtcagtggatgcctatgacagctactgggagagccggaagccacccctgaaggcctcattgagtcttcggaaggagcctgtggcaacggatgtgggggacgacctcaaggatgagatcatccgcccatccccttcgctgctgaccatggccagctccccccacggcagcccggatgtgcttccacccgcctcccccagcaacggcccggccctgctgcgcggtacctacttctccactcaggatgacgtggatctgtacacagactctgaacccagggccacctaccgtcggcaggatgctctgcggccggatgtgtggctgctcagaaacgatgcccactccctctaccacaagcgctcgccccctgccaaagagtccgccctctccaagtgccaaagctgcgggctgtcctgcagctcctccctctgccagcgctgtgacagcctgctcacctgtcctccagcttccaagcccagcgccttccccagcaaggcctcgactcatgacagcctggcccacggggcatctctgcgggagaagtacccaggccagactcagggcctcgaccgcctcccgcaccttcactccaaatccaagccctccaccacgcccacttcccgctgtggcttctgcaaccgcccaggcgccaccaacacctgcacccagtgttcaaaagtctcatgtgacgcctgcctcagcgcttaccattatgacccctgctacaaaaagagtgagctgcacaagttcatgcccaacaaccagctgaactacaagtccacccagctctcccatctcgtgtacagatagaccggcctcgccccttccagctccaagggctacatcaaccgacctttcgggtttcacggtgaagaagtactaacgcattgatctcagaggcggaggcctgcacttgaccatgtaggtggcagagatcgtgggctggctgtgtccacgtgggagttcacttagcgactcagatatctcaaccaatggctgctttgttgtctgacaagggagaaggtggcacttccgttcagattcattttgctaatctctccactccctgttcagttggttctttttttggggttttgttttgttttgttttgttgttttgttttttcctttaaagaggatttctgtctctgggaccctcgctgcacctacccctcccattgcaaagccaacttggactgggaagggcccttcaggtcaccaaacatccacctggagcggcgagctagaggcctgttggcttgtgaaatgagccctcctgccacacggggcctctcccaaaggctcatcccttggccgcccccttcctaaacacaaggatccccagctggactccccaccccctggcttccccacctctccaggtgtcaaaggtgaaccgagtccagtattagctgaatgtcatttcgtacaccacagctcagtcagcccatggccttcgtgaactttgctccaacacactgatgtgtgggcttcccacagcaggactgacttccccctttctgttgtttgcacatgcccctcttactgtactgtcaatagatatttttgagatttatttttaaataaatattcaacttgctgtgtgtttcaacgtggttaaaaaaatgaattatgtagctatttattaaatgccctgggttctttagtcttccaagggagggcctcgcgcccattcgtgttgtatcctccactcactatggcccgaggggagaggagagtttggggcagggaggaacagacatgaagcctccttttcttgagctggtggagagccactgtcttccctgcagtaactatctatacacctacctccagtgtgcacttagggggtgagcgcgggtgtcgaggtctgtgtgtctgcagactgctaacctatgacaattcagggacctcacctgtcggacctatagcttgctgagcaggaaccttgcacttcacacttcttgagtctcgtttcagaaggaaaatcatttgggattcctactgcccctccatctcaatcctcttctcttcaccagtttccaggactcatctgcaacatttgcaatctttttgcactaaaagtgggcaggagtcggcatgtgcccatcagagagacggctcctcagatgctcagctaagcctaagcgcttccaagcctgaaggccccttcagcttctcatgtgaattaccaacccctggattttccttgtgggggtacaagagcaggagtggggcaagagtttgaaaataaagccgcttccttgtgaactaactatattttagccataactgtttgtgatgtacacaatgttaagggatttatatgcagtgggcttttctgggagaaagttattcagctcttgagcaagtttaagtctggctgaatcctgaggccactgtgaatttgctgatgttcttccaactcagttgagtgattttaaggttttccaaatcttctatggctctctttttaatatatatatatatatatatatatatatatatatatatatatatatatatctatctggtagatcacatgtagatgtacagtgtgtatattaagctgaatttcaaccaactttattactaagaccagcctagcagggcattcatctttgatgttcttccttttcacatttcagaatcggcaatgcctggcccactcctgagagctctagttttctagttttccatttccagattgcgccagcattacagtaactaactctttctaaccaaccgtgatgccacgtaacttaccctatggacaaaagcaggaatgactaacacatcctaggagggaaagtccagtgtacctgtcatcacggacgcactgtggtcacagactggaatacgaaatactacagccctgctcccaggtgtgcatcttactggatgaggttgctgtgattgagatagttaaatacatgctaatttaaaaatgcagatgttttacatttgatttctaccaagagttgaaatgttgagagatgattaaaaataataataataaagtgtcttccattgtt

SEQ ID NO: 185625 - DNA, 2719 bp, Homo sapiens
  Payload ID: 16558
  Gene Symbol: SPATA20
  Gene Name: spermatogenesis associated 20
  Uniprot ID: Q8TB22
  ENST ID: ENST00000006658
  CDS Start-End: 121-2529
acactgtcccaagtcccggcgaagacccgcccgcggctccgtaggtgcccggcccgcccctcgcagcctcctgacttcccttcctgtcctcagcggccgggcccacggccccgagcagccatgctgggcgcgcgggcctggttgggccgcgtccttctgctgccccgcgccggtgcaggcctcgccgcgagccgcaggtgtcctggagtctggcccaggacctggccccacaggagtcccagcaggggtagctcctcccgggacaaggaccgaagtgcgacggtcagtagttcagtgcccatgcctgctggagggaaaggaagccatccttcatctacaccccagagggtccccaaccgcctgatccacgagaagtcaccatacctcctacaacatgcctacaatcctgtggactggtacccctggggacaggaagccttcgacaaggccaggaaggaaaacaagccgattttcctctcagtcgggtactccacctgccactggtgccacatgatggaagaggagtccttccagaatgaggagattggccgcctgctcagtgaggactttgtgagtgtgaaggtagaccgtgaggagcggcctgacgtggacaaggtgtacatgacgttcgtgcaggccaccagcagcggcgggggctggcccatgaatgtgtggctgactcccaacctccagccctttgtcgggggcacctatttccctcctgaggatggcttgacccgagtcggcttccgcacagtgttgctgagaatacgagaacagtggaaacagaacaagaacaccctgctagaaaatagccagcgtgtcaccactgccctgctggcccgatcagagatcagcgtgggtgaccgccagctgccgccctctgccgccaccgtgaacaatcgctgcttccagcagctggatgagggctatgatgaggaatacggtggcttcgctgaggcccccaagtttcccacgccggtgatcctgagcttcctgttctcctactggctcagccatcgactgactcaggatggctctcgggcccagcagatggccttgcataccctgaaaatgatggctaacgggggcatccgggaccatgtggggcagggctttcaccgctactccacagaccgccagtggcacgtccctcactttgagaagatgctctatgaccaggcacagctcgctgtggcctattcgcaggccttccagctctctggtgatgaattctactctgacgtggccaaaggcatcctgcagtacgtggctcggagcctgagccaccggtccggaggcttctatagcgcagaagatgcagactcgcccccagagcggggccagcggcccaaagagggcgcctactatgtgtggacggtcaaagaggttcagcagctcctcccggagcctgtgttgggtgccaccgagccgctgacctcaggccagctcctcatgaagcactacggcctcacagaggctggtaacatcagccccagtcaggaccccaagggggagctgcagggccagaatgtgctgaccgtccggtactcgctggagctgactgctgcccgctttggcttggatgtggaggccgtgcggaccttgctcaattcagggctggagaagctcttccaggcccggaagcatcggcccaagccgcacctggacagcaagatgctggctgcctggaatggcttgatggtgtcaggctatgctgtgactggggctgtcctgggccaagacaggctgatcaactatgccaccaatggtgccaagttcctgaagcggcacatgtttgatgtggccagtggccgcctgatgcggacctgctacaccggccctggggggactgtggagcacagcaacccaccctgctggggcttcctggaggactacgccttcgtggtgcggggcctgctggacctgtatgaggcctcacaggagagtgcgtggctcgagtgggctctgcggctgcaggacacacaggacaagctcttttgggactcccagggtggcggctacttctgcagtgaggctgagctgggggctggcctgcccctgcgtctgaaggacgaccaggatggagcagagcccagcgccaattccgtgtcagcccacaacctgctccggctgcatggcttcacgggccacaaggactggatggacaagtgtgtgtgcctattgaccgccttttccgagcgcatgcgtcgtgtcccggtggcgttgcccgagatggtccgcgccctctcagcccagcagcagaccctcaagcagatcgtgatctgtggagaccgtcaggccaaggacaccaaggccctggtgcagtgcgtccactctgtctacattcctaacaaggtgctgattctggctgatggggacccctcgagcttcctgtcccgccagctgcctttcctgagtaccctccgacggttggaagaccaggccactgcatatgtgtgtgagaatcaagcctgctcagtgcccatcactgatccctgcgaattacgaaaactactacatccatgactgccccaacccccttggggtggggcagaaggtgaagcatcccaactgactagagactcaggccctgcagggccctatagaacctgtggccatccctgagcaccctgccaccaggtgacctcggccatactcactgccccccttgggcacccactcaccctagaataaacttaacagtgtcccgtggtaa

SEQ ID NO: 185626 - DNA, 2634 bp, Homo sapiens
  Payload ID: 16558
  Gene Symbol: SPATA20
  Gene Name: spermatogenesis associated 20
  Uniprot ID: Q8TB22
  ENST ID: ENST00000356488
  CDS Start-End: 84-2444
tccgtaggtgcccggcccgcccctcgcagcctcctgacttcccttcctgtcctcagcggccgggcccacggccccgagcagccatgctgggcgcgcgggcctggttgggccgcgtccttctgctgccccgcgccggtgcaggcctcgccgcgagccgcaggggtagctcctcccgggacaaggaccgaagtgcgacggtcagtagttcagtgcccatgcctgctggagggaaaggaagccatccttcatctacaccccagagggtccccaaccgcctgatccacgagaagtcaccatacctcctacaacatgcctacaatcctgtggactggtacccctggggacaggaagccttcgacaaggccaggaaggaaaacaagccgattttcctctcagtcgggtactccacctgccactggtgccacatgatggaagaggagtccttccagaatgaggagattggccgcctgctcagtgaggactttgtgagtgtgaaggtagaccgtgaggagcggcctgacgtggacaaggtgtacatgacgttcgtgcaggccaccagcagcggcgggggctggcccatgaatgtgtggctgactcccaacctccagccctttgtcgggggcacctatttccctcctgaggatggcttgacccgagtcggcttccgcacagtgttgctgagaatacgagaacagtggaaacagaacaagaacaccctgctagaaaatagccagcgtgtcaccactgccctgctggcccgatcagagatcagcgtgggtgaccgccagctgccgccctctgccgccaccgtgaacaatcgctgcttccagcagctggatgagggctatgatgaggaatacggtggcttcgctgaggcccccaagtttcccacgccggtgatcctgagcttcctgttctcctactggctcagccatcgactgactcaggatggctctcgggcccagcagatggccttgcataccctgaaaatgatggctaacgggggcatccgggaccatgtggggcagggctttcaccgctactccacagaccgccagtggcacgtccctcactttgagaagatgctctatgaccaggcacagctcgctgtggcctattcgcaggccttccagctctctggtgatgaattctactctgacgtggccaaaggcatcctgcagtacgtggctcggagcctgagccaccggtccggaggcttctatagcgcagaagatgcagactcgcccccagagcggggccagcggcccaaagagggcgcctactatgtgtggacggtcaaagaggttcagcagctcctcccggagcctgtgttgggtgccaccgagccgctgacctcaggccagctcctcatgaagcactacggcctcacagaggctggtaacatcagccccagtcaggaccccaagggggagctgcagggccagaatgtgctgaccgtccggtactcgctggagctgactgctgcccgctttggcttggatgtggaggccgtgcggaccttgctcaattcagggctggagaagctcttccaggcccggaagcatcggcccaagccgcacctggacagcaagatgctggctgcctggaatggcttgatggtgtcaggctatgctgtgactggggctgtcctgggccaagacaggctgatcaactatgccaccaatggtgccaagttcctgaagcggcacatgtttgatgtggccagtggccgcctgatgcggacctgctacaccggccctggggggactgtggagcacagcaacccaccctgctggggcttcctggaggactacgccttcgtggtgcggggcctgctggacctgtatgaggcctcacaggagagtgcgtggctcgagtgggctctgcggctgcaggacacacaggacaagctcttttgggactcccagggtggcggctacttctgcagtgaggctgagctgggggctggcctgcccctgcgtctgaaggacgaccaggatggagcagagcccagcgccaattccgtgtcagcccacaacctgctccggctgcatggcttcacgggccacaaggactggatggacaagtgtgtgtgcctattgaccgccttttccgagcgcatgcgtcgtgtcccggtggcgttgcccgagatggtccgcgccctctcagcccagcagcagaccctcaagcagatcgtgatctgtggagaccgtcaggccaaggacaccaaggccctggtgcagtgcgtccactctgtctacattcctaacaaggtgctgattctggctgatggggacccctcgagcttcctgtcccgccagctgcctttcctgagtaccctccgacggttggaagaccaggccactgcatatgtgtgtgagaatcaagcctgctcagtgcccatcactgatccctgcgaattacgaaaactactacatccatgactgccccaacccccttggggtggggcagaaggtgaagcatcccaactgactagagactcaggccctgcagggccctatagaacctgtggccatccctgagcaccctgccaccaggtgacctcggccatactcactgccccccttgggcacccactcaccctagaataaacttaacagtgtcccgtggtaa

SEQ ID NO: 185627 - DNA, 879 bp, Homo sapiens
  Payload ID: 16558
  Gene Symbol: SPATA20
  Gene Name: spermatogenesis associated 20
  ENST ID: ENST00000502911
  CDS Start-End: 57-227
agcctcctgacttcccttcctgtcctcagcggccgggcccacggccccgagcagccatgctgggcgcgcgggcctggttgggccgcgtccttctgctgccccgcgccggtgcaggcctcgccgcgagccgcaggtgtcctggagtctggcccaggacctggccccacaggagtcccagcaggcccaggaggttgggggagactaacctggcaaggagcccccaatgagccacctctcctcaccccccaaaaaacataagggggagcacaaaggccacagtctcccccatggttcagaaaggggtagctcctcccgggacaaggaccgaagtgcgacggtcagtagttcagtgcccatgcctgctggagggaaaggaagccatccttcatctacaccccagagggtccccaaccgcctgatccacgagaagtcaccatacctcctacaacatgcctacaatcctgtggactggtacccctggggacaggaagccttcgacaaggccaggaaggaaaacaagccgattttcctctcagtcgggtactccacctgccactggtgccacatgatggaagaggagtccttccagaatgaggagattggccgcctgctcagtgaggactttgtgagtgtgaaggtagaccgtgaggagcggcctgacgtggacaaggtgtacatgacgttcgtgcaggccaccagcagcggcgggggctggcccatgaatgtgtggctgactcccaacctccagccctttgtcgggggcacctatttccctcctgaggatggcttgacccgagtcggcttccgcacagtgttgctgagaatacgagaacagtggaaacagaacaagaacaccctgctagaaaatagccagcgtgt

SEQ ID NO: 185628 - DNA, 453 bp, Homo sapiens
  Payload ID: 16558
  Gene Symbol: SPATA20
  Gene Name: spermatogenesis associated 20
  ENST ID: ENST00000510917
  CDS Start-End: 49-180
gacttcccttcctgtcctcagcggccgggcccacggccccgagcagccatgctgggcgcgcgggcctggttgggccgcgtccttctgctgccccgcgccggtgcaggcctcgccgcgagccgcaggtctgcctgcagtcccacttccaggctgaactccctgaggtctctgattccctaggtgtcctggagtctggcccaggacctggccccacaggagtcccagcaggggtagctcctcccgggacaaggaccgaagtgcgacggtcagtagttcagtgcccatgcctgctggagggaaaggaagccatccttcatctacaccccagagggtccccaaccgcctgatccacgagaagtcaccatacctcctacaacatgcctacaatcctgtggactgtcgggtactccacctgccactggtgccacatgatggaagaggagtccttccaga

SEQ ID NO: 185629 - DNA, 3539 bp, Homo sapiens
  Payload ID: 16558
  Gene Symbol: SPATA20
  Gene Name: spermatogenesis associated 20
  ENST ID: ENST00000504334
  CDS Start-End: 796-927
agcaaatattgactgactgctgtggacaaagtgctgggctcaccttggagggatccaacctccaggagctcgagcgcagcagggtagacaagccaggggcacgtgatgcggctgtggcagaagccaagtgcaggagctcccaggctcctttgttttactgagtcaccttaaatgtaactctgccctctcccttgcttcgccaaggctagcgagaaactcagtcttagccacacaggaggaatcggaccccttctgggggtttatgtggagtctgggaaaccaagggtggggtgaggcctggtactcaatccaggaggggcccctatgaccaccctcgcctgtttttcttctcaatgctccctgatcactggaccactggacactgatgtgtcctcagtgcttggggtctggctctgcaggcagcctgcagccagcctccatccccctttcagggacaaatggccttccaccagagtcgttgctcagcccggactcactgacaagccacgggacctttgcacaaactgtacctctgcctccttccccagcactccccctgagcaccctccaagttcctttctctcgttctccatggcttcacaaatgtgatttcctcagggaagccttcatcctttgccccttccaccagatcagggcgacgctcggagaccagccacactgtcccaagtcccggcgaagacccgcccgcggctccgtaggtgcccggcccgcccctcgcagcctcctgacttcccttcctgtcctcagcggccgggcccacggccccgagcagccatgctgggcgcgcgggcctggttgggccgcgtccttctgctgccccgcgccggtgcaggcctcgccgcgagccgcaggtctgcctgcagtcccacttccaggctgaactccctgaggtctctgattccctaggtgtcctggagtctggcccaggacctggccccacaggagtcccagcaggggtagctcctcccgggacaaggaccgaagtgcgacggtcagtagttcagtgcccatgcctgctggagggaaaggaagccatccttcatctacaccccagagggtccccaaccgcctgatccacgagaagtcaccatacctcctacaacatgcctacaatcctgtggactggtacccctggggacaggaagccttcgacaaggccaggaaggaaaacaagccgattttcctctcagtcgggtactccacctgccactggtgccacatgatggaagaggagtccttccagaatgaggagattggccgcctgctcagtgaggactttgtgagtgtgaaggtagaccgtgaggagcggcctgacgtggacaaggtgtacatgacgttcgtgcaggccaccagcagcggcgggggctggcccatgaatgtgtggctgactcccaacctccagccctttgtcgggggcacctatttccctcctgaggatggcttgacccgagtcggcttccgcacagtgttgctgagaatacgagaacagtggaaacagaacaagaacaccctgctagaaaatagccagcgtgtcaccactgccctgctggcccgatcagagatcagcgtgggtgaccgccagctgccgccctctgccgccaccgtgaacaatcgctgcttccagcagctggatgagggctatgatgaggaatacggtggcttcgctgaggcccccaagtttcccacgccggtgatcctgagcttcctgttctcctactggctcagccatcgactgactcaggatggctctcgggcccagcagatggccttgcataccctgaaaatgatggctaacgggggcatccgggaccatgtggggcaggtgacgggcactgggtgttccctggaggggcagcagggggctgtggggtggggcagaagctgggactggcctccagctttgtatccgcacagggctttcaccgctactccacagaccgccagtggcacgtccctcactttgagaagatgctctatgaccaggcacagctcgctgtggcctattcgcaggccttccagctctctggtgatgaattctactctgacgtggccaaaggcatcctgcagtacgtggctcggagcctgagccaccggtccggaggcttctatagcgcagaagatgcagactcgcccccagagcggggccagcggcccaaagagggcgcctactatgtgtggacggtcaaagaggttcagcagctcctcccggagcctgtgttgggtgccaccgagccgctgacctcaggccagctcctcatgaagcactacggcctcacagaggctggtaacatcagccccagtcaggaccccaagggggagctgcagggccagaatgtgctgaccgtccggtactcgctggagctgactgctgcccgctttggcttggatgtggaggccgtgcggaccttgctcaattcagggctggagaagctcttccaggcccggaagcatcggcccaagccgcacctggacagcaagatgctggctgcctggaatggcttgatggtgtcaggctatgctgtgactggggctgtcctgggccaagacaggctgatcaactatgccaccaatggtgccaagttcctgaagcggcacatgtttgatgtggccagtggccgcctgatgcggacctgctacaccggccctggggggactgtggagcacagcaacccaccctgctggggcttcctggaggactacgccttcgtggtgcggggcctgctggacctgtatgaggcctcacaggagagtgcgtggctcgagtgggctctgcggctgcaggacacacaggacaagctcttttgggactcccagggtggcggctacttctgcagtgaggctgagctgggggctggcctgcccctgcgtctgaaggacgaccaggatggagcagagcccagcgccaattccgtgtcagcccacaacctgctccggctgcatggcttcacgggccacaaggactggatggacaagtgtgtgtgcctattgaccgccttttccgagcgcatgcgtcgtgtcccggtggcgttgcccgagatggtccgcgccctctcagcccagcagcagaccctcaagcagatcgtgatctgtggagaccgtcaggccaaggacaccaaggccctggtgcagtgcgtccactctgtctacattcctaacaaggtgctgattctggctgatggggacccctcgagcttcctgtcccgccagctgcctttcctgagtaccctccgacggttggaagaccaggccactgcatatgtgtgtgagaatcaagcctgctcagtgcccatcactgatccctgcgaattacgaaaactactacatccatgactgccccaacccccttggggtggggcagaaggtgaagcatcccaactgactagagactcaggccctgcagggccctatagaacctgtggccatccctgagcaccctgccaccaggtgacctcggccatactcactgccccccttgggcacccactcaccctagaataaacttaacagtgtcccgtggt

SEQ ID NO: 185630 - DNA, 1035 bp, Homo sapiens
  Payload ID: 16558
  Gene Symbol: SPATA20
  Gene Name: spermatogenesis associated 20
  ENST ID: ENST00000511347
  CDS Start-End: 1-742
ggagtccttccagaatgaggagattggccgcctgctcagtgaggactttgtgagtgtgaaggtagaccgtgaggagcggcctgacgtggacaaggtgtacatgacgttcgtgcaggccaccagcagcggcgggggctggcccatgaatgtgtggctgactcccaacctccagccctttgtcgggggcacctatttccctcctgaggatggcttgacccgagtcggcttccgcacagtgttgctgagaatacgagaacagtggaaacagaacaagaacaccctgctagaaaatagccagcgtgtcaccactgccctgctggcccgatcagagatcagcgtgggtgaccgccagctgccgccctctgccgccaccgtgaacaatcgctgcttccagcagctggatgagggctatgatgaggaatacggtggcttcgctgaggcccccaagtttcccacgccggtgatcctgagcttcctgttctcctactggctcagccatcgactgactcaggatggctctcgggcccagcagatggccttgcataccctgaaaatgatggctaacgggggcatccgggaccatgtggggcagaccgccagtggcacgtccctcactttgagaagatgctctatgaccaggcacagctcgctgtggcctattcgcaggccttccagctctctggtgatgaattctactctgacgtggccaaaggcatcctgcagtacgtggctcggagcctgagccaccggtccggaggcttctatagcgcagaagatgcagactcgcccccagagcggggccagcggcccaaagagggcgcctactatgtgtggacggtcaaagaggttcagcagctcctcccggagcctgtgttgggtgccaccgagccgctgacctcaggccagctcctcatgaagcactacggcctcacagaggctggtaacatcagccccagtcaggaccccaagggggagctgcagggccagaatgtgctgaccgtccggtactcgctggagctgactgctgcccgcttt

SEQ ID NO: 185631 - DNA, 512 bp, Homo sapiens
  Payload ID: 16558
  Gene Symbol: SPATA20
  Gene Name: spermatogenesis associated 20
  ENST ID: ENST00000508528
  CDS Start-End: 1-332
accaggcacagctcgctgtggcctattcgcaggccttccagctctctggtgatgaattctactctgacgtggccaaaggcatcctgcagtacgtggctcggagcctgagccaccggtccggaggcttctatagcgcagaagatgcagactcgcccccagagcggggccagcggcccaaagagggcgcctactatgtgtggacggtcaaagaggttcagcagctcctcccggagcctgtgttgggtgccaccgagccgctgacctcaggccagctcctcatgaagcactacggcctcacagaggctggtaacatcagccccagtcaggcttgatggtgtcaggctatgctgtgactggggctgtcctgggccaagacaggctgatcaactatgccaccaatggtgccaagttcctgaagcggcacatgtttgatgtggccagtggccgcctgatgcggacctgctacaccggccctggggggactgtggagcacagcaacccaccctgctggg

SEQ ID NO: 185632 - DNA, 1590 bp, Homo sapiens
  Payload ID: 16558
  Gene Symbol: SPATA20
  Gene Name: spermatogenesis associated 20
  ENST ID: ENST00000505559
  CDS Start-End: 5-136
agccatgctgggcgcgcgggcctggttgggccgcgtccttctgctgccccgcgccggtgcaggcctcgccgcgagccgcaggtctgcctgcagtcccacttccaggctgaactccctgaggtctctgattccctaggtgtcctggagtctggcccaggacctggccccacaggagtcccagcaggtgggcgctgagtgagggagtccccatgtctggtttcctctgtttgtccctcacctggtcgagtcccagaccctactgatcttggcctgtccagccaccaacagtaggctgccttccagtggggccacacccaggcctgccagagagatgcctccaagcagctgctccaggaagggccgggggaggggggtagctcctcccgggacaaggaccgaagtgcgacggtcagtagttcagtgcccatgcctgctggagggaaaggaagccatccttcatctacaccccagagggtccccaaccgcctgatccacgagaagtcaccatacctcctacaacatgcctacaatcctgtggactggtacccctggggacaggaagccttcgacaaggccaggaaggaaaacaagccgattttcctctcagtcgggtactccacctgccactggtgccacatgatggaagaggagtccttccagaatgaggagattggccgcctgctcagtgaggactttgtgagtgtgaaggtagaccgtgaggagcggcctgacgtggacaaggtgtacatgacgttcgtgcaggccaccagcagcggcgggggctggcccatgaatgtgtggctgactcccaacctccagccctttgtcgggggcacctatttccctcctgaggatggcttgacccgagtcggcttccgcacagtgttgctgagaatacgagaacagtgatcctgagcttcctgttctcctactggctcagccatcgactgactcaggatggctctcgggcccagcagatggccttgcataccctgaaaatgatggctaacgggggcatccgggaccatgtggggcaggtgacgggcactgggtgttccctggaggggcagcagggggctgtggggtggggcagaagctgggactggcctccagctttgtatccgcacagggctttcaccgctactccacagaccgccagtggcacgtccctcactttgagaagatgctctatgaccaggcacagctcgctgtggcctattcgcaggccttccagctctctggtgatgaattctactctgacgtggccaaaggcatcctgcagtacgtggctcggagcctgagccaccgggtgtgtgtccatggtggcaggcaggcctggctgtgggaggggttggggcctccactgccctgtgggccggggccagccaactctcccctccccacagtccggaggcttctatagcgcagaagatgcagactcgcccccagagcggggccagcggcccaaagagggcgcctactatgtgtggacggtcaaagaggttcagcagctcctcccggagcctgtgttgggtgccaccgagccgctgacctcaggccagctcctcatgaagcactacggcctcacag

SEQ ID NO: 185633 - DNA, 2734 bp, Homo sapiens
  Payload ID: 16558
  Gene Symbol: SPATA20
  Gene Name: spermatogenesis associated 20
  ENST ID: ENST00000503127
  CDS Start-End: 83-214
ccgtaggtgcccggcccgcccctcgcagcctcctgacttcccttcctgtcctcagcggccgggcccacggccccgagcagccatgctgggcgcgcgggcctggttgggccgcgtccttctgctgccccgcgccggtgcaggcctcgccgcgagccgcaggtctgcctgcagtcccacttccaggctgaactccctgaggtctctgattccctaggtgtcctggagtctggcccaggacctggccccacaggagtcccagcaggggtagctcctcccgggacaaggaccgaagtgcgacggtcagtagttcagtgcccatgcctgctggagggaaaggaagccatccttcatctacaccccagagggtccccaaccgcctgatccacgagaagtcaccatacctcctacaacatgcctacaatcctgtggactggtacccctggggacaggaagccttcgacaaggccaggaaggaaaacaagccgattttcctctcagtcgggtactccacctgccactggtgccacatgatggaagaggagtccttccagaatgaggagattggccgcctgctcagtgaggactttgtgagtgtgaaggtagaccgtgaggagcggcctgacgtggacaaggtgtacatgacgttcgtgcaggccaccagcagcggcgggggctggcccatgaatgtgtggctgactcccaacctccagccctttgtcgggggcacctatttccctcctgaggatggcttgacccgagtcggcttccgcacagtgttgctgagaatacgagaacagtggaaacagaacaagaacaccctgctagaaaatagccagcgtgtcaccactgccctgctggcccgatcagagatcagcgtgggtgaccgccagctgccgccctctgccgccaccgtgaacaatcgctgcttccagcagctggatgagggctatgatgaggaatacggtggcttcgctgaggcccccaagtttcccacgccggtgatcctgagcttcctgttctcctactggctcagccatcgactgactcaggatggctctcgggcccagcagatggccttgcataccctgaaaatgatggctaacgggggcatccgggaccatgtggggcagggctttcaccgctactccacagaccgccagtggcacgtccctcactttgagaagatgctctatgaccaggcacagctcgctgtggcctattcgcaggccttccagctctctggtgatgaattctactctgacgtggccaaaggcatcctgcagtacgtggctcggagcctgagccaccggtccggaggcttctatagcgcagaagatgcagactcgcccccagagcggggccagcggcccaaagagggcgcctactatgtgtggacggtcaaagaggttcagcagctcctcccggagcctgtgttgggtgccaccgagccgctgacctcaggccagctcctcatgaagcactacggcctcacagaggctggtaacatcagccccagtcaggaccccaagggggagctgcagggccagaatgtgctgaccgtccggtactcgctggagctgactgctgcccgctttggcttggatgtggaggccgtgcggaccttgctcaattcagggctggagaagctcttccaggcccggaagcatcggcccaagccgcacctggacagcaagatgctggctgcctggaatggcttgatggtgtcaggctatgctgtgactggggctgtcctgggccaagacaggctgatcaactatgccaccaatggtgccaagttcctgaagcggcacatgtttgatgtggccagtggccgcctgatgcggacctgctacaccggccctggggggactgtggagcacagcaacccaccctgctggggcttcctggaggactacgccttcgtggtgcggggcctgctggacctgtatgaggcctcacaggagagtgcgtggctcgagtgggctctgcggctgcaggacacacaggacaagctcttttgggactcccagggtggcggctacttctgcagtgaggctgagctgggggctggcctgcccctgcgtctgaaggacgaccaggatggagcagagcccagcgccaattccgtgtcagcccacaacctgctccggctgcatggcttcacgggccacaaggactggatggacaagtgtgtgtgcctattgaccgccttttccgagcgcatgcgtcgtgtcccggtggcgttgcccgagatggtccgcgccctctcagcccagcagcagaccctcaagcagatcgtgatctgtggagaccgtcaggccaaggacaccaaggccctggtgcagtgcgtccactctgtctacattcctaacaaggtgctgattctggctgatggggacccctcgagcttcctgtcccgccagctgcctttcctgagtaccctccgacggttggaagaccaggccactgcatatgtgtgtgagaatcaagcctgctcagtgcccatcactgatccctgcgaattacgaaaactactacatccatgactgccccaacccccttggggtggggcagaaggtgaagcatcccaactgactagagactcaggccctgcagggccctatagaacctgtggccatccctgagcaccctgccaccaggtgacctcggccatactcactgccccccttgggcacccactcaccctagaataaacttaacagtgtcccgtggt

SEQ ID NO: 185634 - DNA, 878 bp, Homo sapiens
  Payload ID: 16558
  Gene Symbol: SPATA20
  Gene Name: spermatogenesis associated 20
  ENST ID: ENST00000505456
  CDS Start-End: 26-157
gccgggcccacggccccgagcagccatgctgggcgcgcgggcctggttgggccgcgtccttctgctgccccgcgccggtgcaggcctcgccgcgagccgcaggtctgcctgcagtcccacttccaggctgaactccctgaggtctctgattccctaggtgtcctggagtctggcccaggacctggccccacaggagtcccagcaggcccaggaggttgggggagactaacctggcaaggagcccccaatgagccacctctcctcaccccccaaaaaacataagggggagcacaaaggccacagtctcccccatggttcagaaaggggtagctcctcccgggacaaggaccgaagtgcgacggtcagtagttcagtgcccatgcctgctggagggaaaggaagccatccttcatctacaccccagagggtccccaaccgcctgatccacgagaagtcaccatacctcctacaacatgcctacaatcctgtggactggtacccctggggacaggaagccttcgacaaggccaggaaggaaaacaagccgattttcctctcagtcgggtactccacctgccactggtgccacatgatggaagaggagtccttccagaatgaggagattggccgcctgctcagtgaggactttgtgagtgtgaaggtagaccgtgaggagcggcctgacgtggacaaggtgtacatgacgttcgtgcaggccaccagcagcggcgggggctggcccatgaatgtgtggctgactcccaacctccagccctttgtcgggggcacctatttccctcctgaggatggcttgacccgagtcggcttccgcacagtgttgctgagaatacgagaacagtggaaacagaacaagaaca

SEQ ID NO: 185635 - DNA, 628 bp, Homo sapiens
  Payload ID: 16558
  Gene Symbol: SPATA20
  Gene Name: spermatogenesis associated 20
  ENST ID: ENST00000505085
  CDS Start-End: 81-284
gtaggtgcccggcccgcccctcgcagcctcctgacttcccttcctgtcctcagcggccgggcccacggccccgagcagccatgctgggcgcgcgggcctggttgggccgcgtccttctgctgccccgcgccggtgcaggcctcgccgcgagccgcaggtgtcctggagtctggcccaggacctggccccacaggagtcccagcaggtgggcgctgagtgagggagtccccatgtctggtttcctctgtttgtccctcacctggtcgagtcccagaccctactgatcttggcctgtccagccaccaacagtaggctgccttccagtggggccacacccaggcctgccagagagatgcctccaagcagctgctccaggaagggccgggggaggggggtagctcctcccgggacaaggaccgaagtgcgacggtcagtagttcagtgcccatgcctgctggagggaaaggaagccatccttcatctacaccccagagggtccccaaccgcctgatccacgagaagtcaccatacctcctacaacatgcctacaatcctgtggactggtacccctggggacaggaagccttcgacaaggccaggaaggaaaacaagccgattttcctctcag

SEQ ID NO: 185636 - DNA, 2769 bp, Homo sapiens
  Payload ID: 16558
  Gene Symbol: SPATA20
  Gene Name: spermatogenesis associated 20
  Uniprot ID: Q8TB22
  ENST ID: ENST00000619622
  CDS Start-End: 353-2581
acactgtcccaagtcccggcgaagacccgcccgcggctccgtaggtgcccggcccgcccctcgcagcctcctgacttcccttcctgtcctcagcggccgggcccacggccccgagcagccatgctgggcgcgcgggcctggttgggccgcgtccttctgctgccccgcgccggtgcaggcctcgccgcgagccgcaggtacgggcgggcgagcgggcccctagggcactccctgcgcctgcctgcgggcccagtggagggtcttccggacaccggtccccacaccagtcctcgccaggggtagctcctcccgggacaaggaccgaagtgcgacggtcagtagttcagtgcccatgcctgctggagggaaaggaagccatccttcatctacaccccagagggtccccaaccgcctgatccacgagaagtcaccatacctcctacaacatgcctacaatcctgtggactggtacccctggggacaggaagccttcgacaaggccaggaaggaaaacaagccgattttcctctcagtcgggtactccacctgccactggtgccacatgatggaagaggagtccttccagaatgaggagattggccgcctgctcagtgaggactttgtgagtgtgaaggtagaccgtgaggagcggcctgacgtggacaaggtgtacatgacgttcgtgcaggccaccagcagcggcgggggctggcccatgaatgtgtggctgactcccaacctccagccctttgtcgggggcacctatttccctcctgaggatggcttgacccgagtcggcttccgcacagtgttgctgagaatacgagaacagtggaaacagaacaagaacaccctgctagaaaatagccagcgtgtcaccactgccctgctggcccgatcagagatcagcgtgggtgaccgccagctgccgccctctgccgccaccgtgaacaatcgctgcttccagcagctggatgagggctatgatgaggaatacggtggcttcgctgaggcccccaagtttcccacgccggtgatcctgagcttcctgttctcctactggctcagccatcgactgactcaggatggctctcgggcccagcagatggccttgcataccctgaaaatgatggctaacgggggcatccgggaccatgtggggcagggctttcaccgctactccacagaccgccagtggcacgtccctcactttgagaagatgctctatgaccaggcacagctcgctgtggcctattcgcaggccttccagctctctggtgatgaattctactctgacgtggccaaaggcatcctgcagtacgtggctcggagcctgagccaccggtccggaggcttctatagcgcagaagatgcagactcgcccccagagcggggccagcggcccaaagagggcgcctactatgtgtggacggtcaaagaggttcagcagctcctcccggagcctgtgttgggtgccaccgagccgctgacctcaggccagctcctcatgaagcactacggcctcacagaggctggtaacatcagccccagtcaggaccccaagggggagctgcagggccagaatgtgctgaccgtccggtactcgctggagctgactgctgcccgctttggcttggatgtggaggccgtgcggaccttgctcaattcagggctggagaagctcttccaggcccggaagcatcggcccaagccgcacctggacagcaagatgctggctgcctggaatggcttgatggtgtcaggctatgctgtgactggggctgtcctgggccaagacaggctgatcaactatgccaccaatggtgccaagttcctgaagcggcacatgtttgatgtggccagtggccgcctgatgcggacctgctacaccggccctggggggactgtggagcacagcaacccaccctgctggggcttcctggaggactacgccttcgtggtgcggggcctgctggacctgtatgaggcctcacaggagagtgcgtggctcgagtgggctctgcggctgcaggacacacaggacaagctcttttgggactcccagggtggcggctacttctgcagtgaggctgagctgggggctggcctgcccctgcgtctgaaggacgaccaggatggagcagagcccagcgccaattccgtgtcagcccacaacctgctccggctgcatggcttcacgggccacaaggactggatggacaagtgtgtgtgcctattgaccgccttttccgagcgcatgcgtcgtgtcccggtggcgttgcccgagatggtccgcgccctctcagcccagcagcagaccctcaagcagatcgtgatctgtggagaccgtcaggccaaggacaccaaggccctggtgcagtgcgtccactctgtctacattcctaacaaggtgctgattctggctgatggggacccctcgagcttcctgtcccgccagctgcctttcctgagtaccctccgacggttggaagaccaggccactgcatatgtgtgtgagaatcaagcctgctcagtgcccatcactgatccctgcgaattacgaaaactactacatccatgactgccccaacccccttggggtggggcagaaggtgaagcatcccaactgactagagactcaggccctgcagggccctatagaacctgtggccatccctgagcaccctgccaccaggtgacctcggccatactcactgccccccttgggcacccactcaccctagaataaacttaacagtgtcccgtggt

SEQ ID NO: 185637 - DNA, 2669 bp, Homo sapiens
  Payload ID: 16558
  Gene Symbol: SPATA20
  Gene Name: spermatogenesis associated 20
  ENST ID: ENST00000511937
  CDS Start-End: 87-1652
attgtgacccgccctgacctcacagccatccttcccaccgccaggcccaggaggttgggggagactaacctggcaaggagcccccaatgagccacctctcctcaccccccaaaaaacataagggggagcacaaaggccacagtctcccccatggttcagaaaggggtagctcctcccgggacaaggaccgaagtgcgacggtcagtagttcagtgcccatgcctgctggagggaaaggaagccatccttcatctacaccccagagggtccccaaccgcctgatccacgagaagtcaccatacctcctacaacatgcctacaatcctgtggactggtacccctggggacaggaagccttcgacaaggccaggaaggaaaacaagccgattttcctctcagtcgggtactccacctgccactggtgccacatgatggaagaggagtccttccagaatgaggagattggccgcctgctcagtgaggactttgtgagtgtgaaggtagaccgtgaggagcggcctgacgtggacaaggtgtacatgacgttcgtgcaggccaccagcagcggcgggggctggcccatgaatgtgtggctgactcccaacctccagccctttgtcgggggcacctatttccctcctgaggatggcttgacccgagtcggcttccgcacagtgttgctgagaatacgagaacagtggaaacagaacaagaacaccctgctagaaaatagccagcgtgtcaccactgccctgctggcccgatcagagatcagcgtgggtgaccgccagctgccgccctctgccgccaccgtgaacaatcgctgcttccagcagctggatgagggctatgatgaggaatacggtggcttcgctgaggcccccaagtttcccacgccggtgatcctgagcttcctgttctcctactggctcagccatcgactgactcaggatggctctcgggcccagcagatggccttgcataccctgaaaatgatggctaacgggggcatccgggaccatgtggggcagggctttcaccgctactccacagaccgccagtggcacgtccctcactttgagaagatgctctatgaccaggcacagctcgctgtggcctattcgcaggccttccagctctctggtgatgaattctactctgacgtggccaaaggcatcctgcagtacgtggctcggagcctgagccaccggtccggaggcttctatagcgcagaagatgcagactcgcccccagagcggggccagcggcccaaagagggcgcctactatgtgtggacggtcaaagaggttcagcagctcctcccggagcctgtgttgggtgccaccgagccgctgacctcaggccagctcctcatgaagcactacggcctcacagaggctggtaacatcagccccagtcaggaccccaagggggagctgcagggccagaatgtgctgaccgtccggtactcgctggagctgactgctgcccgctttggcttggatgtggaggccgtgcggaccttgctcaattcagggctggagaagctcttccaggcccggaagcatcggcccaagccgcacctggacagcaagatgctggctgcctggaatggtggggcagcacacctgagaccgagcctgtctgcttgatggtgtcaggctatgctgtgactggggctgtcctgggccaagacaggctgatcaactatgccaccaatggtgccaagttcctgaagcggcacatgtttgatgtggccagtggccgcctgatgcggacctgctacaccggccctggggggactgtggagcacagcaacccaccctgctggggcttcctggaggactacgccttcgtggtgcggggcctgctggacctgtatgaggcctcacaggagagtgcgtggctcgagtgggctctgcggctgcaggacacacaggacaagctcttttgggactcccagggtggcggctacttctgcagtgaggctgagctgggggctggcctgcccctgcgtctgaaggacgaccaggatggagcagagcccagcgccaattccgtgtcagcccacaacctgctccggctgcatggcttcacgggccacaaggactggatggacaagtgtgtgtgcctattgaccgccttttccgagcgcatgcgtcgtgtcccggtggcgttgcccgagatggtccgcgccctctcagcccagcagcagaccctcaagcagatcgtgatctgtggagaccgtcaggccaaggacaccaaggccctggtgcagtgcgtccactctgtctacattcctaacaaggtgctgattctggctgatggggacccctcgagcttcctgtcccgccagctgcctttcctgagtaccctccgacggttggaagaccaggccactgcatatgtgtgtgagaatcaagcctgctcagtgcccatcactgatccctgcgaattacgaaaactactacatccatgactgccccaacccccttggggtggggcagaaggtgaagcatcccaactgactagagactcaggccctgcagggccctatagaacctgtggccatccctgagcaccctgccaccaggtgacctcggccatactcactgccccccttgggcacccactcaccctagaataaacttaacagtgtcccgtggtaa

SEQ ID NO: 185638 - DNA, 2587 bp, Homo sapiens
  Payload ID: 16558
  Gene Symbol: SPATA20
  Gene Name: spermatogenesis associated 20
  ENST ID: ENST00000634597
  CDS Start-End: 37-2397
gaggttgggggagactaacctggcaaggagcccccaatgagccacctctcctcaccccccaaaaaacataagggggagcacaaaggccacagtctcccccatggttcagaaaggggtagctcctcccgggacaaggaccgaagtgcgacggtcagtagttcagtgcccatgcctgctggagggaaaggaagccatccttcatctacaccccagagggtccccaaccgcctgatccacgagaagtcaccatacctcctacaacatgcctacaatcctgtggactggtacccctggggacaggaagccttcgacaaggccaggaaggaaaacaagccgattttcctctcagtcgggtactccacctgccactggtgccacatgatggaagaggagtccttccagaatgaggagattggccgcctgctcagtgaggactttgtgagtgtgaaggtagaccgtgaggagcggcctgacgtggacaaggtgtacatgacgttcgtgcaggccaccagcagcggcgggggctggcccatgaatgtgtggctgactcccaacctccagccctttgtcgggggcacctatttccctcctgaggatggcttgacccgagtcggcttccgcacagtgttgctgagaatacgagaacagtggaaacagaacaagaacaccctgctagaaaatagccagcgtgtcaccactgccctgctggcccgatcagagatcagcgtgggtgaccgccagctgccgccctctgccgccaccgtgaacaatcgctgcttccagcagctggatgagggctatgatgaggaatacggtggcttcgctgaggcccccaagtttcccacgccggtgatcctgagcttcctgttctcctactggctcagccatcgactgactcaggatggctctcgggcccagcagatggccttgcataccctgaaaatgatggctaacgggggcatccgggaccatgtggggcagggctttcaccgctactccacagaccgccagtggcacgtccctcactttgagaagatgctctatgaccaggcacagctcgctgtggcctattcgcaggccttccagctctctggtgatgaattctactctgacgtggccaaaggcatcctgcagtacgtggctcggagcctgagccaccggtccggaggcttctatagcgcagaagatgcagactcgcccccagagcggggccagcggcccaaagagggcgcctactatgtgtggacggtcaaagaggttcagcagctcctcccggagcctgtgttgggtgccaccgagccgctgacctcaggccagctcctcatgaagcactacggcctcacagaggctggtaacatcagccccagtcaggaccccaagggggagctgcagggccagaatgtgctgaccgtccggtactcgctggagctgactgctgcccgctttggcttggatgtggaggccgtgcggaccttgctcaattcagggctggagaagctcttccaggcccggaagcatcggcccaagccgcacctggacagcaagatgctggctgcctggaatggcttgatggtgtcaggctatgctgtgactggggctgtcctgggccaagacaggctgatcaactatgccaccaatggtgccaagttcctgaagcggcacatgtttgatgtggccagtggccgcctgatgcggacctgctacaccggccctggggggactgtggagcacagcaacccaccctgctggggcttcctggaggactacgccttcgtggtgcggggcctgctggacctgtatgaggcctcacaggagagtgcgtggctcgagtgggctctgcggctgcaggacacacaggacaagctcttttgggactcccagggtggcggctacttctgcagtgaggctgagctgggggctggcctgcccctgcgtctgaaggacgaccaggatggagcagagcccagcgccaattccgtgtcagcccacaacctgctccggctgcatggcttcacgggccacaaggactggatggacaagtgtgtgtgcctattgaccgccttttccgagcgcatgcgtcgtgtcccggtggcgttgcccgagatggtccgcgccctctcagcccagcagcagaccctcaagcagatcgtgatctgtggagaccgtcaggccaaggacaccaaggccctggtgcagtgcgtccactctgtctacattcctaacaaggtgctgattctggctgatggggacccctcgagcttcctgtcccgccagctgcctttcctgagtaccctccgacggttggaagaccaggccactgcatatgtgtgtgagaatcaagcctgctcagtgcccatcactgatccctgcgaattacgaaaactactacatccatgactgccccaacccccttggggtggggcagaaggtgaagcatcccaactgactagagactcaggccctgcagggccctatagaacctgtggccatccctgagcaccctgccaccaggtgacctcggccatactcactgccccccttgggcacccactcaccctagaataaacttaacagtgtcccgtggtaa

SEQ ID NO: 185639 - DNA, 2015 bp, Homo sapiens
  Payload ID: 16559
  Gene Symbol: SPATA21
  Gene Name: spermatogenesis associated 21
  Uniprot ID: Q7Z572
  ENST ID: ENST00000335496
  CDS Start-End: 484-1893
actgaaccagtgacaagctgggggaaatgacactgtccagtagttggaggtcacacagccccttgccttattctcaaaccctaaccacatggctggatattcctgaaatgcattcctaaacctctgctgctgagaataattggacctgccatctattcccagtttaactgccctgtataccaaacaaatccaattcaagccaacaggcaaagtataggctcagacagagcccatcctatgtgcaaggcggtgagcaggggtggaaaatctcactgtgactcatccagctgatttctgggctgaacccagacttcacagggctgttaggagaatactgtttacaaaggtttccagcacatggaaggttcctccgtggatgctggcgggcctgccatgatttaaagtggaagaagcaccatcaagatcttcaaggagcacactaggtgatgcccctcacttggcacccgtgttggcgctggcatcatggacaatagaaacacccagatgtacacggaggaggaaaagacagtcaaccccttcctgccatccacgcctggacctaaaaaagcaaaaggagggggtgaggctgtggagacccacccagcaccggggcctcttcctccaccagaggtgagggacattggagagaggcgggagccagaccgtgcgcagcagcagcctcagaagcccgcggtggctgcagggacacagagcctcgggaacttccggcagggcttcatgaagtgcttgctggaggtggagaaaatggaggcctcccatcggagagcctcgaaggcccggtcccagacagcccagaagtcgcccaggaccctgaccccggtgcccacctcagctccaagcctgcctcagacccctgcctcggtccctgccagcggcccatcgtgggcccggctgccagctcctgggccagaacctgcccccatgggagccccggtccccacctccatgccttgccctgtcctgctgggccctgccctggacctgggctggagaaggatggaactcttgcaccagagcagcgagagaaccctgagctacgccaaggcgcggcaggagccggaagagcagagcctccaaaagctttatcaaaaccgggagaagtccgaggagcaactgaccctgaagcaagaggaagccttccgcagctactttgagatcttcaatggtcctggtgaggtggatgcacagagcctgaagaatatcctgctcctaatgggcttctctgtgacgctggcccaggtggaggacgccctgatgagtgctgatgtcaatggagatggtcgtgtggacttcaaagacttcttggctgtgatgacagacaccaggcgcttcttctgctctgtggaacagaacgccctgtcggacatggctccccacaacccccacactctactctttgagatcctgtccctgctggtagagatgctggccttaccagaggcagtcttagaggaaatcacaaactactaccagaaaaagctgaaggaaggcacctgcaaggcccaggagatggaagcggccgtaggccggctgcggttgcagaagcttccctacaacccccagcaagaagagagctcagaagttccagaacgaaaggtcctcagtatcctgagccggctgaagcagcagaactatgctcccaacctgcagagcccctatgcccaggtgccctgcatcctgctctgcccacagctggacaagaagatggtccgtaggcagccgagcaaccactatgcactagaccagtgcacaccccctggcctggatcctgacatccgcagccccttcttccagtcaggatctcaaggaaacagggaacacaactctgacagcagaaagtggctcagctctgtgccagctcgaacccactgaccctctggaggcctgactctaggcagctgctcaaggcctgtagacagatgggccaccaggcaggagctgctgctgggatttgcttttgtggcctggtgagctaataaacaccaataacttca

SEQ ID NO: 185640 - DNA, 1136 bp, Homo sapiens
  Payload ID: 16559
  Gene Symbol: SPATA21
  Gene Name: spermatogenesis associated 21
  ENST ID: ENST00000375577
  CDS Start-End: 341-943
agtgacaagctgggggaaatgacactgtccagtagttggaggtcacacagccccttgccttattctcaaaccctaaccacatggctggatattcctgaaatgcattcctaaacctctgctgctgagaataattggacctgccatctattcccagtttaactgccctgtataccaaacaaatccaattcaagccaacaggcaaagtataggctcagacagagcccatcctatgtgcaaggcggtgagcaggggtggaaaatctcactgtgactcatccagctgatttctggagcacactaggtgatgcccctcacttggcacccgtgttggcgctggcatcatggacaatagaaacacccagatgtacacggagggtagaaccaaggctccagggacgcagccaagtcctggcctgaggatcaccataaagagggctggtgttgagcccatcataccaggagtcagcaaggtcatgtttccggatgcttcggaagtgggcagcaagaagcacctctcatcagcttcacgagggccagagaaggggcccagactcagagatgcatttgagaaggggccttcagagctcagaatccaggagcaggggcctccagcaagaccagggaagaaacagccctcttgggtcccccaggaagggtcccaggagctgcaagcaggccaggatcagagtgagctggggttgctgccttcctgggttcctgaagtacctgaagggctgcagcagctgggctccggaaaggagatcaagggccagcaggggaggcaacggaaccggggaatcggggaggatcagcctcctgagagctgccaggccgggcatggtggctcacgcctgttaatcccagcacttctggaggccgaaggaggcagatcacctgaggtcaagaccagcctggccaacatggtaaaaccctgtctctactaaaaaatataaaattagccgggtgtggtggcacatgcctgtaatcccagctactcaagaggccgaggcaggagaattgcttgaacacgggaggtggaggttgcagtgagctgagatcgcgccattgcactccaaccagggcaatgagagcaaaactccgtctcaaaaaaataaaaataaaataaaaataagtctt

SEQ ID NO: 185641 - DNA, 661 bp, Homo sapiens
  Payload ID: 16559
  Gene Symbol: SPATA21
  Gene Name: spermatogenesis associated 21
  ENST ID: ENST00000491418
  CDS Start-End: 1-483
tctgtggaacagaacgccctgtcggacatggctccccacaacccccacactctactctttgagatcctgtccctgctggtagagatgctggccttaccagaggcagtcttagaggaaatcacaaactactaccagaaaaagctgaaggaaggcacctgcaaggcccaggagatggaagcggccgtaggccggctgcggttgcagaagcttccctacaacccccagcaagaagagagctcagaagttccagaacgaaaggtcctcagtatcctgagccggctgaagcagcagaactatgctcccaacctgcagagcccctatgcccaggtgccctgcatcctgctctgcccacagctggacaagaagatggtccgtaggcagccgagcaaccactatgcactagaccagtgcacaccccctggcctggatcctgacatccgcagccccttcttccagtcaggatctcaaggaaacagggtttaaggaagatggaccatctgcccagttccagcacaaggagcctgggtggaagaaaagcgcttcaagaggacatcgtaggccatgtctgagtaaatgcgcctctgtccccaaactagaacatgattaacatacttggcatgtaatataatactaatagcttttaaaataataccttatatcg

SEQ ID NO: 185642 - DNA, 1773 bp, Homo sapiens
  Payload ID: 16559
  Gene Symbol: SPATA21
  Gene Name: spermatogenesis associated 21
  Uniprot ID: Q7Z572
  ENST ID: ENST00000540400
  CDS Start-End: 335-1675
cctatgtgcaaggcggtgagcaggggtggaaaatctcactgtgactcatccagctgatttctggaagaaacagccctcttgggtcccccaggaagggtcccaggagctgcaagcaggccaggatcagagtgagctggggttgctgccttcctgggttcctgaagtacctgaagggctgcagcagctgggctccggaaaggagatcaagggccagcaggggaggcaacggaaccggggaatcggggaggatcagcctcctgagagctgccaggagggcagacaacaggcatgaacaaagccaagtggtgggaccaggagtaactcactcaagaccatggctcagccgggcgcggtggaacacgcttgtcatcccagcactttgggaggccaaggcggaggatcacttgaggaggtgagggacattggagagaggcgggagccagaccgtgcgcagcagcagcctcagaagcccgcggtggctgcagggacacagagcctcgggaacttccggcagggcttcatgaagtgcttgctggaggtggagaaaatggaggcctcccatcggagagcctcgaaggcccggtcccagacagcccagaagtcgcccaggaccctgaccccggtgcccacctcagctccaagcctgcctcagacccctgcctcggtccctgccagcggcccatcgtgggcccggctgccagctcctgggccagaacctgcccccatgggagccccggtccccacctccatgccttgccctgtcctgctgggccctgccctggacctgggctggagaaggatggaactcttgcaccagagcagcgagagaaccctgagctacgccaaggcgcggcaggagccggaagagcagagcctccaaaagctttatcaaaaccgggagaagtccgaggagcaactgaccctgaagcaagaggaagccttccgcagctactttgagatcttcaatggtcctggtgaggtggatgcacagagcctgaagaatatcctgctcctaatgggcttctctgtgacgctggcccaggtggaggacgccctgatgagtgctgatgtcaatggagatggtcgtgtggacttcaaagacttcttggctgtgatgacagacaccaggcgcttcttctgctctgtggaacagaacgccctgtcggacatggctccccacaacccccacactctactctttgagatcctgtccctgctggtagagatgctggccttaccagaggcagtcttagaggaaatcacaaactactaccagaaaaagctgaaggaaggcacctgcaaggcccaggagatggaagcggccgtaggccggctgcggttgcagaagcttccctacaacccccagcaagaagagagctcagaagttccagaacgaaaggtcctcagtatcctgagccggctgaagcagcagaactatgctcccaacctgcagagcccctatgcccaggtgccctgcatcctgctctgcccacagctggacaagaagatggtccgtaggcagccgagcaaccactatgcactagaccagtgcacaccccctggcctggatcctgacatccgcagccccttcttccagtcaggatctcaaggaaacagggaacacaactctgacagcagaaagtggctcagctctgtgccagctcgaacccactgaccctctggaggcctgactctaggcagctgctcaaggcctgtagacagatgggccaccaggcaggagctgctgctgggatttgcttttgtggcctggtg

SEQ ID NO: 185643 - DNA, 603 bp, Homo sapiens
  Payload ID: 16559
  Gene Symbol: SPATA21
  Gene Name: spermatogenesis associated 21
  ENST ID: ENST00000612240
  CDS Start-End: 1-603
atggacaatagaaacacccagatgtacacggagggtagaaccaaggctccagggacgcagccaagtcctggcctgaggatcaccataaagagggctggtgttgagcccatcataccaggagtcagcaaggtcatgtttccggatgcttcggaagtgggcagcaagaagcacctctcatcagcttcacgagggccagagaaggggcccagactcagagatgcatttgagaaggggccttcagagctcagaatccaggagcaggggcctccagcaagaccagggaagaaacagccctcttgggtcccccaggaagggtcccaggagctgcaagcaggccaggatcagagtgagctggggttgctgccttcctgggttcctgaagtacctgaagggctgcagcagctgggctccggaaaggagatcaagggccagcaggggaggcaacggaaccggggaatcggggaggatcagcctcctgagagctgccaggccgggcatggtggctcacgcctgttaatcccagcacttctggaggccgaaggaggcagatcacctgaggtcaagaccagcctggccaacatggtaaaaccctgtctctactaa

SEQ ID NO: 185644 - DNA, 1280 bp, Homo sapiens
  Payload ID: 16560
  Gene Symbol: SPATA22
  Gene Name: spermatogenesis associated 22
  Uniprot ID: Q8NHS9
  ENST ID: ENST00000268981
  CDS Start-End: 383-1192
gaaactgagggcgaaagttgtgtgtcgtgttggcaggagggcctagaagggaaagactgtgcgttgataccaaactgcccccactccgtgggcgggtcaggagaggcctttggaagagcgtctcaactcggactggagcctcttctctcccaccgcggtcaggagccaaaacaggccgccatttgaggccgtggtttttgtgggtggtgtgtgtgtgtgtgcgtgcagattgagcacactttttgcacaccaatgccaccaaccccattactaacgccacttaggtccatttgggagctgggattgggggtctagtgggacaatgtcatattataaatttggaatgctgaatagaaaattatagattttgatattgaaggaaatgaagcgaagcctaaatgaaaattcagctcgaagtacagcaggctgtttgcctgttccgttgttcaatcagaaaaagaggaacagacagccattaacttctaatccacttaaagatgattcaggtatcagtaccccttctgacaattatgattttcctcctctacctacagattgggcctgggaagctgtgaatccagagttggctcctgtaatgaaaacagtggacaccgggcaaataccacattcagtttctcgtcctctgagaagtcaagattctgtctttaactctattcaatcaaatactggaagaagccagggtggttggagctacagagatggtaacaaaaataccagcttgaaaacttggaataaaaatgattttaagcctcaatgtaaacgaacaaacttagtggcaaatgatggaaaaaattcttgtccagtgagttcgggagctcaacaacaaaaacaattaagaatacctgaacctcctaacttatctcgcaacaaagaaaccgagctactcagacaaacacattcatcaaaaatatctggctgcacaatgagagggctagacaaaaacagtgcactacagacacttaagcccaattttcaacaaaatcaatataagaaacaaatgttggatgatattccagaagacaacaccctgaaggaaacctcattgtatcagttacagtttaaggaaaaagctagttctttaagaattatttctgcagttattgaaagcatgaagtattggcgtgaacatgcacagaaaactgtacttctttttgaagtattaggatcgtgaacttccgagactgattagaggccgagttcatagatgtgttggcaactatgaccagaaaaagaacattttccaatgtgtttctgtcaga

SEQ ID NO: 185645 - DNA, 1216 bp, Homo sapiens
  Payload ID: 16560
  Gene Symbol: SPATA22
  Gene Name: spermatogenesis associated 22
  Uniprot ID: Q8NHS9
  ENST ID: ENST00000355380
  CDS Start-End: 126-1088
gcgggaagggcggcggttgctgacggggccgcctggacgacggttgacggaggtctagtgggacaatgtcatattataaatttggaatgctgaatagaaaattatagattttgatattgaaggaaatgaagcgaagcctaaatgaaaattcagctcgaagtacagcagattgggcctgggaagctgtgaatccagagttggctcctgtaatgaaaacagtggacaccgggcaaataccacattcagtttctcgtcctctgagaagtcaagattctgtctttaactctattcaatcaaatactggaagaagccagggtggttggagctacagagatggtaacaaaaataccagcttgaaaacttggaataaaaatgattttaagcctcaatgtaaacgaacaaacttagtggcaaatgatggaaaaaattcttgtccagtgagttcgggagctcaacaacaaaaacaattaagaatacctgaacctcctaacttatctcgcaacaaagaaaccgagctactcagacaaacacattcatcaaaaatatctggctgcacaatgagagggctagacaaaaacagtgcactacagacacttaagcccaattttcaacaaaatcaatataagaaacaaatgttggatgatattccagaagacaacaccctgaaggaaacctcattgtatcagttacagtttaaggaaaaagctagttctttaagaattatttctgcagttattgaaagcatgaagtattggcgtgaacatgcacagaaaactgtacttctttttgaagtattagctgttcttgattcagctgttacacctggcccatattattcgaagacttttcttatgagggatgggaaaaatactctgccttgtgtcttttatgaaatcgatcgtgaacttccgagactgattagaggccgagttcatagatgtgttggcaactatgaccagaaaaagaacattttccaatgtgtttctgtcagaccggcgtctgtttctgaacaaaaaactttccaggcatttgtcaaaattgcagatgttgagatgcagtattatattaatgtgatgaatgaaacttaagtagtgataaaaggaagtttagcataaattatagcagttttctgttattgcttaatttaccatctccatagttttatagctactattgtatttcacttgttgaattaaagtatttgaattcttttaaa

SEQ ID NO: 185646 - DNA, 1457 bp, Homo sapiens
  Payload ID: 16560
  Gene Symbol: SPATA22
  Gene Name: spermatogenesis associated 22
  Uniprot ID: Q8NHS9
  ENST ID: ENST00000397168
  CDS Start-End: 238-1329
ggcgagggaaactgagggcgaaagttgtgtgtcgtgttggcaggagggcctagaagggaaagactgtgcgttgataccaaactgcccccactccgtgggcgggtcaggagaggcctttggaagagcgtctcaactcggactggagcctcttctctcccaccgcggtctagtgggacaatgtcatattataaatttggaatgctgaatagaaaattatagattttgatattgaaggaaatgaagcgaagcctaaatgaaaattcagctcgaagtacagcaggctgtttgcctgttccgttgttcaatcagaaaaagaggaacagacagccattaacttctaatccacttaaagatgattcaggtatcagtaccccttctgacaattatgattttcctcctctacctacagattgggcctgggaagctgtgaatccagagttggctcctgtaatgaaaacagtggacaccgggcaaataccacattcagtttctcgtcctctgagaagtcaagattctgtctttaactctattcaatcaaatactggaagaagccagggtggttggagctacagagatggtaacaaaaataccagcttgaaaacttggaataaaaatgattttaagcctcaatgtaaacgaacaaacttagtggcaaatgatggaaaaaattcttgtccagtgagttcgggagctcaacaacaaaaacaattaagaatacctgaacctcctaacttatctcgcaacaaagaaaccgagctactcagacaaacacattcatcaaaaatatctggctgcacaatgagagggctagacaaaaacagtgcactacagacacttaagcccaattttcaacaaaatcaatataagaaacaaatgttggatgatattccagaagacaacaccctgaaggaaacctcattgtatcagttacagtttaaggaaaaagctagttctttaagaattatttctgcagttattgaaagcatgaagtattggcgtgaacatgcacagaaaactgtacttctttttgaagtattagctgttcttgattcagctgttacacctggcccatattattcgaagacttttcttatgagggatgggaaaaatactctgccttgtgtcttttatgaaatcgatcgtgaacttccgagactgattagaggccgagttcatagatgtgttggcaactatgaccagaaaaagaacattttccaatgtgtttctgtcagaccggcgtctgtttctgaacaaaaaactttccaggcatttgtcaaaattgcagatgttgagatgcagtattatattaatgtgatgaatgaaacttaagtagtgataaaaggaagtttagcataaattatagcagttttctgttattgcttaatttaccatctccatagttttatagctactattgtatttcacttgttgaattaaagtatttgaattcttttaaa

SEQ ID NO: 185647 - DNA, 1683 bp, Homo sapiens
  Payload ID: 16560
  Gene Symbol: SPATA22
  Gene Name: spermatogenesis associated 22
  ENST ID: ENST00000541913
  CDS Start-End: 515-1558
gtgcagagaggctttgagggatggtggagtccggctctgctggcctagaagcagagtgcaccctcgtgctcagtgctcagtgggtgtctgaactgaggggcagttgtcaatttgtctgagtgggaaacatcctggattttgttacttggcaaacagctggtgtaaacctacagccagcagcagtctggagcctgggagcctcctgaagtcccgggtgaagcctctggttttaccaattgcaggtcggcttggctgggagagatggatggcgggaaaggggcagcagtcttgaggagcagggagaggagtctttcctcctgccagcttcccccgtcagccccaaccccagcccacacattgtaccatctcttctgctgtgactgggttgcctgaatttgtgggagacccgtgatcccatcccagagtgtgcgggggacggaggtctagtgggacaatgtcatattataaatttggaatgctgaatagaaaattatagattttgatattgaaggaaatgaagcgaagcctaaatgaaaattcagctcgaagtacagcaggctgtttgcctgttccgttgttcaatcagaaaaagaggaacagacagccattaacttctaatccacttaaagatgattcagattgggcctgggaagctgtgaatccagagttggctcctgtaatgaaaacagtggacaccgggcaaataccacattcagtttctcgtcctctgagaagtcaagattctgtctttaactctattcaatcaaatactggaagaagccagggtggttggagctacagagatggtaacaaaaataccagcttgaaaacttggaataaaaatgattttaagcctcaatgtaaacgaacaaacttagtggcaaatgatggaaaaaattcttgtccagtgagttcgggagctcaacaacaaaaacaattaagaatacctgaacctcctaacttatctcgcaacaaagaaaccgagctactcagacaaacacattcatcaaaaatatctggctgcacaatgagagggctagacaaaaacagtgcactacagacacttaagcccaattttcaacaaaatcaatataagaaacaaatgttggatgatattccagaagacaacaccctgaaggaaacctcattgtatcagttacagtttaaggaaaaagctagttctttaagaattatttctgcagttattgaaagcatgaagtattggcgtgaacatgcacagaaaactgtacttctttttgaagtattagctgttcttgattcagctgttacacctggcccatattattcgaagacttttcttatgagggatgggaaaaatactctgccttgtgtcttttatgaaatcgatcgtgaacttccgagactgattagaggccgagttcatagatgtgttggcaactatgaccagaaaaagaacattttccaatgtgtttctgtcagaccggcgtctgtttctgaacaaaaaactttccaggcatttgtcaaaattgcagatgttgagatgcagtattatattaatgtgatgaatgaaacttaagtagtgataaaaggaagtttagcataaattatagcagttttctgttattgcttaatttaccatctccatagttttatagctactattgtatttcacttgttgaattaaagtatttgaattctttt

SEQ ID NO: 185648 - DNA, 577 bp, Homo sapiens
  Payload ID: 16560
  Gene Symbol: SPATA22
  Gene Name: spermatogenesis associated 22
  ENST ID: ENST00000571607
  CDS Start-End: 323-577
gtgtcctatctagattcttccactgacttgctctatagcaatgcacaagctttttgaacttcttttcccttcgagttccctaagtttcaaagtttatattttgtgacttttgacctgaattgagatcctagatccgccatctggaggaatcggctgtttgcctgttccgttgttcaatcagaaaaagaggaacagacagccattaacttctaatccacttaaagatgattcaggtatcagtaccccttctgacaattatgattttcctcctctacctacagattgggcctgggaagctgtgaatccagagttggctcctgtaatgaaaacagtggacaccgggcaaataccacattcagtttctcgtcctctgagaagtcaagattctgtctttaactctattcaatcaaatactggaagaagccagggtggttggagctacagagatggtaacaaaaataccagcttgaaaacttggaataaaaatgattttaagcctcaatgtaaacgaacaaacttagtggcaaatgatggaaaaaattcttgtccagtgagttcgggagctcaacaacaaaaa

SEQ ID NO: 185649 - DNA, 240 bp, Homo sapiens
  Payload ID: 16560
  Gene Symbol: SPATA22
  Gene Name: spermatogenesis associated 22
  ENST ID: ENST00000570318
  CDS Start-End: 232-240
tgtctgaactgaggggcagttgtcaatttgtctgagtgggaaacatcctggattttgttacttggcaaacagctggtgtaaacctacagccagcagcagtctggagcctgggagcctcctgaagtcccgggtgaagcctctggttttaccaattgcaggtctagtgggacaatgtcatattataaatttggaatgctgaatagaaaattatagattttgatattgaaggaaatgaagcga

SEQ ID NO: 185650 - DNA, 1374 bp, Homo sapiens
  Payload ID: 16560
  Gene Symbol: SPATA22
  Gene Name: spermatogenesis associated 22
  Uniprot ID: Q8NHS9
  ENST ID: ENST00000575375
  CDS Start-End: 155-1246
acagcctgattcccgcgctttcttcgcgggcgggaagggcggcggttgctgacggggccgcctggacgacggttgacggaggtctagtgggacaatgtcatattataaatttggaatgctgaatagaaaattatagattttgatattgaaggaaatgaagcgaagcctaaatgaaaattcagctcgaagtacagcaggctgtttgcctgttccgttgttcaatcagaaaaagaggaacagacagccattaacttctaatccacttaaagatgattcaggtatcagtaccccttctgacaattatgattttcctcctctacctacagattgggcctgggaagctgtgaatccagagttggctcctgtaatgaaaacagtggacaccgggcaaataccacattcagtttctcgtcctctgagaagtcaagattctgtctttaactctattcaatcaaatactggaagaagccagggtggttggagctacagagatggtaacaaaaataccagcttgaaaacttggaataaaaatgattttaagcctcaatgtaaacgaacaaacttagtggcaaatgatggaaaaaattcttgtccagtgagttcgggagctcaacaacaaaaacaattaagaatacctgaacctcctaacttatctcgcaacaaagaaaccgagctactcagacaaacacattcatcaaaaatatctggctgcacaatgagagggctagacaaaaacagtgcactacagacacttaagcccaattttcaacaaaatcaatataagaaacaaatgttggatgatattccagaagacaacaccctgaaggaaacctcattgtatcagttacagtttaaggaaaaagctagttctttaagaattatttctgcagttattgaaagcatgaagtattggcgtgaacatgcacagaaaactgtacttctttttgaagtattagctgttcttgattcagctgttacacctggcccatattattcgaagacttttcttatgagggatgggaaaaatactctgccttgtgtcttttatgaaatcgatcgtgaacttccgagactgattagaggccgagttcatagatgtgttggcaactatgaccagaaaaagaacattttccaatgtgtttctgtcagaccggcgtctgtttctgaacaaaaaactttccaggcatttgtcaaaattgcagatgttgagatgcagtattatattaatgtgatgaatgaaacttaagtagtgataaaaggaagtttagcataaattatagcagttttctgttattgcttaatttaccatctccatagttttatagctactattgtatttcacttgttgaattaaagtatttgaattcttttaaa

SEQ ID NO: 185651 - DNA, 834 bp, Homo sapiens
  Payload ID: 16560
  Gene Symbol: SPATA22
  Gene Name: spermatogenesis associated 22
  ENST ID: ENST00000571553
  CDS Start-End: 330-834
gcgggcgggaagggcggcggttgctgacggggccgcctggacgacggttgacggaggcgagggaaactgagggcgaaagttgtgtgtcgtgttggcaggagggcctagaagggaaagactgtctagtgggacaatgtcatattataaatttggaatgctgaatagaaaattatagattttgatattgaaggaaatgaagcgaagcctaaatgaaaattcagctcgaagtacagcagaaaaagaggaacagacagccattaacttctaatccacttaaagatgattcagattgggcctgggaagctgtgaatccagagttggctcctgtaatgaaaacagtggacaccgggcaaataccacattcagtttctcgtcctctgagaagtcaagattctgtctttaactctattcaatcaaatactggaagaagccagggtggttggagctacagagatggtaacaaaaataccagcttgaaaacttggaataaaaatgattttaagcctcaatgtaaacgaacaaacttagtggcaaatgatggaaaaaattcttgtccagtgagttcgggagctcaacaacaaaaacaattaagaatacctgaacctcctaacttatctcgcaacaaagaaaccgagctactcagacaaacacattcatcaaaaatatctggctgcacaatgagagggctagacaaaaacagtgcactacagacacttaagcccaattttcaacaaaatcaatataagaaacaaatgttggatgatattccagaagacaacaccctgaaggaaacctcattgtatcagttacagtttaaggaaaaagctagttctt

SEQ ID NO: 185652 - DNA, 1704 bp, Homo sapiens
  Payload ID: 16560
  Gene Symbol: SPATA22
  Gene Name: spermatogenesis associated 22
  Uniprot ID: Q8NHS9
  ENST ID: ENST00000573128
  CDS Start-End: 485-1576
aacaaacggatgtctggaccctaagggccagggggtgaggggaagtggggcacactttttagacgatggtggggctgaggccggttgggcaggagatctgcctctgtctctccagtcacaggacagtctcctttcctctctgggcaaaactctaaggagctggagccatccctgggtccacagtgtgagaacgccaaggaagagcgttaacgtcatcgcgcccggccaagggcggccaggcaggcagcgaagatgccatcgcgccgaggtggcggccactgcgcctgcgcggtccacggcgcctgcgaacagcctgattcccgcgctttcttcgcgggcgggaagggcggcggttgctgacggggccgcctggacgacggttgacggaggcgagggaaactgagggcgaaagtctagtgggacaatgtcatattataaatttggaatgctgaatagaaaattatagattttgatattgaaggaaatgaagcgaagcctaaatgaaaattcagctcgaagtacagcaggctgtttgcctgttccgttgttcaatcagaaaaagaggaacagacagccattaacttctaatccacttaaagatgattcaggtatcagtaccccttctgacaattatgattttcctcctctacctacagattgggcctgggaagctgtgaatccagagttggctcctgtaatgaaaacagtggacaccgggcaaataccacattcagtttctcgtcctctgagaagtcaagattctgtctttaactctattcaatcaaatactggaagaagccagggtggttggagctacagagatggtaacaaaaataccagcttgaaaacttggaataaaaatgattttaagcctcaatgtaaacgaacaaacttagtggcaaatgatggaaaaaattcttgtccagtgagttcgggagctcaacaacaaaaacaattaagaatacctgaacctcctaacttatctcgcaacaaagaaaccgagctactcagacaaacacattcatcaaaaatatctggctgcacaatgagagggctagacaaaaacagtgcactacagacacttaagcccaattttcaacaaaatcaatataagaaacaaatgttggatgatattccagaagacaacaccctgaaggaaacctcattgtatcagttacagtttaaggaaaaagctagttctttaagaattatttctgcagttattgaaagcatgaagtattggcgtgaacatgcacagaaaactgtacttctttttgaagtattagctgttcttgattcagctgttacacctggcccatattattcgaagacttttcttatgagggatgggaaaaatactctgccttgtgtcttttatgaaatcgatcgtgaacttccgagactgattagaggccgagttcatagatgtgttggcaactatgaccagaaaaagaacattttccaatgtgtttctgtcagaccggcgtctgtttctgaacaaaaaactttccaggcatttgtcaaaattgcagatgttgagatgcagtattatattaatgtgatgaatgaaacttaagtagtgataaaaggaagtttagcataaattatagcagttttctgttattgcttaatttaccatctccatagttttatagctactattgtatttcacttgttgaattaaagtatttgaattcttttaaa

SEQ ID NO: 185653 - DNA, 1399 bp, Homo sapiens
  Payload ID: 16560
  Gene Symbol: SPATA22
  Gene Name: spermatogenesis associated 22
  Uniprot ID: Q8NHS9
  ENST ID: ENST00000572969
  CDS Start-End: 180-1271
cggcggttgctgacggggccgcctggacgacggttgacggaggcgagggaaactgagggcgaaagttgtgtgtcgtgttggcaggagggcctagaagggaaagactgtctagtgggacaatgtcatattataaatttggaatgctgaatagaaaattatagattttgatattgaaggaaatgaagcgaagcctaaatgaaaattcagctcgaagtacagcaggctgtttgcctgttccgttgttcaatcagaaaaagaggaacagacagccattaacttctaatccacttaaagatgattcaggtatcagtaccccttctgacaattatgattttcctcctctacctacagattgggcctgggaagctgtgaatccagagttggctcctgtaatgaaaacagtggacaccgggcaaataccacattcagtttctcgtcctctgagaagtcaagattctgtctttaactctattcaatcaaatactggaagaagccagggtggttggagctacagagatggtaacaaaaataccagcttgaaaacttggaataaaaatgattttaagcctcaatgtaaacgaacaaacttagtggcaaatgatggaaaaaattcttgtccagtgagttcgggagctcaacaacaaaaacaattaagaatacctgaacctcctaacttatctcgcaacaaagaaaccgagctactcagacaaacacattcatcaaaaatatctggctgcacaatgagagggctagacaaaaacagtgcactacagacacttaagcccaattttcaacaaaatcaatataagaaacaaatgttggatgatattccagaagacaacaccctgaaggaaacctcattgtatcagttacagtttaaggaaaaagctagttctttaagaattatttctgcagttattgaaagcatgaagtattggcgtgaacatgcacagaaaactgtacttctttttgaagtattagctgttcttgattcagctgttacacctggcccatattattcgaagacttttcttatgagggatgggaaaaatactctgccttgtgtcttttatgaaatcgatcgtgaacttccgagactgattagaggccgagttcatagatgtgttggcaactatgaccagaaaaagaacattttccaatgtgtttctgtcagaccggcgtctgtttctgaacaaaaaactttccaggcatttgtcaaaattgcagatgttgagatgcagtattatattaatgtgatgaatgaaacttaagtagtgataaaaggaagtttagcataaattatagcagttttctgttattgcttaatttaccatctccatagttttatagctactattgtatttcacttgttgaattaaagtatttgaattcttttaaa

SEQ ID NO: 185654 - DNA, 818 bp, Homo sapiens
  Payload ID: 16560
  Gene Symbol: SPATA22
  Gene Name: spermatogenesis associated 22
  ENST ID: ENST00000574457
  CDS Start-End: 670-818
ctcccgcaagctcccgcagccccggcgctgcctcgctgacggctctccgccttccatggccgccatctgaacctgggcttcagctctgtccccagcctcccggggactcagattccctgaccctgatccgacccagaaattgagccagacacctcgggtggccttcgagtcaatctctgggcacactctgggtggccaccagcatctaacaaacggatgtctggaccctaagggccagggggtgaggggaagtggggcacactttttagacgatggtggggctgaggccggttgggcaggagatctgcctctgtctctccagtcacaggacagtctcctttcctctctgggcaaaactctaaggagctggagccatccctgggtccacagtgtgagaacgccaaggaagagcgttaacgtcatcgcgcccggccaagggcggccaggcaggcagcgaagatgccatcgcgccgaggtggcggccactgcgcctgcgcggtccacggcgcctgcgaacagcctgattcccgcgctttcttcgcgggcgggaagggcggcggttgctgacggggccgcctggacgacggttgacggaggtctagtgggacaatgtcatattataaatttggaatgctgaatagaaaattatagattttgatattgaaggaaatgaagcgaagcctaaatgaaaattcagctcgaagtacagcaggctgtttgcctgttccgttgttcaatcagaaaaagaggaacagacagccattaacttctaatccacttaaagatgattcagattgggcctgggaagctgtgaatcc

SEQ ID NO: 185655 - DNA, 997 bp, Homo sapiens
  Payload ID: 16560
  Gene Symbol: SPATA22
  Gene Name: spermatogenesis associated 22
  ENST ID: ENST00000572582
  CDS Start-End: 506-997
tctccgccttccatggccgccatctgaacctgggcttcagctctgtccccagcctcccggggactcagattccctgaccctgatccgacccagaaattgagccagacacctcgggtggccttcgagtcaatctctgggcacactctgggtggccaccagcatctaacaaacggatgtctggaccctaagggccagggggtgaggggaagtggggcacactttttagacgatggtggggctgaggccggttgggcaggagatctgcctctgtctctccagtcacaggacagtctcctttcctctctgggcaaaactctaaggagctggagccatccctgggtccacagtgtgagaacgccaaggaagagcgttaacgtcatcgcgcccggccaagggcggccaggcaggcagcgaagatgccatcgcgccgaggtctagtgggacaatgtcatattataaatttggaatgctgaatagaaaattatagattttgatattgaaggaaatgaagcgaagcctaaatgaaaattcagctcgaagtacagcaggctgtttgcctgttccgttgttcaatcagaaaaagaggaacagacagccattaacttctaatccacttaaagatgattcaggtatcagtaccccttctgacaattatgattttcctcctctacctacagattgggcctgggaagctgtgaatccagagttggctcctgtaatgaaaacagtggacaccgggcaaataccacattcagtttctcgtcctctgagaagtcaagattctgtctttaactctattcaatcaaatactggaagaagccagggtggttggagctacagagatggtaacaaaaataccagcttgaaaacttggaataaaaatgattttaagcctcaatgtaaacgaacaaacttagtggcaaatgatggaaaaaattcttgtccagtgagttcgggagctcaacaacaaaaacaattaagaatacctgaacctcct

SEQ ID NO: 185656 - DNA, 672 bp, Homo sapiens
  Payload ID: 16560
  Gene Symbol: SPATA22
  Gene Name: spermatogenesis associated 22
  ENST ID: ENST00000574051
  CDS Start-End: 45-672
gcctaaatgaaaattcagctcgaagtacagcagtataaagacagatggcaaggatgatgagaaccaggggaatgatgatgcataatgaagataatagctgtttgcctgttccgttgttcaatcagaaaaagaggaacagacagccattaacttctaatccacttaaagatgattcagattgggcctgggaagctgtgaatccagagttggctcctgtaatgaaaacagtggacaccgggcaaataccacattcagtttctcgtcctctgagaagtcaagattctgtctttaactctattcaatcaaatactggaagaagccagggtggttggagctacagagatggtaacaaaaataccagcttgaaaacttggaataaaaatgattttaagcctcaatgtaaacgaacaaacttagtggcaaatgatggaaaaaattcttgtccagtgagttcgggagctcaacaacaaaaacaattaagaatacctgaacctcctaacttatctcgcaacaaagaaaccgagctactcagacaaacacattcatcaaaaatatctggctgcacaatgagagggctagacaaaaacagtgcactacagacacttaagcccaattttcaacaaaatcaatataagaaacaaatgttggatgatattccagaagacaacaccc

SEQ ID NO: 185657 - DNA, 566 bp, Homo sapiens
  Payload ID: 16560
  Gene Symbol: SPATA22
  Gene Name: spermatogenesis associated 22
  ENST ID: ENST00000574797
  CDS Start-End: 121-566
agcctgattcccgcgctttcttcgcgggcgggaagggcggcggttgctgacggggccgcctggacgacggttgacggagattgggcctgggaagctgtgaatccagagttggctcctgtaatgaaaacagtggacaccgggcaaataccacattcagtttctcgtcctctgagaagtcaagattctgtctttaactctattcaatcaaatactggaagaagccagggtggttggagctacagagatggtaacaaaaataccagcttgaaaacttggaataaaaatgattttaagcctcaatgtaaacgaacaaacttagtggcaaatgatggaaaaaattcttgtccagtgagttcgggagctcaacaacaaaaacaattaagaatacctgaacctcctaacttatctcgcaacaaagaaaccgagctactcagacaaacacattcatcaaaaatatctggctgcacaatgagagggctagacaaaaacagtgcactacagacacttaagcccaattttcaacaaaatcaatataagaaacaaatgttggatgatattccagaaga

SEQ ID NO: 185658 - DNA, 909 bp, Homo sapiens
  Payload ID: 16561
  Gene Symbol: SPATA24
  Gene Name: spermatogenesis associated 24
  ENST ID: ENST00000302091
  CDS Start-End: 29-909
atttccaactagctggcgggggcggaagatggcgacgcccctcgggtggtcgaaggcggggtcaggatctgtgtgtctcgctttagatcaactgcgggacgtgattgagtctcaggaggaactaatccaccagctgaggaacgtgatggttctccaggacgaaaattttgtcagtaaagaagagttccaggcagtggagaagaagctggtggaagagaaagctgcccatgccaaaaccaaggtcctcctggccaaggaagaggagaagttacagtttgccctcggagaggtagaggtgctatccaagcagctggagaaagagaagctggcctttgaaaaagcgctctccagtgtcaagagcaaagtccttcaggagtccagcaagaaggaccagctcatcaccaagtgcaatgagattgagtctcacattataaagcaagaagatatacttaatggcaaagagaatgagattaaagagttgcagcaagttatcagccagcagaaacagatcttcagcccaccaccagccggctccgttgcaggaatcacatgtctgacttccggatccagaagcagcaggagagctacatggcccaggtgctggaccagaagcataagaaagcctcagggacacgtcaggcccgcagccaccagcatcccagggaaaaataaaatggccgccgctttcctgttctctggctgtaatccccagcctctgccttctctgctctgggagtccccagcctctagcccctgctacttccctccctcttggatagtggtaggggtccacaaggtgggggcttgtagcctaggggaggagctgggtctttgttgtctggtaggcaccaccgcttcctttgggtatttaatcccttcctatataaacagccctggttacccagtaat

SEQ ID NO: 185659 - DNA, 646 bp, Homo sapiens
  Payload ID: 16561
  Gene Symbol: SPATA24
  Gene Name: spermatogenesis associated 24
  Uniprot ID: Q86W54
  ENST ID: ENST00000451821
  CDS Start-End: 8-574
gcggaagatggcgacgcccctcgggtggtcgaaggcggggtcaggatctgtgtgtctcgctttagatcaactgcgggacgtgattgagtctcaggaggaactaatccaccagctgaggaacgtgatggttctccaggacgaaaattttgtcagtaaagaagagttccaggcagtggagaagaagctggtggaagagaaagctgcccatgccaaaaccaaggtcctcctggccaaggaagaggagaagttacagtttgccctcggagaggtagaggtgctatccaagcagctggagaaagagaagctggcctttgaaaaagcgctctccagtgtcaagagcaaagtccttcaggagtccagcaagaaggaccagctcatcaccaagtgcaatggtaggcgggaggcccgtgctctccaccacggttatataaacgggctctttcctaaccacccagtgcctgtgtcaaaggcagggtttcactctaacacctgtccccagctgaggatacaggcaggcccgggtgggccacaccttcgaaaaggccttaagggaccaggcaggccacggaaatgagggaagcagtcggtgtactatattcttcaccgccataaaggaatgggcttgctcccatttttcctgaaacat

SEQ ID NO: 185660 - DNA, 659 bp, Homo sapiens
  Payload ID: 16561
  Gene Symbol: SPATA24
  Gene Name: spermatogenesis associated 24
  Uniprot ID: Q86W54
  ENST ID: ENST00000450845
  CDS Start-End: 9-626
ggcggaagatggcgacgcccctcgggtggtcgaaggcggggtcaggatctgtgtgtctcgctttagatcaactgcgggacgtgattgagtctcaggaggaactaatccaccagctgaggaacgtgatggttctccaggacgaaaattttgtcagtaaagaagagttccaggcagtggagaagaagctggtggaagagaaagctgcccatgccaaaaccaaggtcctcctggccaaggaagaggagaagttacagtttgccctcggagaggtagaggtgctatccaagcagctggagaaagagaagctggcctttgaaaaagcgctctccagtgtcaagagcaaagtccttcaggagtccagcaagaaggaccagctcatcaccaagtgcaatgagattgagtctcacattataaagcaagaagatatacttaatggcaaagagaatgagattaaagagttgcagcaagttatcagccagcagaaacagatcttcaggaatcacatgtctgacttccggatccagaagcagcaggagagctacatggcccaggtgctggaccagaagcataagaaagcctcagggacacgtcaggcccgcagccaccagcatcccagggaaaaataaaatggccgccgctttcctgttctctggctgtaa

SEQ ID NO: 185661 - DNA, 606 bp, Homo sapiens
  Payload ID: 16561
  Gene Symbol: SPATA24
  Gene Name: spermatogenesis associated 24
  ENST ID: ENST00000507779
  CDS Start-End: 1-558
atggcgacgcccctcgggtggtcgaaggcggggtcaggatctgtgtgtctcgctttagatcaactgcgggacgtgattgagtctcaggaggaactaatccaccagctgaggaacgtgatggttctccaggacgaaaattttgtcagtaaagaagagttccaggcagtggagaagaagctggtggaagagaaagctgcccatgccaaaaccaaggtcctcctggccaaggaagaggagaagttacagtttgccctcggagaggtagaggtgctatccaagcagctggagaaagagaagctggcctttgaaaaagctgtcaagagcaaagtccttcaggagtccagcaagaaggaccagctcatcaccaagtgcaatggtaggcgggaggcccgtgctctccaccacggttatataaacgggctctttcctaaccacccagtgcctgtgtcaaaggcagggtttcactctaacacctgtccccagctgaggatacaggcaggcccgggtgggccacaccttcgaaaaggccttaagggaccaggcaggccacggaaatgagggaagcagtcggtgtactatattcttcaccgccataaaggaatgggc

SEQ ID NO: 185662 - DNA, 451 bp, Homo sapiens
  Payload ID: 16561
  Gene Symbol: SPATA24
  Gene Name: spermatogenesis associated 24
  ENST ID: ENST00000514983
  CDS Start-End: 1-451
ccctcgggtggtcgaaggcggggtcaggatctgtgtgtctcgctttagatcaactgcgggacgtgattgagtctcaggaggaactaatccaccagctgaggaacgtgatggttctccaggacgaaaattttgtcagtaaagaagagttccaggcagtggagaagaagctggtggaagagaaagctgcccatgccaaaaccaaggtcctcctggccaaggaagaggagaagttacagtttgccctcggagaggtagaggtgctatccaagcagctggagaaagagaagctggcctttgaaaaagcgctctccagtgtcaagagcaaagtccttcaggagtccagcaagaaggaccagctcatcaccaagtgcaatggaatcacatgtctgacttccggatccagaagcagcaggagagctacatggcccaggtgctggaccagaagcataag

SEQ ID NO: 185663 - DNA, 641 bp, Homo sapiens
  Payload ID: 16561
  Gene Symbol: SPATA24
  Gene Name: spermatogenesis associated 24
  ENST ID: ENST00000509959
  CDS Start-End: 28-528
tttccaactagctggcgggggcggaagatggcgacgcccctcgggtggtcgaaggcggggtcaggatctgtgtgtctcgctttagatcaactgcgggacgtgattgagtctcaggaggaactaatccaccagctgaggaacgtggaagagaaagctgcccatgccaaaaccaaggtcctcctggccaaggaagaggagaagttacagtttgccctcggagaggtagaggtgctatccaagcagctggagaaagagaagctggcctttgaaaaagcgctctccagtgtcaagagcaaagtccttcaggagtccagcaagaaggaccagctcatcaccaagtgcaatggtaggcgggaggcccgtgctctccaccacggttatataaacgggctctttcctaaccacccagtgcctgtgtcaaaggcagggtttcactctaacacctgtccccagctgaggatacaggcaggcccgggtgggccacaccttcgaaaaggccttaagggaccaggcaggccacggaaatgagggaagcagtcggtgtactatattcttcaccgccataaaggaatgggcttgctcccatttttcctgaaacatacaaccttcttagtccaccttttgttttcccacttttgatg

SEQ ID NO: 185664 - DNA, 484 bp, Homo sapiens
  Payload ID: 16561
  Gene Symbol: SPATA24
  Gene Name: spermatogenesis associated 24
  ENST ID: ENST00000512761
  CDS Start-End: 1-462
aaagaagagttccaggcagtggagaagaagctggtggaagagaaagctgcccatgccaaaaccaaggtcctcctggccaaggaagaggagaagttacagtttgccctcggagaggtagaggtgctatccaagcagctggagaaagagaagctggcctttgaaaaagctgtcaagagcaaagtccttcaggagtccagcaagaaggaccagctcatcaccaagtgcaatgagattgagtctcacattataaagcaagaagatatacttaatggcaaagagaatgagattaaagagttgcagcaagttatcagccagcagaaacagatcttcaggaatcacatgtctgacttccggatccagaagcagcaggagagctacatggcccaggtgctggaccagaagcataagaaagcctcagggacacgtcaggcccgcagccaccagcatcccagggaaaaataaaatggccgccgctttcctgttc

SEQ ID NO: 185665 - DNA, 757 bp, Homo sapiens
  Payload ID: 16562
  Gene Symbol: SPATA25
  Gene Name: spermatogenesis associated 25
  Uniprot ID: Q9BR10
  ENST ID: ENST00000372519
  CDS Start-End: 46-729
gcggcagatcactattccctcacaaaccggggctttggggaagccatgtcctacttcaggactccacaaactcatccaggtcctctgccttccggccaaggtggggctgcttctccaggcttgtcccttggcctctgtagtcctgtagagccagtggtggtggcctctggtggaacaggcccactgagccagaaagctgagcaggtggcacctgctgcccaggcctggggcccagccctggcaatgccacaagccaggggctgccctggggggactagctgggagacactacggaaggaatacagccgaaactgccacaaattcccgcatgtgaggcagctggagagcttgggctgggacaatggctactccagaagcagagcccctgacctgggtggccccagcaggcctaggcccctgatgctgtgtgggctgtcaccacgggttctaccggtaccctctgaggcagtggggaaggaggccagctcccagcctgatatctgcatcctcaccctcgccatgatgatcgctggcatccccaccgtgcccgtcccaggagttcgggaagaggacctgatctgggccgctcaagctttcatgatggcccatccggagccagagggtgctgtggagggggcgcggtgggagcaggcacatgcccacacagcctctgggaagatgcccctagtgagatctaaaaggggccagcctcctggctcctgcttgtagatggatgaaatagcaccagatatgtagg

SEQ ID NO: 185666 - DNA, 2335 bp, Homo sapiens
  Payload ID: 16563
  Gene Symbol: SPATA2L
  Gene Name: spermatogenesis associated 2-like
  Uniprot ID: Q8IUW3
  ENST ID: ENST00000289805
  CDS Start-End: 70-1344
ggaagcgcgcggcgcgcggggaggcccgaactgatccgcggcggccggagaccgctggggacagacaggatgggcagcagctcgctgtccgaggactaccgccagtgcctggagcgcgagctgcgacggggccgcgcgggcgtgtgcggggacccctcgctgcgcgcggtgctctggcagatcctggtggaggacttcgacctgcacggggcgctgcaggacgacgcgctggctctgctcaccgacgggctgtggggccgcgccgacctggcgcccgcgctacgcggcctggctcgcgccttcgagcttctggagctcgccgcggtgcacctgtacctgctgccctggaggaaggagttcaccaccatcaagaccttctctgggggctacgtgcacgtgctgaagggtgtgctctcagacgacctcctcctgaagagcttccagaagatgggctacgtacgcagagacagccatcggctcatggtgaccgccctgccccccgcctgccagctggtgcaggtggccctgggctgcttcgccctccggctggagtgtgagatcctgggtgaggtgctggcccagctgggcaccagtgtgctgccagctgaggagctgctgcaggcacggcgtgccagcggggacgtggcctcctgtgtggcctggctgcagcagcggctggcccaggatgaggagccgccacccctgcccccccgaggctcccctgctgcttacagggccccactggacttataccgggacttgcaggaagacgaggggtcggaggacgccagcctgtatggggagccgtcaccaggccctgactcgcccccggcggagctggcctacaggccaccactctgggagcagagtgccaaactgtggggcactgggggccgggcctgggagcccccagctgaggagctgccgcaggccagcagcccaccatatggggccttggaggaggggctggaacctgaaccttccgccttctccttcctctctctgcgccgtgagctgagtaggcctggggacctggccacccctgaaagctctgcagcggccagcccgaggcgtattcgggcagagggggtaccagcctcagcctataggtctgtctcggagcccccaggctaccaggcacacagctgcctgtcccctggcgccctgcccaccctctgctgcgacacctgtcgccagctgcatgctgcccactgtgcagccctgcccgcctgccgtccaggccactcgctgcgtgtgctgcttggcgacgcccagcggcgcttgtggctacagcgtgcacagatggacactctgctctacaacagccccggggcccggccctaggccagctgggccccaggtcaagggctcttgggagacagctcccgtggtgcttctctttgctggggaggggtctgggcctctggttgccttgtccctgggggagtcctgggcacagcagggggttggagagtccaggccaacccttgctggaggtgggactctctgtatatggaaggctccaagggcagcaggcctaagccggccagcaggagcctttccacatttccccaccctcggaacccagacgcatgcccacatgtgctgggtagaggggtccagcctgttccagccagtgcctgaacctgtccctgagaaggaccctgtgccccaaggcccgtggctcctggcctgctccctgcagtacggagtacggggctcaggacttgggggtcctccacgtgtcccagggattctccacacgagtgtcctcaagggcctgttggtgacaccgagctccccccaccccaagctctgctggagccaatctgcggggctctgccgggtgcacggctgacctggcttcggggacgccggccctccccttgggtgtcacagcagctgggcccacagacaggaaatgacctgacctcaaaccagatgtggaggtgcacgagaggcgcaggaacgggcagtggctgacagctgggaaggccctgagcgtcactgctgctgggcggaagggcctgtggacagcccgcccaggcggcggggtcttggtgggtccagtggtaatggtgcccctcccctccattccctgtgggtgcagcccacaggctggcgaggaggtgcctctgccctaccctcgggtctggcgagggagagggcagggtgcatccactgtgacagcccctctgggcccacaactccctgaccctggaagctgagcctgctttcctgaccctccgccccaccccctcctccccagaacactcagagggacggtcaacatcagagcacattaaacgctggtgaaaccatgtctgttaaaaaa

SEQ ID NO: 185667 - DNA, 1001 bp, Homo sapiens
  Payload ID: 16563
  Gene Symbol: SPATA2L
  Gene Name: spermatogenesis associated 2-like
  Uniprot ID: Q8IUW3
  ENST ID: ENST00000335360
  CDS Start-End: 80-538
gactcccggcggaagcgcgcggcgcgcggggaggcccgaactgatccgcggcggccggagaccgctggggacagacaggatgggcagcagctcgctgtccgaggactaccgccagtgcctggagcgcgagctgcgacggggccgcgcgggcgtgtgcggggacccctcgctgcgcgcggtgctctggcagatcctggtggaggacttcgacctgcacggggcgctgcaggacgacgcgctggctctgctcaccgacgggctgtggggccgcgccgacctggcgcccgcgctacgcggcctggctcgcgccttcgagcttctggagctcgccgcggtgcacctgtacctgctgccctggaggaaggagttcaccaccatcaagaccttctctgggggctacgtgcacgtgctgaagggtgtgctctcagacgacctcctcctgaagagcttccagaagatgggctacgtacgcagagacagccatcggctcatgctctgctggagccaatctgcggggctctgccgggtgcacggctgacctggcttcggggacgccggccctccccttgggtgtcacagcagctgggcccacagacaggaaatgacctgacctcaaaccagatgtggaggtgcacgagaggcgcaggaacgggcagtggctgacagctgggaaggccctgagcgtcactgctgctgggcggaagggcctgtggacagcccgcccaggcggcggggtcttggtgggtccagtggtaatggtgcccctcccctccattccctgtgggtgcagcccacaggctggcgaggaggtgcctctgccctaccctcgggtctggcgagggagagggcagggtgcatccactgtgacagcccctctgggcccacaactccctgaccctggaagctgagcctgctttcctgaccctccgccccaccccctcctccccagaacactcagagggacggtcaacatcagagcacattaaacgctggtgaaacca

SEQ ID NO: 185668 - DNA, 692 bp, Homo sapiens
  Payload ID: 16563
  Gene Symbol: SPATA2L
  Gene Name: spermatogenesis associated 2-like
  ENST ID: ENST00000569918
  CDS Start-End: 152-692
tggggacagacaggtagcgccgtcacccgcgggatccgcagctccatctgccgggcgaaggggctctggtcgggagagggctcagcgggcggaagcgcgtctctagagaagggtgcggtcgataaccgggggcgcccctggaaggccgaggatgggcagcagctcgctgtccgaggactaccgccagtgcctggagcgcgagctgcgacggggccgcgcgggcgtgtgcggggacccctcgctgcgcgcggtgctctggcagatcctggtggaggacttcgacctgcacggggcgctgcaggacgacgcgctggctctgctcaccgacgggctgtggggccgcgccgacctggcgcccgcgctacgcggcctggctcgcgccttcgagcttctggagctcgccgcggtgcacctgtacctgctgccctggaggaaggagttcaccaccatcaagaccttctctgggggctacgtgcacgtgctgaagggtgtgctctcagacgacctcctcctgaagagcttccagaagatgggctacgtacgcagagacagccatcggctcatggtgaccgccctgccccccgcctgccagctggtgcaggtggccctgggctgcttcgccctccggctggagtgtgagatcctgggtgaggtgctggcccagctgggcaccagtgtgctgccagctgagg

SEQ ID NO: 185669 - DNA, 766 bp, Homo sapiens
  Payload ID: 16564
  Gene Symbol: SPATA3
  Gene Name: spermatogenesis associated 3
  Uniprot ID: Q8NHX4
  ENST ID: ENST00000455816
  CDS Start-End: 1-579
atgaagaaggtcaagaagaaaaggtcagaggccagacgccaccgagactccacctcccagcatgctagctccaattccacctctcagcagcctagccctgaatccacaccacagcagcctagtcctgaatccacaccacagcagcctagccctgaatccacaccacagcattccagccttgaaaccacctcccggcagccagcattccaagcccttccagcacccgaaatccgccgctcctcttgctgccttttatctccagatgctaacgtgaaggcagcccctcaatccaggaaagcagggcctctgattcgcgccggcccgcattcctgctcctgtgccacttgcccctgcagctccgcttgctggcgtcgtctggggctatgccatagccgcatcttcgatgtccttctgcctcgggactggcagatggcgccagggagaggactccccaacctgctcaccttctacagaaaatcttcaagaaaaccctccagtcatcgtaacgcgtgtcctccaagccctcggaactgtggctgtggctctgggggctctaggagctgcctactacatcactgaatccttgtgaacaagcccctaggcccacagtctggcaggaggtgcttttaatgtgctgataaaccaacctcaggaaggtattatgtacagaagattcccaaggctgctgttgctgaaagagacttgggctactgccagggaactagaaacgtgctgagaagaggactgcaatgactgctttcaaaaa

SEQ ID NO: 185670 - DNA, 1618 bp, Homo sapiens
  Payload ID: 16564
  Gene Symbol: SPATA3
  Gene Name: spermatogenesis associated 3
  Uniprot ID: Q8NHX4
  ENST ID: ENST00000452881
  CDS Start-End: 109-687
gaggcccaagccaggctcctagggcagagggcaaacggcccctccaggagggagccgggagattacgcagctccatgtaggtccacgtttaggttgggaggatctaccatgaagaaggtcaagaagaaaaggtcagaggccagacgccaccgagactccacctcccagcatgctagctccaattccacctctcagcagcctagccctgaatccacaccacagcagcctagtcctgaatccacaccacagcagcctagccctgaatccacaccacagcattccagccttgaaaccacctcccggcagccagcattccaagcccttccagcacccgaaatccgccgctcctcttgctgccttttatctccagatgctaacgtgaaggcagcccctcaatccaggaaagcagggcctctgattcgcgccggcccgcattcctgctcctgtgccacttgcccctgcagctccgcttgctggcgtcgtctggggctatgccatagccgcatcttcgatgtccttctgcctcgggactggcagatggcgccagggagaggactccccaacctgctcaccttctacagaaaatcttcaagaaaaccctccagtcatcgtaacgcgtgtcctccaagccctcggaactgtggctgtggctctgggggctctaggagctgcctactacatcactgaatccttgtgaacaagcccctaggcccacagtctggcagacctccaccagccccaggagttgataggtgatggcgctgggagaagatgttcagaatatctcaaaagccaagtccagaaggaggtgcttttaatgtgctgataaaccaacctcaggaaggtattatgtacagaagattcccaaggctgctgttgctgaaagagacttgggctactgccagggaactagggtctcactctgtcacccaggttggagtgcagcaggggcatgatcagctcactgaaggatcatttcttggtctaggctataggctggccttagaatcaactcacctggtgtcctattgtcagggacatcttaaccagggtgactgcacctcgaataaaggccagataaagccaaacttgctgggttacattccttgggggttagacacccttcatcacaagatgtttgtagctcaaagaaggggttaatgatgctaactagagacccagaacgtctgaaaacgtcctgatatttaaagaacaaagcatccttcatttgagaataagtttcactttaaagaccccctcaatatcctcctcagatttgccctgcacttcttgttccatgcttggggtcctaagaacaagccatctgatgcctctactatcattacctctattgggacccagaaaccaataccccaaaatatggtgcatggacatgctgaactgaagaagatgcctcaagggtcatccctaaaggcaaaaacagaacttccaaagtatctttctgtgacaacattaggttcaggcttgaagtccctgatttcgccatcaaagtcagatccaggggggacgatgctattcagaaacgtgctgagaagaggactgcaatgactgctttcaaaaaacaccagaataaatacatacgtagtgtaagcaagcg

SEQ ID NO: 185671 - DNA, 332 bp, Homo sapiens
  Payload ID: 16564
  Gene Symbol: SPATA3
  Gene Name: spermatogenesis associated 3
  ENST ID: ENST00000454918
  CDS Start-End: 65-178
caggagggagccgggagattacgcagctccatgtaggtccacgtttaggttgggaggatctaccatgaagaaggtcaagaagaaaagggcctctgattcgcgccggcccgcattcctgctcctgtgccacttgcccctgcagctccgcttgctggcgtcgtctggggctatgccatagccgcatcttcgatgtccttctgcctcgggactggcagatggcgccagggagaggactccccaacctgctcaccttctacagaaaatcttcaagaaaaccctccagtcatcgtaacgcgtgtcctccaagccctcggaactgtggctgtggctct

SEQ ID NO: 185672 - DNA, 1011 bp, Homo sapiens
  Payload ID: 16564
  Gene Symbol: SPATA3
  Gene Name: spermatogenesis associated 3
  Uniprot ID: Q8NHX4
  ENST ID: ENST00000424440
  CDS Start-End: 114-692
agctggaggcccaagccaggctcctagggcagagggcaaacggcccctccaggagggagccgggagattacgcagctccatgtaggtccacgtttaggttgggaggatctaccatgaagaaggtcaagaagaaaaggtcagaggccagacgccaccgagactccacctcccagcatgctagctccaattccacctctcagcagcctagccctgaatccacaccacagcagcctagtcctgaatccacaccacagcagcctagccctgaatccacaccacagcattccagccttgaaaccacctcccggcagccagcattccaagcccttccagcacccgaaatccgccgctcctcttgctgccttttatctccagatgctaacgtgaaggcagcccctcaatccaggaaagcagggcctctgattcgcgccggcccgcattcctgctcctgtgccacttgcccctgcagctccgcttgctggcgtcgtctggggctatgccatagccgcatcttcgatgtccttctgcctcgggactggcagatggcgccagggagaggactccccaacctgctcaccttctacagaaaatcttcaagaaaaccctccagtcatcgtaacgcgtgtcctccaagccctcggaactgtggctgtggctctgggggctctaggagctgcctactacatcactgaatccttgtgaacaagcccctaggcccacagtctggcagacctccaccagccccaggagttgataggtgatggcgctgggagaagatgttcagaatatctcaaaagccaagtccagaagtttgatgtccttccctgtccagagagtgaagaaccatctgacgacagtgacatctttcctttttggggaaagatgcttctagaattttctttcctaaagtttggtgaacctctcccttggcatcttcctcagctgaagatccagtttccatcaaagggacctctcttgtcaccaaaatttaaaaaaagaaaaaaaaaacga

SEQ ID NO: 185673 - DNA, 856 bp, Homo sapiens
  Payload ID: 16564
  Gene Symbol: SPATA3
  Gene Name: spermatogenesis associated 3
  Uniprot ID: Q8NHX4
  ENST ID: ENST00000433428
  CDS Start-End: 97-675
aggctcctagggcagagggcaaacggcccctccaggagggagccgggagattacgcagctccatgtaggtccacgtttaggttgggaggatctaccatgaagaaggtcaagaagaaaaggtcagaggccagacgccaccgagactccacctcccagcatgctagctccaattccacctctcagcagcctagccctgaatccacaccacagcagcctagtcctgaatccacaccacagcagcctagccctgaatccacaccacagcattccagccttgaaaccacctcccggcagccagcattccaagcccttccagcacccgaaatccgccgctcctcttgctgccttttatctccagatgctaacgtgaaggcagcccctcaatccaggaaagcagggcctctgattcgcgccggcccgcattcctgctcctgtgccacttgcccctgcagctccgcttgctggcgtcgtctggggctatgccatagccgcatcttcgatgtccttctgcctcgggactggcagatggcgccagggagaggactccccaacctgctcaccttctacagaaaatcttcaagaaaaccctccagtcatcgtaacgcgtgtcctccaagccctcggaactgtggctgtggctctgggggctctaggagctgcctactacatcactgaatccttgtgaacaagcccctaggcccacagtctggcagacctccaccagccccaggagttgataggtgatggcgctgggagaagatgttcagaatatctcaaaagccaagtccagaagatccagtttccatcaaagggacctctcttgtcaccaaaatttaaaaaaagaaaaaaaaaacga

SEQ ID NO: 185674 - DNA, 406 bp, Homo sapiens
  Payload ID: 16564
  Gene Symbol: SPATA3
  Gene Name: spermatogenesis associated 3
  ENST ID: ENST00000440792
  CDS Start-End: 1-315
tccacaccacagcagcctagtcctgaatccacaccacagcagcctagccctgaatccacaccacagcattccagccttgaaaccacctcccggcagccagcattccaagcccttccagcacccgaaatccgccgctcctcttgctgccttttatctccagatgctaacgtgaaggcagcccctcaatccaggaaagcagaaaatcttcaagaaaaccctccagtcatcgtaacgcgtgtcctccaagccctcggaactgtggctgtggctctgggggctctaggagctgcctactacatcactgaatccttgtgaacaagcccctaggcccacagtctggcagatccagtttccatcaaagggacctctcttgtcaccaaaatttaaaaaaagaaaaaaaaaacga

SEQ ID NO: 185675 - DNA, 433 bp, Homo sapiens
  Payload ID: 16564
  Gene Symbol: SPATA3
  Gene Name: spermatogenesis associated 3
  ENST ID: ENST00000423134
  CDS Start-End: 1-262
atccacaccacagcattccagccttgaaaccacctcccggcagccagcattccaagcccttccagcacccgaaatccgccgctcctcttgctgccttttatctccagatgctaacgtgaaggcagcccctcaatccaggaaagcagaaaatcttcaagaaaaccctccagtcatcgtaacgcgtgtcctccaagccctcggaactgtggctgtggctctgggggctctaggagctgcctactacatcactgaatccttgtgaacaagcccctaggcccacagtctggcagacctccaccagccccaggagttgataggtgatggcgctgggagaagatgttcagaatatctcaaaagccaagtccagaagatccagtttccatcaaagggacctctcttgtcaccaaaatttaaaaaaagaaaaaaaaaacga

SEQ ID NO: 185676 - DNA, 423 bp, Homo sapiens
  Payload ID: 16564
  Gene Symbol: SPATA3
  Gene Name: spermatogenesis associated 3
  ENST ID: ENST00000495639
  CDS Start-End: 1-19
ctgcctactacatcactgaatccttgtgaacaagcccctaggcccacagtctggcagaccccctcaatatcctcctcagatttgccctgcacttcttgttccatgcttggggtcctaagaacaagccatctgatgcctctactatcattacctctattgggacccagaaaccaataccccaaaatatggtgcatggacatgctgaactgaagaagatgcctcaagggtcatccctaaaggcaaaaacagaacttccaaagtatctttctgtgacaacattaggttcaggcttgaagtccctgatttcgccatcaaagtcagatccaggggggacgatgctattcagaaacgtgctgagaagaggactgcaatgactgctttcaaaaaacaccagaataaatacatacgtagtgtaagcaagcg

SEQ ID NO: 185677 - DNA, 786 bp, Homo sapiens
  Payload ID: 16564
  Gene Symbol: SPATA3
  Gene Name: spermatogenesis associated 3
  ENST ID: ENST00000612823
  CDS Start-End: 81-626
gggcaaacggcccctccaggagggagccgggagattacgcagctccatgtaggtccacgtttaggttgggaggatctaccatgaagaaggtcaagaagaaaaggtcagaggccagacgccaccgagactccacctcccagcatgctagctccaattccacctctcagcatcctgaatccacaccacagcagcctagccctgaatccacaccacagcattccagccttgaaaccacctcccggcagccagcattccaagcccttccagcacccgaaatccgccgctcctcttgctgccttttatctccagatgctaacgtgaaggcagcccctcaatccaggaaagcagggcctctgattcgcgccggcccgcattcctgctcctgtgccacttgcccctgcagctccgcttgctggcgtcgtctggggctatgccatagccgcatcttcgatgtccttctgcctcgggactggcagatggcgccagggagaggactccccaacctgctcaccttctacagaaaatcttcaagaaaaccctccagtcatcgtaacgcgtgtcctccaagccctcggaactgtggctgtggctctgggggctctaggagctgcctactacatcactgaatccttgtgaacaagcccctaggcccacagtctggcagacctccaccagccccaggagttgataggtgatggcgctgggagaagatgttcagaatatctcaaaagccaagtccagaagatccagtttccatcaaagggacctctcttgtcaccaaaattt

SEQ ID NO: 185678 - DNA, 1284 bp, Homo sapiens
  Payload ID: 16565
  Gene Symbol: SPATA32
  Gene Name: spermatogenesis associated 32
  Uniprot ID: Q96LK8
  ENST ID: ENST00000331780
  CDS Start-End: 97-1251
agcgcccaccagtccctcagccaaagagcacactggaggcggagaggcagcatccaccagcccgctccccgcctccaggacagagcctcggtctgcatgggggtgacaggtgcccatggatttccatgctgcggcaaagggtcagtggaggttgcagagatgcgagatgacttaagtcaacaccagatacaagaggaacaggagctggaggcagacatgctagagcagaagccccaactccaagtggacctggacctggacccagacccagacccagacccagaactggagatcggacaggtgccggctttactggagtcagagctatacccagccctcaagcttgaagctgagctggacacggaagccaactcgaacgaggagtctgactttgaagaacccatgcagctggtatgcaagatagagtccgtccactccaacatggggctgcccacgccacagaccttcagaccgtggagtctgaattcaaactgccggagtttcacggaggagaaccacgtgtctgcctgccatcactccatcagtgcgcagacctccaagcacctcttctgggcaaacaagctcatccaggcctcagagcacagcctgcagcgggccatcaacatgcagctcaacaatggcagcgcaggccagcccatcagatccccgctccgggaggccatccccaccaacgccctgtgctccgaggagcagctccagatccctgatgcccactcagctcctccaaccacaagctcccaggcaccaagccccctcctgtcctcagatctcccgccacccattgacctgacagagctaatcacctttgcatcttccctggccatggcctcctccagcaggatggacctgcccagtttggaacacatgatgaaagctccaccccaggaggctctggagccttccacagagcccctcctgaccactgtggaggagcgagagccagaaaatcacgcagagaccctgccagagaaaccacgcgaagccagagcaccactgaaatcttggagtcaggaagacaagaacttcgctcaatcttactttgacttcagcaagccggggatcaagagggccaccatcaaagggcaaatccagcttctccagccaccagccacgtcccctctgctgcagggaagcaaggaagactcagtgccgccaggaaaagagaaagagaatccattattggtgaaaatccattttaagctgtcagcccccacaatcccagagaaatgactagacagaaccaataaagcctccagtgctggc

SEQ ID NO: 185679 - DNA, 1907 bp, Homo sapiens
  Payload ID: 16565
  Gene Symbol: SPATA32
  Gene Name: spermatogenesis associated 32
  ENST ID: ENST00000586359
  CDS Start-End: 79-201
agccaaagagcacactggaggcggagaggcagcatccaccagcccgctccccgcctccaggacagagcctcggtctgcatgggggtgacaggcatgagtaggactttgccagaagaaggctttccaggtataagaaatagcatttgcaaaggcactgggtgcagaaaggcctgcggtactctgggggtagcttcggcttagggtgagggacaggaagctggatgccaagagatgaaaaatgaaggtagagatcagaccaagaggccacatggagtctgggggtaaccggagacaagtgagatgtagcaggctcactctgaggtcattgaaaatccaggttggagggggacatagttgcagtggtcccactggaagactaaagagatttaagacagtgcagtgagtagcatcccagagtttggagccagccagacctgcctttgggtcgtgtgctgctcttaatagctgcatgacctcatacacgtttcctcatctgtgagaggagagccgtggccaactgggcataggagtcttgctctgtcacccaggctggagtgcaatggcaccatctcggctcactgcaacgtctgcctcccgggccgaagccatcctccctatcaaaacctaacaaagacattacaagaaaagaaaattatacaccgatatccctcatgaatatgcatgtgaaaattctgaaaaaaagccaatcagattcaacaacatagaaaaagggtgcccatggatttccatgctgcggcaaagggtcagtggaggttgcagagatgcgagatgacttaagtcaacaccagatacaagaggaacaggagctggaggcagacatgctagagcagaagccccaactccaagtggacctggacctggacccagacccagacccagacccagaactggagatcggacaggtgccggctttactggagtcagagctatacccagccctcaagcttgaagctgagctggacacggaagccaactcgaacgaggagtctgactttgaagaacccatgcagctggtatgcaagatagagtccgtccactccaacatggggctgcccacgccacagaccttcagaccgtggagtctgaattcaaactgccggagtttcacggaggagaaccacgtgtctgcctgccatcactccatcagtgcgcagacctccaagcacctcttctgggcaaacaagctcatccaggcctcagagcacagcctgcagcgggccatcaacatgcagctcaacaatggcagcgcaggccagcccatcagatccccgctccgggaggccatccccaccaacgccctgtgctccgaggagcagctccagatccctgatgcccactcagctcctccaaccacaagctcccaggcaccaagccccctcctgtcctcagatctcccgccacccattgacctgacagagctaatcacctttgcatcttccctggccatggcctcctccagcaggatggacctgcccagtttggaacacatgatgaaagctccaccccaggaggctctggagccttccacagagcccctcctgaccactgtggaggagcgagagccagaaaatcacgcagagaccctgccagagaaaccacgcgaagccagagcaccactgaaatcttggagtcaggaagacaagaacttcgctcaatcttactttgacttcagcaagccggggatcaagagggccaccatcaaagggcaaatccagcttctccagccaccagccacgtcccctctgctgcagggaagcaaggaagactcagtgccgccaggaaaagagaaagagaatccattattggtgaaaatccattttaagctgtcagcccccacaatcccagagaaatgactagacagaaccaataaagcctccagtgctggc

SEQ ID NO: 185680 - DNA, 1283 bp, Homo sapiens
  Payload ID: 16565
  Gene Symbol: SPATA32
  Gene Name: spermatogenesis associated 32
  ENST ID: ENST00000588866
  CDS Start-End: 75-188
aaagagcacactggaggcggagaggcagcatccaccagcccgctccccgcctccaggacagagcctcggtctgcatgggggtgacaggtgcccatggatttccatgctgcggcaaagggtcagtggaggttgcagagatgcgagatgacttaagtcaacaccagatacaagaggaacaggagctttgagttgaaacatttcagctggaggcagacatgctagagcagaagccccaactccaagtggacctggacctggacccagacccagacccagacccagaactggagatcggacaggtgccggctttactggagtcagagctatacccagccctcaagcttgaagctgagctggacacggaagccaactcgaacgaggagtctgactttgaagaacccatgcagctggtatgcaagatagagtccgtccactccaacatggggctgcccacgccacagaccttcagaccgtggagtctgaattcaaactgccggagtttcacggaggagaaccacgtgtctgcctgccatcactccatcagtgcgcagacctccaagcacctcttctgggcaaacaagctcatccaggcctcagagcacagcctgcagcgggccatcaacatgcagctcaacaatggcagcgcaggccagcccatcagatccccgctccgggaggccatccccaccaacgccctgtgctccgaggagcagctccagatccctgatgcccactcagctcctccaaccacaagctcccaggcaccaagccccctcctgtcctcagatctcccgccacccattgacctgacagagctaatcacctttgcatcttccctggccatggcctcctccagcaggatggacctgcccagtttggaacacatgatgaaagctccaccccaggaggctctggagccttccacagagcccctcctgaccactgtggaggagcgagagccagaaaatcacgcagagaccctgccagagaaaccacgcgaagccagagcaccactgaaatcttggagtcaggaagacaagaacttcgctcaatcttactttgacttcagcaagccggggatcaagagggccaccatcaaagggcaaatccagcttctccagccaccagccacgtcccctctgctgcagggaagcaaggaagactcagtgccgccaggaaaagagaaagagaatccattattggtgaaaatccattttaagctgtcagcccccacaatcccagagaaatgactagacagaaccaataaagcctccagtgctggc

SEQ ID NO: 185681 - DNA, 2190 bp, Homo sapiens
  Payload ID: 16566
  Gene Symbol: SPATA33
  Gene Name: spermatogenesis associated 33
  Uniprot ID: Q96N06
  ENST ID: ENST00000301031
  CDS Start-End: 1-420
atggtgacgcacgccgctggcgcgaggaccttttgtgaggagcaaaagaagggatccacctattcagttccaaaatctaaggagaagttgatggagaagcattcccaggaagccaggcaggcagacagggagtcggagaagcctgtggacagcctccacccgggggccgggacagccaagcacccgccgccggcagcttcgctggaagagaaacctgatgtaaagcaaaagtccagcaggaagaaagtggtcgttccacagatcatcatcacgcgagcgtcgaatgagacgctagtcagttgcagttccagcgggagtgaccagcagagaaccattcgggagccggaggactggggcccctaccggcggcacaggaaccccagtacagcagacgcctataattcacatctcaaagaataaacaagcacctttgcatggcactcgctactccctgcgataggcgtctcgggaacagccgcctcaccctgtgagaagccgaggccccttctccagtgctctcggggaggttgcaccaggcccaccccaccctgtgagaaactgcagcccccttctccagtgctttcggggagggtgcaccaggcccgccccaccttgtgagaagccgtggcccccttctccagtgctctcagggagggtgcaccaggcctgcccccgccgtgagaaactgcagtccccttctccagtgctctcggggagggtgcaccaggcccaccccaccctgtgagaacctgcagcccccttctccaatgctctcggggagggtacaccagggttgccccaccctgtgagaagccaccgcccccttctccagtgctctcggggagggtgcaccagggctgccccacgctgtaagaagccgccgcccccttctccagtgctctccagcccgccccaccctgtgagaagccatggccccttctccagtgcttttggggagggtgcaccagggccaccccaccctgtgagaagccgtggcccccttctccagtgctttcggggagggtacaccaggcccgccccaccctgtgagaagccgtggcccccttctcccgtgctctcagggagggtgcaccaggcctgcccccgccttgagaaactgcagcccccttctccagtgctctgggggagggtgcaccaggcctgcccaccctgtgagaaactgcacccccttctccagtgctctcggggagggtgcaccaggcccgccccaccctgtgagaagccgcagcccgttctccattgccatttggtcctgccttccccagagctgctagcagctcggtcgaggcaagagtgactggctcagagagcgagctttgtggtattgataaatgaataaattagtatgttcatgttggaagtggctggctctgcagagtgatggacagcaggtggcatcttacattgtgatttgtggtgcacagttaaaacacttcccttcgtttcagaaggagacaatgtgaatacttggaaattatagtgaataagatgcctcccaaacttgaggaaaaggtcagattctaagagctaaacgttaagatgtaatgttccagaacaaagaggcccagagtcactgaacggggccccagggctcctagcttgagtgtaatctgagtcagcttatgaaaaggccccaaagaagaaagtggaatgtgtgctgggcacatgggacagccatggcactgagactttggaagtggccttgccagcgctgtcctgtctttctggcccacagatgagggctcctgattgtggaaggccacggaagggacctgaacacgatggcacgagacaagttatctcctgtgactgctcctctccagcaaccctcagctcaggctagactttccccctgtgttgagaatgccctgccctgtgtggaagcctgatgcatttagtgacagtgtgttagctttgttagtttctagtctggccagcaggctttccatgtgatctgccattggcttgcttcagtggccagtggagccaggggtgtccaccagagtcttggacacagacttctgaggtggcagcgggagggagcctgctccctgccacacacgtacaatttctaatccatacaggcctatgtagtatatacacacatacgcagagccttaggaattgtgaaaggccaatcaaaacttggggccctaatttcactctgcc

SEQ ID NO: 185682 - DNA, 2368 bp, Homo sapiens
  Payload ID: 16566
  Gene Symbol: SPATA33
  Gene Name: spermatogenesis associated 33
  ENST ID: ENST00000565890
  CDS Start-End: 1-207
accttttgtgagtcgctcccggctccgcggccgcggaggtgtggggacccgggcttgcgtcggagggggcggtgggctcacccatgggcctttccaaaagcaaagagaaacccaggaaaggtaaaggaggcgcaggcgctgggctccccgcgtctccgcccctgggcgcgggcccagggcggggctgggctgggcggggcggtgtgagcgcaggcgccaggctcggcccggtgcgaaccgttcctgccgccgagtccgccacggacggcgcgtttcccgcctgaggcggttacggaaacgcggagactcgagacttgaagccagcttattctggacccacgcaggcgactgaagacgatgggacccactgccctgcattcgagaaacctgatgtaaagcaaaagtccagcaggaagaaagtggtcgttccacagatcatcatcacgcgagcgtcgaatgagacgctagtcagttgcagttccagcgggagtgaccagcagagaaccattcgggagccggaggactggggcccctaccggcggcacaggaaccccagtacagcagacgcctataattcacatctcaaagaataaacaagcacctttgcatggcactcgctactccctgcgataggcgtctcgggaacagccgcctcaccctgtgagaagccgaggccccttctccagtgctctcggggaggttgcaccaggcccaccccaccctgtgagaaactgcagcccccttctccagtgctttcggggagggtgcaccaggcccgccccaccttgtgagaagccgtggcccccttctccagtgctctcagggagggtgcaccaggcctgcccccgccgtgagaaactgcagtccccttctccagtgctctcggggagggtgcaccaggcccaccccaccctgtgagaacctgcagcccccttctccaatgctctcggggagggtacaccagggttgccccaccctgtgagaagccaccgcccccttctccagtgctctcggggagggtgcaccagggctgccccacgctgtaagaagccgccgcccccttctccagtgctctccagcccgccccaccctgtgagaagccatggccccttctccagtgcttttggggagggtgcaccagggccaccccaccctgtgagaagccgtggcccccttctccagtgctttcggggagggtacaccaggcccgccccaccctgtgagaagccgtggcccccttctcccgtgctctcagggagggtgcaccaggcctgcccccgccttgagaaactgcagcccccttctccagtgctctgggggagggtgcaccaggcctgcccaccctgtgagaaactgcacccccttctccagtgctctcggggagggtgcaccaggcccgccccaccctgtgagaagccgcagcccgttctccattgccatttggtcctgccttccccagagctgctagcagctcggtcgaggcaagagtgactggctcagagagcgagctttgtggtattgataaatgaataaattagtatgttcatgttggaagtggctggctctgcagagtgatggacagcaggtggcatcttacattgtgatttgtggtgcacagttaaaacacttcccttcgtttcagaaggagacaatgtgaatacttggaaattatagtgaataagatgcctcccaaacttgaggaaaaggtcagattctaagagctaaacgttaagatgtaatgttccagaacaaagaggcccagagtcactgaacggggccccagggctcctagcttgagtgtaatctgagtcagcttatgaaaaggccccaaagaagaaagtggaatgtgtgctgggcacatgggacagccatggcactgagactttggaagtggccttgccagcgctgtcctgtctttctggcccacagatgagggctcctgattgtggaaggccacggaagggacctgaacacgatggcacgagacaagttatctcctgtgactgctcctctccagcaaccctcagctcaggctagactttccccctgtgttgagaatgccctgccctgtgtggaagcctgatgcatttagtgacagtgtgttagctttgttagtttctagtctggccagcaggctttccatgtgatctgccattggcttgcttcagtggccagtggagccaggggtgtccaccagagtcttggacacagacttctgaggtggcagcgggagggagcctgctccctgccacacacgtacaatttctaatccatacaggcctatgtagtatatacacacatacgcagagccttaggaattgtgaaaggccaatcaaaacttggggccctaatttcactctgccaaaag

SEQ ID NO: 185683 - DNA, 470 bp, Homo sapiens
  Payload ID: 16566
  Gene Symbol: SPATA33
  Gene Name: spermatogenesis associated 33
  ENST ID: ENST00000567827
  CDS Start-End: 1-145
gcggaggtgtggggacccgggcttgcgtcggagggggcggtgggctcacccatgggcctttccaaaagcaaagagaaacccaggaaaggtgaggagcaaaagaagggatccacctattcagttccaaaatctaaggagaagttgatggagaagcattcccaggaagccaggcaggcagacagggagtcggagaagcctgtggacagcctccacccgggggccgggacagccaagcacccgccgccggcagcttcgctggaaggtaggagacggcgggagggagcgaagcgaggtcagtggcttggaggatctggggctggggtgaggagcctactgtaagaccctaccggatggacactagtagcaggcacgcgccgtaaagatgaaactggtttgttttgggaactttatgtaggagggctcagaacaggcacgcgataaaagccagcaccgttggccgggcgcattgg

SEQ ID NO: 185684 - DNA, 575 bp, Homo sapiens
  Payload ID: 16566
  Gene Symbol: SPATA33
  Gene Name: spermatogenesis associated 33
  ENST ID: ENST00000566204
  CDS Start-End: 1-441
acgccgctggcgcgaggaccttttgtgagtcgctcccggctccgcggccgcggaggtgaggagcaaaagaagggatccacctattcagttccaaaatctaaggagaagttgatggagaagcattcccaggaagccaggcaggcagacagggagtcggagaagcctgtggacagcctccacccgggggccgggacagccaagcacccgccgccggcagcttcgctggaagagaaacctgatgtaaagcaaaagtccagcaggaagaaagtggtcgttccacagatcatcatcacgcgagcgtcgaatgagacgctagtcagttgcagttccagcgggagtgaccagcagagaaccattcgggagccggaggactggggcccctaccggcggcacaggaaccccagtacagcagacgcctataattcacatctcaaagaataaacaagcacctttgcatggcactcgctactccctgcgataggcgtctcgggaacagccgcctcaccctgtgagaagccgaggccccttctccagtgctctcggggaggttgcaccaggcccaccccaccctgtga

SEQ ID NO: 185685 - DNA, 3339 bp, Homo sapiens
  Payload ID: 16566
  Gene Symbol: SPATA33
  Gene Name: spermatogenesis associated 33
  ENST ID: ENST00000564238
  CDS Start-End: 1-82
ggggacccgggcttgcgtcggagggggcggtgggctcacccatgggcctttccaaaagcaaagagaaacccaggaaaggtgaggagcaaaagaagggatccacctattcagttccaaaatctaaggagaagttgatggagaagcattcccaggaagccaggcaggcagacagggagtcggagaagcctgtggacagcctccacccgggggccgggacagccaagcacccgccgccggcagcttcgctggaaggtaggagacggcgggagggagcgaagcgaggtcagtggcttggaggatctggggctggggtgaggagcctactgtaagaccctaccggatggacactagtagcaggcacgcgccgtaaagatgaaactggtttgttttgggaactttatgtaggaggtaaatatccagaaatcttagttgaaaacataagtttaatgaaaatgtaggtcagttcccgagtgataagtgcgtaccaggtggtcgaggggctggggcagtgtgcgtgtgtctcacctgaggttctcctcgagggctgggtatcttggtgccactgagaatccctgagcctccgcacactggaacagagcattgggaggccgtcccaggctggactgtagctctccgagggctgtggggataagtacattgcggagggtgaccgaggagtagaacctgggtgcgacaaaggtgtcttttataacagcctagtgtggccagacctttgggtgtgtgtggggaagatgaggccccaaaagtaggaagaagctagaatacaaagttttccatcagttttaccacgtggagctggaagcgttaaatattttaaacaacggaggtgctgcctggggcggtagttcacacctgtcctcccagttatttggccgaggcaggaggatcttttgagcccaggagttcaagaccagcttgggcaacatagtgagaccctgtctctacaaaaaataaatatttaaaaataaaaaacaagggcggcatgatgaggtctgtgcctaccaacaggggaagccagttcgcaggggaggtggcccggtcagagacccattgctgtggcccagtgggagccagcaaggccttgcagtaggaattgcagaagggtcaggcagggagaacccgcagagcctgccgtccgaggagattgggggcctgtgccaggaggaggtgttttaagtttcatcacaagaatgaaccactcggctgggcgcagtggctcacgcctgtaatcccagcactttgggaggccgaggcgtgtggatcacttaaggtcaggagttcaagaccagcctggccaacgtggtgaaaccctgtctctactaaaaatacaaaaattagctgggcgtggtggcatgtgcctgtaatcccagctactcaggaggctgaggcaggagaattgctcgaaccttgaaccgggacccgggaggcagaagtagtggtgagcgagatcgcaccactgcactccagcctgggctacagagtgagactctgtctcagaaaaaaaaaaaaataataaggagagaaccactcgggtcagacaagaaagaatgtcagggggatgactggcctgctaggcagaggagctgggcctggactgcttcacactgacacgcttgtaggatcaagggctgaaagtaggaggctctgggccttggacttggaagaaagacttggatttgaattcccaactttggaacctcccactggagggtggaacccctcacaggagggcgcaaccccccaccggaggatggaaccctgcaggaatagcatcacccttgggtggcagtttggaaaatgctacctgtctgtcacggtgcttttagctgaaagttacagaaaagctcactaaacgcagctttaacacagggatttaatgtctcacgaatgaagggtcagaggtggagcttccaggttggcttgttagcacaacagtgacatcaaagactttgcgtgtctcttcttgaccactctcagtgtccacagcccccgatgagtgtacagccccccacacgcaggcaggactgcatctactgcaaaggcattgctccttgcttcatattagcaaggaaacctttcccaggaaggcttcgcctgcccagcctctgcaggactcattcaatggtgcaaattcaccaggggctggagggagctgtgaagcatgggagtgggcaggacctctgccagtaacggaagtgggggaaggaggaccgcctgttggaagggccccagcagtgtctgtcacaccagagggtgggggaggaaggtggacatgaagggaaaacagcagagcaagagtgagaacagagtttcagcagataaaatgaagtgtgcacgctctccatgcagtgacgggctgagcgacagtgaggagcaggctgctgactcccttgccacaccgtgaaggagtcccaaaggtgggacactgagtgagacaagccagaggaaagaccactcatgttgcagttccctttccatggaatgtccagaaaaggcacatttacagagagaagcagatgagtggttgctgggcagaaatgggagccggccacagctgagcacaagaggactttggagggtgatggaaatggttttcgacctgaatctgaacatgggaagcactgcagtttagtagtcctggtccctaagcccttccagcccaggagccagacctgtgagcaaacaagcctttagtgattccaggctctggctggaaccttgagtcttctcagcttggggcatgcacctcagggggagccagcatcagtgtccagccccaagagcttccctgtacgtctcagtgagtcttcacatgcctccaactgcctggacaaccacacgtgatacctgtcctgccaaacgtgtcctgaacccataaaatccagagaaaagaaaatcgttttaaactgctgaggtttggggtaagttactatgaagcagtagtgagaagaacagaagggccatgatggggagaaagtttggccataagttaatcactgtggcagctgttaggatattgatgtggcttggctgtgtcctcacccaaatctcattttgaattcccacatgtgggaggaactgggtgggaggtgattgaattatgggggcaggtctttcctgtgctgttttcgtgatagtgaatgagtgtcacgagatccgatggttttaaaaacgggagtttcctgcataagctctctctctgcctgctgccatccatgtaagatgtgactcgctcctccctaccttccgccgtgattgtgaggcgtccccagccatgtggaactgtaagtccattaaaccttcttcctgtgtaaatta

SEQ ID NO: 185686 - DNA, 1264 bp, Homo sapiens
  Payload ID: 16566
  Gene Symbol: SPATA33
  Gene Name: spermatogenesis associated 33
  ENST ID: ENST00000568929
  CDS Start-End: 203-331
ttcccgcctgaggcggttacggaaacgcggagactcgagacttgaagccagcttattctggacccacgcaggcgactgaagacgatgggacccactgccctgcattcggtaagtcccgggtctaacggatgatccatatatttcaggtgaggagcaaaagaagggatccacctattcagttccaaaatctaaggagaagttgatggagaagcattcccaggaagccaggcaggcagacagggagtcggagaagcctgtggacagcctccacccgggggccgggacagccaagcacccgccgccggcagcttcgctggaagtgacgggctgagcgacagtgaggagcaggctgctgactcccttgccacaccgtgaaggagtcccaaaggtgggacactgagtgagacaagccagaggaaagaccactcatgttgcagttccctttccatggaatgtccagaaaaggcacatttacagagagaagcagatgagtggttgctgggcagaaatgggagccggccacagctgagcacaagaggactttggagggtgatggaaatggttttcgacctgaatctgaacatgggaagcactgcagtttagtagtcctggtccctaagcccttccagcccaggagccagacctgtgagcaaacaagcctttagtgattccaggctctggctggaaccttgagtcttctcagcttggggcatgcacctcagggggagccagcatcagtgtccagccccaagagcttccctgtacgtctcagtgagtcttcacatgcctccaactgcctggacaaccacacgtgatacctgtcctgccaaacgtgtcctgaacccataaaatccagagaaaagaaaatcgttttaaactgctgaggtttggggtaagttactatgaagcagtagtgagaagaacagaagggccatgatggggagaaagtttggccataagttaatcactgtggcagctgttaggatattgatgtggcttggctgtgtcctcacccaaatctcattttgaattcccacatgtgggaggaactgggtgggaggtgattgaattatgggggcaggtctttcctgtgctgttttcgtgatagtgaatgagtgtcacgagatccgatggttttaaaaacgggagtttcctgcataagctctctctctgcctgctgccatccatgtaagatgtgactcgctcctccctaccttccgccgtgattgtgaggcgtccccagccatgtggaactgtaagtcca

SEQ ID NO: 185687 - DNA, 1297 bp, Homo sapiens
  Payload ID: 16566
  Gene Symbol: SPATA33
  Gene Name: spermatogenesis associated 33
  ENST ID: ENST00000457689
  CDS Start-End: 1-115
gagtcgctcccggctccgcggccgcggaggtgtggggacccgggcttgcgtcggagggggcggtgggctcacccatgggcctttccaaaagcaaagagaaacccaggaaaggtgaggagcaaaagaagggatccacctattcagttccaaaatctaaggagaagttgatggagaagcattcccaggaagccaggcaggcagacagggagtcggagaagcctgtggacagcctccacccgggggccgggacagccaagcacccgccgccggcagcttcgctggaagagaaacctgatgtaaagcaaaagtccagcaggaagaaagtggtcgttccacagatcatcatcacgcgagcgtcgaatgagacgctagtcagttgcagttccagcgggagtgaccagcagagaaccattcgggagccggaggactggggcccctaccggcggcacaggaaccccagtacagcagacgcctataattcacatctcaaagaataaacaagcacctttgcatggcactcgctactccctgcgataggcgtctcgggaacagccgcctcaccctgtgagaagccgaggccccttctccagtgctctcggggaggttgcaccaggcccaccccaccctgtgagaaactgcagcccccttctccagtgctttcggggagggtgcaccaggcccgccccaccttgtgagaagccgtggcccccttctccagtgctctcagggagggtgcaccaggcctgcccccgccgtgagaaactgcagtccccttctccagtgctctcggggagggtgcaccaggcccaccccaccctgtgagaacctgcagcccccttctccaatgctctcggggagggtacaccagggttgccccaccctgtgagaagccaccgcccccttctccagtgctctcggggagggtgcaccagggctgccccacgctgtaagaagccgccgcccccttctccagtgctctccagcccgccccaccctgtgagaagccatggccccttctccagtgcttttggggagggtgcaccagggccaccccaccctgtgagaagccgtggcccccttctccagtgctttcggggagggtacaccaggcccgccccaccctgtgagaagccgtggcccccttctcccgtgctctcagggagggtgcaccaggcctgcccccgccttgagaaactgcagcccccttctccagtgctctgggggagggtgcaccaggcctgcccaccctgtgagaaactgcacccccttctccagtgctctcggggagggtgcacca

SEQ ID NO: 185688 - DNA, 1490 bp, Homo sapiens
  Payload ID: 16566
  Gene Symbol: SPATA33
  Gene Name: spermatogenesis associated 33
  Uniprot ID: Q96N06
  ENST ID: ENST00000579310
  CDS Start-End: 109-531
ggtgacgcacgccgctggcgcgaggaccttttgtgagtcgctcccggctccgcggccgcggaggtgtggggacccgggcttgcgtcggagggggcggtgggctcacccatgggcctttccaaaagcaaagagaaacccaggaaaggtgaggagcaaaagaagggatccacctattcagttccaaaatctaaggagaagttgatggagaagcattcccaggaagccaggcaggcagacagggagtcggagaagcctgtggacagcctccacccgggggccgggacagccaagcacccgccgccggcagcttcgctggaagagaaacctgatgtaaagcaaaagtccagcaggaagaaagtggtcgttccacagatcatcatcacgcgagcgtcgaatgagacgctagtcagttgcagttccagcgggagtgaccagcagagaaccattcgggagccggaggactggggcccctaccggcggcacaggaaccccagtacagcagacgcctataattcacatctcaaagaataaacaagcacctttgcatggcactcgctactccctgcgataggcgtctcgggaacagccgcctcaccctgtgagaagccgaggccccttctccagtgctctcggggaggttgcaccaggcccaccccaccctgtgagaaactgcagcccccttctccagtgctttcggggagggtgcaccaggcccgccccaccttgtgagaagccgtggcccccttctccagtgctctcagggagggtgcaccaggcctgcccccgccgtgagaaactgcagtccccttctccagtgctctcggggagggtgcaccaggcccaccccaccctgtgagaacctgcagcccccttctccaatgctctcggggagggtacaccagggttgccccaccctgtgagaagccaccgcccccttctccagtgctctcggggagggtgcaccagggctgccccacgctgtaagaagccgccgcccccttctccagtgctctccagcccgccccaccctgtgagaagccatggccccttctccagtgcttttggggagggtgcaccagggccaccccaccctgtgagaagccgtggcccccttctccagtgctttcggggagggtacaccaggcccgccccaccctgtgagaagccgtggcccccttctcccgtgctctcagggagggtgcaccaggcctgcccccgccttgagaaactgcagcccccttctccagtgctctgggggagggtgcaccaggcctgcccaccctgtgagaaactgcacccccttctccagtgctctcggggagggtgcaccaggcccgccccaccctgtgagaagccgcagcccgttctccattgccatttggtcctgccttccccagagctgctagcagctcggtcgaggcaagagtgactggctcagagagcgagctttgtggtattgataaatgaataaattagtatgttcatgttgg

SEQ ID NO: 185689 - DNA, 1546 bp, Homo sapiens
  Payload ID: 16566
  Gene Symbol: SPATA33
  Gene Name: spermatogenesis associated 33
  ENST ID: ENST00000611218
  CDS Start-End: 258-587
aggctcggcccggtgcgaaccgttcctgccgccgagtccgccacggacggcgcgtttcccgcctgaggcggttacggaaacgcggagactcgagacttgaagccagcttattctggacccacgcaggcgactgaagacgatgggacccactgccctgcattcggtaagtcccgggtctaacggatgatccatatatttcaggtgaggagcaaaagaagggatccacctattcagttccaaaatctaaggagaagttgatggagaagcattcccaggaagccaggcaggcagacagggagtcggagaagcctgtggacagcctccacccgggggccgggacagccaagcacccgccgccggcagcttcgctggaagagaaacctgatgtaaagcaaaagtccagcaggaagaaagtggtcgttccacagatcatcatcacgcgagcgtcgaatgagacgctagtcagttgcagttccagcgggagtgaccagcagagaaccattcgggagccggaggactggggcccctaccggcggcacaggaaccccagtacagcagacgcctataattcacatctcaaagaataaacaagcacctttgcatggcactcgctactccctgcgataggcgtctcgggaacagccgcctcaccctgtgagaagccgaggccccttctccagtgctctcggggaggttgcaccaggcccaccccaccctgtgagaaactgcagcccccttctccagtgctttcggggagggtgcaccaggcccgccccaccttgtgagaagccgtggcccccttctccagtgctctcagggagggtgcaccaggcctgcccccgccgtgagaaactgcagtccccttctccagtgctctcggggagggtgcaccaggcccaccccaccctgtgagaacctgcagcccccttctccaatgctctcggggagggtacaccagggttgccccaccctgtgagaagccaccgcccccttctccagtgctctcggggagggtgcaccagggctgccccacgctgtaagaagccgccgcccccttctccagtgctctccagcccgccccaccctgtgagaagccatggccccttctccagtgcttttggggagggtgcaccagggccaccccaccctgtgagaagccgtggcccccttctccagtgctttcggggagggtacaccaggcccgccccaccctgtgagaagccgtggcccccttctcccgtgctctcagggagggtgcaccaggcctgcccccgccttgagaaactgcagcccccttctccagtgctctgggggagggtgcaccaggcctgcccaccctgtgagaaactgcacccccttctccagtgctctcggggagggtgcaccaggcccgccccaccctgtgagaagccgcagcccgttctccattgccatttggtcctgccttccccagagctgctagcagctcggtcgaggcaagagtgactggctcagagagcgagctttgtggtattgataaatgaataaattagtatgttcatgttgg

SEQ ID NO: 185690 - DNA, 1169 bp, Homo sapiens
  Payload ID: 16567
  Gene Symbol: SPATA4
  Gene Name: spermatogenesis associated 4
  Uniprot ID: Q8NEY3
  ENST ID: ENST00000280191
  CDS Start-End: 110-1027
gcgctgaggtctcgccccataagactccgccccgccccacgagaccgcgccgccagcaataaggcccagccccgccttctgctgttgccgcagcaacccagaaagcgtcatggctgccgccggccaggaaaaagggtatttgacacagactgcggcagccctagacaagtcaccgtcactttcgccacagctagcagctcccatccgagggaggcctaagaagtgtctggtctatccgcatgcgccgaagagctcccgcttgtctcgttccgttctgcgttggcttcagggtctggatctcagcttcttccccaggaacatcaacagagatttttcaaatggcttcctaattgcagaaatattctgtatatattacccctgggaacttgaattatcatcctttgaaaacgggacctctttaaaagtcaagttggataactgggcacagttggagaagttcctggcaagaaaaaaatttaaattacctaaagaactaatccatggaacaattcattgtaaagctggagtgcctgaaatattgatagaagaggtttacactttattaacacatcgagaaattaaaagtatccaggatgactttgtgaatttcacggactatagctaccagatgcgtttacccctggtttccaggtctacagtttcgaagtctattaaagataacattaggttatcagaattactaagcaatcccaacatgctgaccaatgaacttaaagcggagttcctcatccttttacatatgttgcaaagaaaattaggcagaaaattgaatccagaatggtttgatgtgaaaccaacagtgggagaagttactctcaatcaccttcctgcccaagcctctgggcgcagatataatttaaaagttaaaagaggaagagttgtccctgttttaccaaatataggtagtggtggcagttcacatagagaaatacatgtgaagcaagctggacaacattcttattactctgctatgaaacctatcagaaacatggacaagaaaccttgaaaagcacctgtcaaatggctttgaagaagtgatgccaccatctctagccataataaagaaacagaatcacctagtattggatgtatttcaataataaatagagtggtgtcttttccataattgtgttaaagaacatttcttt

SEQ ID NO: 185691 - DNA, 2115 bp, Homo sapiens
  Payload ID: 16567
  Gene Symbol: SPATA4
  Gene Name: spermatogenesis associated 4
  ENST ID: ENST00000515234
  CDS Start-End: 1597-1995
ctgtaatcccagctactggggaggctgcaggcaggagaatgcttgaacccgggaggcggaggttgctgtgagtcgagattatgccgctgcactccagcctaggtggcagggtaagactctgtctcaaaaaaaaaaaaaaaaaaaaaaaaaaaaaatactggtaaggatcagtttaccctttgtcggagatggcatctagtttgagagttaccaacaagtttttaaagttgctgcttaattgtaggcactttgtatgtaactggcagctaatatttgctctgggaatgcaaactaaattctataaaaaggcaatgaatcttttgcagaactctggtttaaagtagtctctccttatcagagaggcataggttccaagatccccagtggatggcaactgtggatactacagaaccctctgtcagaacacatttctgtttatgtcttccatccacaaatttaatgcctttttaaaaatcttaactaagcacttatcacacactgtggctgaaagtttttcagtttgaggtgtgatgccgaaactatcaagaatttctttttcttcatatttcaggaatatgattcattcctaccattgtaaccattcttacaactttctattaagtcaagaactttcatcttttcacctaaaggaataattttatggtttctctctggcatatctgaatcaccagcatcactgctcttgcactttgcacacaagcgcaccacactgtacagttgatctgatgactaaaaggtgactgatgtctacaacgtggagactctggacaaagggaggactcacatcctaggcaacacagagcaggcagggaggtttcatcagactgcccagaacagagtacaatttaaaagttacaaattatttcttgaattttccatttaatattttccgactgtgattgacccaaggtaactgaaactgcagaaagcaaaactgcagataagcgggggactagtttactaatttgtcttcagtattacttacaaccatgcctctgaaattttaaagtgcatatgaatcacctggggatcttcttgaaatgcggattcaatacaaattaacagtttgggttcatcaaaagaacaccaaagcctttgaaacgtagataatcttagcaaaattccacagtaggttctccttagagcaacgatccaacaacactcactttacaagatacttttagtatggaatattagactagtattaattataaaataatacaaactgcataattaactacactttatttcatttcctaattgccacggatcagagatttttcaaatggcttcctaattgcagaaatattctgtatatattacccctgggaacttgaattatcatcctttgaaaacgggacctctttaaaagtcaagttggataactgggcacagttggagaagttcctggcaagaaaaaaatttaaattacctaaagaactaatccatggaacaattcattgtaaagctggagtgcctgaaatattgatagaagaggtttacactttattaacacatcgagaaattaaaagtatccaggatgactttgtgaatttcacggactatagctaccagatgcgtttacccctggtttccaggtctacagtttcgaagtctattaaagataacattaggttatcagaattactaagcaatcccaacatgctgaccaatgaacttaaagcggagttcctcatccttttacatatgttgcaaagaaaattaggcagaaaattgaatccagaatggtttgatgtgaaaccaacagtgggagaagttactctcaatcaccttcctgcccaagcctctgggcgcagatataatttaaaagttaaaagaggaagagttgtccctgttttaccaaatataggtagtggtggcagttcacatagagaaatacatgtgaagcaagctggacaacattcttattactctgctatgaaacctatcagaaacatggacaagaaaccttgaaaagcacctgtcaaatggctttgaagaagtgatgccaccatctctagccataataaagaaacagaatcacctagtattggatgtatttcaataataaatagagtggtgtcttttccataa

SEQ ID NO: 185692 - DNA, 403 bp, Homo sapiens
  Payload ID: 16567
  Gene Symbol: SPATA4
  Gene Name: spermatogenesis associated 4
  ENST ID: ENST00000508699
  CDS Start-End: 1-231
aaagggtatttgacacagactgcggcagccctagacaagtcaccgtcactttcgccacagctagcagctcccatccgagggaggcctaagaagtgtctggtctatccgcatgcgccgaagagctcccgcttgtctcgttccgttctgcgttggcttcagggtctggatctcagcttcttccccaggaacatcaacagaaatattctgtatatattacccctgggaacttgaattatcatcctttgaaaacgggacctctttaaaagtcaagttggataactgggcacagttggagaagttcctggcaagaaaaaaatttaaattacctaaagaactaatccatggaacaattcattgtaaagctggagtgcctgaaatattgatagaagaggtttacacttta

SEQ ID NO: 185693 - DNA, 506 bp, Homo sapiens
  Payload ID: 16568
  Gene Symbol: SPATA45
  Gene Name: spermatogenesis associated 45
  Uniprot ID: Q537H7
  ENST ID: ENST00000332912
  CDS Start-End: 109-405
tcccagtgggctaatccacaccagtggacttgaaacacgctttgggttgctgtatggtagtatgctaaaggacagcaagaatcacttgacaattggtttgtgaccataatggcatctataaacagaaccattgaaataatgaaaaaacatggagtaagcaaacaacatctcctggaggagataaacaaaaagcgtgaatccaactgcttggtggaacgaagcaatcaagtcagcttactgagagttcaaaagaggcacttcccggatgcctatcagtcctttactgataccacaaccaaagagcctgttcccaacagtggcaggagctcctggatcaagctgagtctccttgctcacatggagagaaagcactttccaccaaaaaataatgccatatttggataaagtgcatctccagagacacacggaaatacattctctttgattcttcttcagtgtgtctaaattatttacaaattattaattataaacaaagctaaacaaaa

SEQ ID NO: 185694 - DNA, 8137 bp, Homo sapiens
  Payload ID: 16569
  Gene Symbol: SPATA5
  Gene Name: spermatogenesis associated 5
  Uniprot ID: Q8NB90
  ENST ID: ENST00000274008
  CDS Start-End: 70-2751
ttttctctcagttgaagcgcgcacattgagtcggcttttctactgcttcggctagggtaccttgtgaccatgtcttccaagaagaatagaaagcggttgaaccaaagcgcggaaaatggttcgtccttgccctctgctgcttcctcttgtgcggaggcacgggctccttctgctggatcagacttcgcggcaacctccgggactctgacggtgaccaacttattagaaaaggtagatgacaaaattcctaaaacattccagaattcccttattcatcttggactcaacactatgaagtctgcaaatatatgtataggtcgaccagtgttgcttactagtttgaacggaaagcaagaggtgtatacagcctggcctatggcaggatttcctggaggcaaggtcggcctgagtgaaatggcacagaaaaatgtgggtgtgaggcctggtgatgccatccaggtccagcctcttgtgggtgctgtgctacaggctgaggaaatggatgtggcactgagtgacaaagatatggaaattaatgaagaagaactgactggttgtatcctgagaaaactagatggcaagattgttttaccaggcaactttctgtattgtacattctatggacgaccgtacaagctgcaagtattgcgagtgaaaggggcagatggcatgatattgggagggcctcagagtgactctgacactgatgcccaaagaatggcctttgaacagtccagcatggaaaccagtagcctggagttatccttacagctaagccagttagatctggaggatacccagatcccaacatcaagaagtactccttataaaccaattgatgacagaattacaaataaagccagtgatgttttgctggatgttacacagagccctggagatggcagtggacttatgctagaggaagtcacaggtcttaaatgtaattttgaatctgccagagaaggaaatgagcaacttactgaagaagagagactgctaaagttcagcataggagcaaagtgcaatactgatactttttattttatttcttcaacaacaagagtcaattttacagagattgataaaaattcaaaagagcaagacaaccaattcaaagtaacttatgacatgataggaggattaagtagccagctgaaagcaattagagaaataattgaattgcccctcaaacagcctgagcttttcaagagttatggaattcctgcccctagaggagtgttactttatggtcctccaggtactggaaaaacaatgatcgccagggctgttgctaatgaagttggagcctatgtttctgtaattaatggtcctgaaattataagcaaattctatggtgagactgaagcaaagttacgtcagatatttgctgaagccactctacgacacccatcaattatttttattgatgagctggatgcactttgtccgaaaagagagggggcccagaatgaagtggaaaaaagagttgtggcttcactcttaacactgatggatggcattggttcagaagtaagtgaaggacaagtgttggttcttggggccacaaatcgccctcatgccttggatgctgctctccgaagacctgggcgatttgataaagagattgagattggagttcccaatgctcaggaccggctagatattctccagaaactgcttcgaagggtaccccatttgctcactgaggctgagctgctgcagctggcaaatagtgctcatggatacgttggagcagacttgaaagtcttgtgtaatgaagcaggtctctgtgccttgcggagaatcctgaaaaaacagcctaacctccctgatgtcaaggtggctggactggtgaagattactctgaaggatttcttgcaggcaatgaatgatatcagacccagtgccatgagggaaatagcaattgatgtcccaaatgtatcctggtcagatataggaggactggaaagtatcaaactgaagttggaacaggctgtggaatggcccttaaaacatccagagtctttcattcgaatgggtattcagccacctaaaggagttcttctctatgggccacctgggtgctctaaaacaatgatagcaaaggctttggccaatgagagtggactgaattttctagctataaaggggcctgaattaatgaataaatatgttggtgaatctgaaagagcagttagagagaccttccgaaaagcaagagcagtggcgccttccattattttctttgatgaactggatgccttagcagttgaaaggggcagttctttaggtgctgggaatgtagccgatcgtgttttggctcagctcttaacagaaatggatgggattgaacagctaaaggatgtgaccattttggcagctactaaccgtccagataggatagacaaggctttgatgcggcctggaagaattgatagaatcatctatgtgcctttaccggatgcagcaacaagaagggaaatatttaagctgcagtttcactccatgcctgtcagtaatgaagttgacctggatgaactcatccttcaaaccgacgcatactcaggagcagagattgtagctgtctgcagagaggcagctcttctggctctggaagaagacattcaagccaatctcatcatgaaaagacatttcactcaggccttgagcactgtgacacctagaattcctgagtcattgagacgtttttatgaagattatcaagagaagagtgggctgcatacactctgagaaaatatatatattcaagatgctgaaaatcctttccagagaaaatttgtttctttttaaaattttttgagagtgttaaaaaaaattttactaggcaaaatgtttgaagtatgttcagtagaatttaggggctttggttcttacagattttcaagtcatgtaagtacagtgaaaatatctctgagcataagtttcaatcagttttacctggaaatttgtggtgtggtttaaaaaacaaatgtttagctttttcatttgcgacctagtctgttcatcccatgaagcgatttctttttccagaatctgtttgagtgtctttctaaaatgccaaacatgttggcatcaattttatacagggatataaaaaagtatatgtggataaattttttgtaatctttagggatataaaaaagtgtatgtggataaattttttgtaatctttatttttgaaggccagccagtaaaatggcccaatgtgccagccaggcttatgtggccttgttttcaaatatacatatatgtgttatcattaaaattcatatatgcatttttgttttagccttcttaatctctacctatggccaaaaaaattttttttgagagatattttgtataatacaatgccctttgaaagtgtaagcccactctaagcctagatcagtaggcttgggttttttttgttgttgttttgtcttttttttttttttttgagacagagtctcactctgtcacctaagctggagtgcagtggcacgatcttggctcactgcaacctccgcctcctgagttcaagcaattctcctgcctcaacctcctgagtagctgggactacaggtgtgcaccaccacacgcagctaatttttatatttttagtagagacaaggtttcaccatgttagccaggccggtctcgaactgctggcctcaggtgacccacccacctgagcctcccaaagtgctgggattacaggcgtgagccaccatacctggagaggttttgtgtttttgtttttttttcataaaatgcttttaataaatcatatgaagcattcatgtttttacttatacatattttcagggtaccagtaaactttttagttcaaagataggccaaattgtacttttttttttttatgagacagagtctcgctgctctgtcgcccaggctagagtgcagtggcgtgatctaggctcactgcaagctctgcctcctgggtttacttacgccattctcccgcctcagcctcctgagtagctgggactacaggtgcccaccaccatgcctggctaatttttttttttttttttttttattagagacagggtttcaccgtgttagccaggatgatctcgatctcctgacctcgtgatccgcccgcctcggcctcccaaagtgctgggattacaggcatgagctactgcgccctgccgccaaattgtaatcttaaacatattatgttgcattctaaatatgtatatttatgcttcttgttatttatcctcaggatttcttcacactttattacttcataaatactcttgaaaaagctttcagaaagtgattctctgacttcagatcagaaactggcaatgggaagaatgtgcacttaaacttgatcactgtagatctttgaaaattcccagaaagacaaatcagacaagaaatacctgattatcaaaataatgggctatacagttttgtggtggcatacattccttgtttgtttgtttagagataggatcttgttgtgtcacccaggctggaatgcagtggcacagtcgtagctcactgcaccttcaaactcctggagctcaagtgatcctcctgactcagcctcctgagtagctaggacaacaggtgcacactgccatgtcaggctaatttttttttttaaacagagagacagagtcttgctgtgttgcccaggctggtctccaactcctggcctcaggtgaccctcctgcctcagcttcccaaagggctgagattacaggtgtgagccaccatgcccagcctgtggtgacatatattctgaagtcacatctcaaatatttaatcctcaaatatatttacatcctcaaaaatatcagattttcaagacaacactggtttaccagtacataaacccacctaggggacaaagaatattaccacttagaactgtgttgtcaaatacaataaccactaattgtatctgaccattttaattaaattaattacaattaaataatatttaagaattagtttatcagacatatcagccacatttcaaatgctcaatagctacatgtggcaagggtctgccacactggacagagtagaaaacattcccatcattcagaaggttctcttggacgctgcagatctggaaaacaagacttccatattgaaataaatacaacctcaaaacttttatgctctgtgttccctttagttgttatctacatagaaaattatgaaacaagagaggaacttaccttcttccctattaaatatatggctaagggcacaagaaaataagaggaaaacttatccttcagggcctaaacaaggaaatgaaagaaatctcattcccaatagaataaaaaccagaagcttgaaatgactctggtgcaggaggctgggtggtggggaggagggtagcagtctcaatcaacaagtttagatattaatagccactcaaagccttcagcccatataacatgaagtgacaactgagctctgcacataatgctcaagctctataataaccaacactctcagcacaagggtagacaagaaaagaaaaatctcctgctggccaggaagaccacaaggaggctttctgacttggcctgtgcttttgatttttaaaacattttttaaaagaggcctctctgggctgggcgcggtggctcatgcctgtaatcccagcactttgggaggccgaggcaggcggatcacgaggtcagaagatcaagaccatcctggctaacacagtgaaaccccgtctctactaaaaattcaaaaaattagccgggaatggtggtgggcgcctgtagtcccagttactcgggaggctgaggcaggagaatggcgtaaacccgggagacggagcttgcagtgagctgagattgcgccactgcactccagcctgggtgacagagtgagactccgtctcaaaaaaaaaaaaaaaaaaacctctgagaattctgactatgagcttacctgcccatggctttagaatgatttgaattcacactaccttcaaattcatgaaacctcaaaacctacaaattaacctaaaaacatggagccaagctaaaaatgccctgggggtaactagcacttggactagttacaggaatgtagcttcgtctcagaggattccaaaagctaatgccttgcttaccaagggcttgtaatctcacaggatgtgatgggtggggcctcagatctgctgatgggagcataaattggtacaaccactttggaaggcaactggctatctagcaaagttgaagaccctacaatctaacagttctcctaggtgcatatcccagagcaagtctcacattgatgcagtgagatagtgaataggaaagttcatagcaccattatttttaagtagtaagaacccggaaacaatctaaatatccatcagtaatagatatatgtgatagtcatacaatggaatactgtggcaataaaaaataattagagctacatatgaaatagggatgaaacatggatgaacaaagaatgttttagaggaatatgatatttaaaatttgaagcatgaaaaatatgtgtttatgggggcatatatagtggaagaataaatgaatagaaaagaaaagcaccaaatactggtgaggaatttcctcaggggagaaaagttgagctgcttcaattgtgtcagtaatgtttcatatcttagggtgggtgatgggaatataggtgctgatttaatatagtctgtactttttgtgtacctaaatatttcgtgataatttttaaaagatgggccttaaaccaatacagtcatatcatttaactcaattccatgaatttacaatgcaatccacagtgcccacaaccccatgtttctggaaaatcaggagtattgggtacaatggaataaaatgcaagaaggcaaataagagatcaggcttttaggacctaggaaacaaataaagaggaatttgttgctgaaagtaatgtgtagctgacactctcattacctgacacaatgggagacattatgtctgggaataagacatctatttccatagcactgtagtcctgcaaaggagttggaagttatgaatttttaaagattttagaacattatatctttagtctctcataagccaattatttatatctccacatagcccattattaccattgaaaaggcatgcaattcttctatttgaagcttgttccctttttacaaaagtactagtaaaaatctgagtcatacaaaagagcaggtcaggtgtcactaataacagtttacctcagcttcatctccatgaaggttttacttctaatcccagagtctcatgtttatgtattacaagagtgtatgaaagctgggcatggtggcacacaccagtagtcccagctactcggtcgggggttgaggtgagaggatcgcttgaactcaggagtttgaatccagcctggtcaatgtagcgagatcctatctcttaaaaaaaaaaaaaaaaggggggaacagtgtatgatcctattatttgggtttgtgtgtgatcgaatacatggtatatagttcatggaaaatttaagctcagcaaggaaagaaaatggccagcttcctgtcttaggaagacaatttactttttggcatctgtttggttgaaagtttgcctttgatccagattctttcggatgtcagggatattcacattgacatgtctttttagtgttccaggagattttagtttgaatagtacaattttttcttcttacaacaaaacttagaacggcttctaacttatttcttcatggccaagaaactaccctaacttatctcgataaatatttagttctgtcttatttctaatgtgtaaaacaggttttaaaaataatatatagattttgcatttataaaaaaagatttaatttatagaaccaaacttgaacatatgtttaatttagcctaatcagaaggttacagaaaaagttgctgtaaagatagaataaaggtattgtactggtctgtttttactgaagttccagaatgtgaggttattagagtcttggcttattgtgtcatgttttcctgaatgcttcctttgaagatgagcacacaccaaagcatcctttgatattatgtatggattaaattaacactgctttccaaatgtggtccacatagaaa

SEQ ID NO: 185695 - DNA, 2570 bp, Homo sapiens
  Payload ID: 16570
  Gene Symbol: SPATA5L1
  Gene Name: spermatogenesis associated 5-like 1
  Uniprot ID: Q9BVQ7
  ENST ID: ENST00000305560
  CDS Start-End: 100-2361
cgcgcaatctgcttccggcctgcgagctcggtgttccgctttttgtgggccgggtgggtttcctaatctggtttcgtctgcctggttcatctgtgtgcgatggctccggactcggatcccttccctgaagggccgctcttaaagctgctacccttagacgctagagaccggggcacccagcgctgccgcctgggcccggccgccctccacgccctgggcgcgcgcttgggctcggcagtgaagatctcgctacccgacggcggctcctgcctctgcactgcctggcctcggcgggacggagcggacggctttgtgcagctggacccgctgtgcgcgagccccggggcggcggtcggggcgtcgagatcccggaggagtctcagcctgaatcgcctcctcctagtgccctgtccgcccctgcggcgcgtcgccgtgtggccggtgttgcgagagcgggcaggcgcgcccggtgcccggaatacagccgcggtgctggaggcggcacaggagctgctgagaaaccgaccgatctccctgggccacgtggtggtcgctccgccaggcgctcctggcctggtggctgccttgcacatcgtcggcgggacgcccagtcccgatcccgctgggctggtcacccctcgtacccgcgtcagccttggcggggagcctccgtcggaagcccagccgcagcccgaggtgcccctgggaggtctttcggaggcggccgactcgctgcgggagctcctccgcctcccgctccgctacccgcgcgccctgaccgcgctgggcttagcggtgcctcgcggggtgctcctggcggggccccccggagtgggcaagacccagctggtgcgggccgtggcgcgcgaggcgggcgcggagctgctggcagtcagcgccccggcgctgcagggttcccggcctggggagaccgaggagaacgtgcggcgggtcttccagcgcgcccgggaactggccagccgcggacccagcctcctcttcctggacgagatggacgccttgtgtccccagcggggcagtcgagcacccgagagccgcgtagtggcccaggtgttgacgctgctggacggcgccagtggggaccgcgaggtcgtggttgtgggagccactaaccggccggacgctctagacccagcgctgcgtaggcccgggagatttgaccgagaggtggtcattgggactcccacacttaaacaaagaaaggaaattctgcaagtgattacctcgaagatgcccatctccagtcatgttgatttgggccttcttgcagaaatgacagttggctatgttggtgccgacctgacagcactctgtagggaggctgccatgcatgccctccttcatagtgagaagaaccaggacaatcctgtgattgatgaaatagacttccttgaagcttttaaaaatattcagccctcatcgtttcgaagcgtcattggattaatggatatcaagcctgttgactgggaggagattggtggccttgaagatgtaaaactgaagttaaaacagagcattgagtggcctctgaaattcccttgggaatttgttagaatgggcctgacacaaccaaagggagttctcctctatgggccccctggatgtgctaaaaccactctggtgagggccctggccacaagctgtcactgctctttcgtttcagtgagtggagctgatctgttttcaccgtttgttggagattcagaaaaagtgttgtctcagatatttcgacaagcaagagcaagcactccagcaattttgtttttggatgaaattgattcaatcttgggagctcgctcagccagcaagacaggatgtgatgttcaagaacgagttctttctgttctcctgaatgaattagatggtgttggacttaagacaatagagagaagaggaagtaaatcaagtcaacaggagtttcaagaagtttttaaccgaagtgtcatgattattgcagcaacaaatagacctgatgtgttagatactgctttgttacgacctggaagattagataagatcatctatatcccacctccagatcacaagggcaggctttctattttaaaagtctgtacaaaaaccatgccaatagggcctgatgtctccttagaaaacctcgcagcagaaacctgttttttttctggagctgatcttagaaacctctgcacagaagctgctttgctggctctgcaagaaaatggactagacgcaactacagtgaaacaagagcactttctaaaatcacttaagactgtaaaaccgtcgttaagttgcaaggacttggctttatatgaaaacttatttaagaaagaaggattttctaacgtggaaggtatttaaaaatcaccttaaactcttgttcagttcacattaattgaaatgtgaacttgcctgtcgtttgcaacttcacacttttagaatttgtgtttatatttcctgtaagtgaataaataaaacaaaacaaaacaaaaaaaacttgtgcctgataagctaaggctcatttatttttaaaaggcatattaaataaaatactgtaatttaggaagaaa

SEQ ID NO: 185696 - DNA, 944 bp, Homo sapiens
  Payload ID: 16570
  Gene Symbol: SPATA5L1
  Gene Name: spermatogenesis associated 5-like 1
  ENST ID: ENST00000531624
  CDS Start-End: 1-776
accaggacaatcctgtgattgatgaaatagacttccttgaagcttttaaaaatattcagccctcatcgtttcgaagcgtcattggattaatggatatcaagcctgttgactgggaggagattggtggccttgaagatgtaaaactgaagttaaaacagatatttcgacaagcaagagcaagcactccagcaattttgtttttggatgaaattgattcaatcttgggagctcgctcagccagcaagacaggatgtgatgttcaagaacgagttctttctgttctcctgaatgaattagatggtgttggacttaagacaatagagagaagaggaagtaaatcaagtcaacaggagtttcaagaagtttttaaccgaagtgtcatgattattgcagcaacaaatagacctgatgtgttagatactgctttgttacgacctggaagattagataagatcatctatatcccacctccagatcacaagggcaggctttctattttaaaagtctgtacaaaaaccatgccaatagggcctgatgtctccttagaaaacctcgcagcagaaacctgttttttttctggagctgatcttagaaacctctgcacagaagctgctttgctggctctgcaagaaaatggactagacgcaactacagtgaaacaagagcactttctaaaatcacttaagactgtaaaaccgtcgttaagttgcaaggacttggctttatatgaaaacttatttaagaaagaaggattttctaacgtggaaggtatttaaaaatcaccttaaactcttgttcagttcacattaattgaaatgtgaacttgcctgtcgtttgcaacttcacacttttagaatttgtgtttatatttcctgtaagtgaataaataaaacaaaacaaaacaaaaaaaacttgtgcctgataagctaaggctcatttatttt

SEQ ID NO: 185697 - DNA, 2464 bp, Homo sapiens
  Payload ID: 16570
  Gene Symbol: SPATA5L1
  Gene Name: spermatogenesis associated 5-like 1
  Uniprot ID: Q9BVQ7
  ENST ID: ENST00000531970
  CDS Start-End: 56-1918
gtgggccgggtgggtttcctaatctggtttcgtctgcctggttcatctgtgtgcgatggctccggactcggatcccttccctgaagggccgctcttaaagctgctacccttagacgctagagaccggggcacccagcgctgccgcctgggcccggccgccctccacgccctgggcgcgcgcttgggctcggcagtgaagatctcgctacccgacggcggctcctgcctctgcactgcctggcctcggcgggacggagcggacggctttgtgcagctggacccgctgtgcgcgagccccggggcggcggtcggggcgtcgagatcccggaggagtctcagcctgaatcgcctcctcctagtgccctgtccgcccctgcggcgcgtcgccgtgtggccggtgttgcgagagcgggcaggcgcgcccggtgcccggaatacagccgcggtgctggaggcggcacaggagctgctgagaaaccgaccgatctccctgggccacgtggtggtcgctccgccaggcgctcctggcctggtggctgccttgcacatcgtcggcgggacgcccagtcccgatcccgctgggctggtcacccctcgtacccgcgtcagccttggcggggagcctccgtcggaagcccagccgcagcccgaggtgcccctgggaggtctttcggaggcggccgactcgctgcgggagctcctccgcctcccgctccgctacccgcgcgccctgaccgcgctgggcttagcggtgcctcgcggggtgctcctggcggggccccccggagtgggcaagacccagctggtgcgggccgtggcgcgcgaggcgggcgcggagctgctggcagtcagcgccccggcgctgcagggttcccggcctggggagaccgaggagaacgtgcggcgggtcttccagcgcgcccgggaactggccagccgcggacccagcctcctcttcctggacgagatggacgccttgtgtccccagcggggcagtcgagcacccgagagccgcgtagtggcccaggtgttgacgctgctggacggcgccagtggggaccgcgaggtcgtggttgtgggagccactaaccggccggacgctctagacccagcgctgcgtaggcccgggagatttgaccgagaggtggtcattgggactcccacacttaaacaaagaaaggaaattctgcaagtgattacctcgaagatgcccatctccagtcatgttgatttgggccttcttgcagaaatgacagttggctatgttggtgccgacctgacagcactctgtagggaggctgccatgcatgccctccttcatagtgagaagaaccaggacaatcctgtgattgatgaaatagacttccttgaagcttttaaaaatattcagccctcatcgtttcgaagcgtcattggattaatggatatcaagcctgttgactgggaggagattggtggccttgaagatgtaaaactgaagttaaaacagagcattgagtggcctctgaaattcccttgggaatttgttagaatgggcctgacacaaccaaagggagttctcctctatgggccccctggatgtgctaaaaccactctggtgagggccctggccacaagctgtcactgctctttcgtttcagtgagtggagctgatctgttttcaccgtttgttggagattcagaaaaagtgttgtctcagatatttcgacaagcaagagcaagcactccagcaattttgtttttggatgaaattgattcaatcttgggagctcgctcagccagcaagacaggatgtgatgttcaagaacgagttctttctgttctcctgaatgaattagatggtgttggacttaagacaatagagagaagaggaagtaaatcaagtcaacagggtaaatacaaggagctgaaaaaatgaagagagtttcaagaagtttttaaccgaagtgtcatgattattgcagcaacaaatagacctgatgtgttagatactgctttgttacgacctggaagattagataagatcatctatatcccacctccagatcacaagggcaggctttctattttaaaagtctgtacaaaaaccatgccaatagggcctgatgtctccttagaaaacctcgcagcagaaacctgttttttttctggagctgatcttagaaacctctgcacagaagctgctttgctggctctgcaagaaaatggactagacgcaactacagtgaaacaagagcactttctaaaatcacttaagactgtaaaaccgtcgttaagttgcaaggacttggctttatatgaaaacttatttaagaaagaaggattttctaacgtggaaggtatttaaaaatcaccttaaactcttgttcagttcacattaattgaaatgtgaacttgcctgtcgtttgcaacttcacacttttagaatttgtgtttatatttcctgtaagtgaataaataaaac

SEQ ID NO: 185698 - DNA, 362 bp, Homo sapiens
  Payload ID: 16570
  Gene Symbol: SPATA5L1
  Gene Name: spermatogenesis associated 5-like 1
  ENST ID: ENST00000525552
  CDS Start-End: 1-59
cactctgtagggaggctgccatgcatgccctccttcatagtgagaagttccaggtttgaccataagcacctctcacttaggtggaccagtcagctgctgtcgtcccagggtggagcccactgctacttcaggaggggcctgctcaggtgtagttaccacaggtgatggctgagttcagaaacaacccaggggaagtggaaggaagaaaggcaaaaagcatgaagggacagacaactgggaagaaccaggacaatcctgtgattgatgaaatagacttccttgaagcttttaaaaatattcagccctcatcgtttcgaagcgtcattggattaatggatatcaagcctgttgactgggaggag

SEQ ID NO: 185699 - DNA, 818 bp, Homo sapiens
  Payload ID: 16571
  Gene Symbol: SPATA6
  Gene Name: spermatogenesis associated 6
  ENST ID: ENST00000371841
  CDS Start-End: 70-818
attgaacaaggtggagaaggtccagaagcataccatgaactacagaagaaggaaagatggagtaatctgatgcaactggataaatttatttaccatttggctccagttgaaaaatcacatggcagactgcaaaacagaacatcaagatcacaaaagaaaaaatccaagtcacctgagagaagtaaatactgtataaatgcaaaaaactacgaacagcctacaatttcttcaaaatcacactctccatctccctacacaaaaagacgcatgtgtgagctatctgaagacaccaggcggcggctggcccatttaaatctgggaccctatgagttcaaaaaagaaacagataaacctccatttgtgattagacatgttgatcccccaagtcccagggctgatactttattgggatcttctggaagagactgtgaaagagatggatggtcaagggtgcacaatgatcattctcatcttggctgctgccgacccaaggattataaggttatcaggacaccccatgggagagacttcgatgactctttagaaaaatgtgaagagtatttgagcccaaggtcgtgtagtaagccccggcattcagcgaggaccttgctagtccattcagcaccctcaacaatgccaaagcattctccaagccctgtgttaaatagagcttctctcagggaaagatttcattctgattggtgttcaccttcaaactgcgatgagatccatgaccgggatgagagagacctagagaaagatgatgaactggaactgaaaagaagtcttttatgtagagactctgcctatgacagtga

SEQ ID NO: 185700 - DNA, 2297 bp, Homo sapiens
  Payload ID: 16571
  Gene Symbol: SPATA6
  Gene Name: spermatogenesis associated 6
  Uniprot ID: Q9NWH7
  ENST ID: ENST00000371843
  CDS Start-End: 3-1421
ggatgccgaaggtgaaggcgctgcagtgcgccctggcgctggagatcagctcagtaacttgcccaggagtcgtgcttaaagacaaagaggacatctatcttagcatctgtgtgtttggccaatacaaaaagacacaatgtgtcccagccacttttcccctggtcttcaatgccagaatggtgtttgaaaaggtgttcccggacgcagtagatcctggagatgtggttacacagcttgaatatgatacagcagtgttcgagttgatacagctagttccaccagtgggtgaaacactgtctacgtatgacgaaaatacacgagatttcatgtttccgggtccaaaccaaatgtctggacaccatgattcaaaccgccaggttaccatgaggaggatttctggccttcgaggaaatgctccaaggctggaattttctacgacttcagtgattactgaatgtctgataagttcaaggaaatgccacactcaggataaatttatttaccatttggctccagttgaaaaatcacatggcagactgcaaaacagaacatcaagatcacaaaagaaaaaatccaagtcacctgagagaagtaaatactgtataaatgcaaaaaactacgaacagcctacaatttcttcaaaatcacactctccatctccctacacaaaaagacgcatgtgtgagctatctgaagacaccaggcggcggctggcccatttaaatctgggaccctatgagttcaaaaaagaaacagataaacctccatttgtgattagacatgttgatcccccaagtcccagggctgatactttattgggatcttctggaagagactgtgaaagagatggatggtcaagggtgcacaatgatcattctcatcttggctgctgccgacccaaggattataaggttatcaggacaccccatgggagagacttcgatgactctttagaaaaatgtgaagagtatttgagcccaaggtcgtgtagtaagccccggcattcagcgaggaccttgctagtccattcagcaccctcaacaatgccaaagcattctccaagccctgtgttaaatagagcttctctcagggaaagatttcattctgattggtgttcaccttcaaactgcgatgagatccatgaccgggatgagagagacctagagaaagatgatgaactggaactgaaaagaagtcttttatgtagagactctgcctatgacagtgaccccgagtatagctcatgtcagcagccacgtggcactttccatttggatgacggtgaatactggtccaacagggcagcctcttataagggaaaatcccaccgacccatctttgagaacagcatggacaagatgtacaggaacttatacaaaaaggcctgtagttctgcttcacatacacaggaaagcttctgagaccatccatgataaacctcattagtgtccgtgtcaatttctcaatgaaaatgtttgatgtgatcaatatctgtattcctttttttaaaaaaaatgggattataactaagtacaatagttatacttgaataagttcattacttcaaatggtaaattatcataggcaagccttttaaaataattattacagaagagtctgctgtgttacaaacattagagctctgtcacacaatcacaacttccaatatgtgacaaggatattctgttacatgtacacctcatattccatctgcaaatccaagaatagttcctttctagaaatgttttttttgccttactcaccttgcaattttcttctcatctacttaactggttatcttgcctgtgtaagatttaattaatattgactaccttttcttggtgatgaacaaaatgatatcctatacagaaatgaatttcctaagggtttaaaccctgttttcactaacattttctactttttcctttttcagaacaggctattctatttcttagctcataggctttctttttaaagactatatgatcattcactcctttttctctggaagaactgtgtaagttgcttaaaatgcatagcagttagctagaaatatcagtgccatggatgatcaaaaatttgaataactaatttttaaagataaaattctttgcatgattttttttctagggccataccttttggtgcaaccagaatcagaaaatggcctctgttagtaagcttatagaaacctaaaaataataatggaattatattgtaatttgactgcttggaatttgtgtaagtaccatatggcccaaggcactattatagtatcctcactttaaaaaaaaaaa

SEQ ID NO: 185701 - DNA, 4973 bp, Homo sapiens
  Payload ID: 16571
  Gene Symbol: SPATA6
  Gene Name: spermatogenesis associated 6
  Uniprot ID: Q9NWH7
  ENST ID: ENST00000371847
  CDS Start-End: 166-1632
gcttctccggcggaacccaggctggaccgcgggccccggcctgggggccactgctgccaccgccgccgccacctcgtctcctccccgtccccgcccagccccaggtctccccgcctcactcgggcccgtggccggggtcactccccgccgcccctccccgcacggatgccgaaggtgaaggcgctgcagtgcgccctggcgctggagatcagctcagtaacttgcccaggagtcgtgcttaaagacaaagaggacatctatcttagcatctgtgtgtttggccaatacaaaaagacacaatgtgtcccagccacttttcccctggtcttcaatgccagaatggtgtttgaaaaggtgttcccggacgcagtagatcctggagatgtggttacacagcttgaatatgatacagcagtgttcgagttgatacagctagttccaccagtgggtgaaacactgtctacgtatgacgaaaatacacgagatttcatgtttccgggtccaaaccaaatgtctggacaccatgattcaaaccgccaggttaccatgaggaggatttctggccttcgaggaaatgctccaaggctggaattttctacgacttcagtgattactgaatgtctgataagttcaaggaaatgccacactcaggataaatttatttaccatttggctccagttgaaaaatcacatggcagactgcaaaacagaacatcaagatcacaaaagaaaaaatccaagtcacctgagagaagtaaatactgtataaatgcaaaaaactacgaacagcctacaatttcttcaaaatcacactctccatctccctacacaaaaagacgcatgtgtgagctatctgaagacaccaggcggcggctggcccatttaaatctgggaccctatgagttcaaaaaagaaacagataaacctccatttgtgattagacatgttgatcccccaagtcccagggctgatactttattgggatcttctggaagagactgtgaaagagatggatggtcaagggtgcacaatgatcattctcatcttggctgctgccgacccaaggattataaggttatcaggacaccccatgggagagacttcgatgactctttagaaaaatgtgaagagtatttgagcccaaggtcgtgtagtaagccccggcattcagcgaggaccttgctagtccattcagcaccctcaacaatgccaaagcattctccaagccctgtgttaaatagagcttctctcagggaaagatttcattctgattggtgttcaccttcaaactgcgatgagatccatgaccgggtaaaaaatgtcttgaaatcacatcaggctcatcaaagacatttatatgatgagagagacctagagaaagatgatgaactggaactgaaaagaagtcttttatgtagagactctgcctatgacagtgaccccgagtatagctcatgtcagcagccacgtggcactttccatttggatgacggtgaatactggtccaacagggcagcctcttataagggaaaatcccaccgacccatctttgagaacagcatggacaagatgtacaggaacttatacaaaaaggcctgtagttctgcttcacatacacaggaaagcttctgagaccatccatgataaacctcattagtgtccgtgtcaatttctcaatgaaaatgtttgatgtgatcaatatctgtattcctttttttaaaaaaaatgggattataactaagtacaatagttatacttgaataagttcattacttcaaatggtaaattatcataggcaagccttttaaaataattattacagaagagtctgctgtgttacaaacattagagctctgtcacacaatcacaacttccaatatgtgacaaggatattctgttacatgtacacctcatattccatctgcaaatccaagaatagttcctttctagaaatgttttttttgccttactcaccttgcaattttcttctcatctacttaactggttatcttgcctgtgtaagatttaattaatattgactaccttttcttggtgatgaacaaaatgatatcctatacagaaatgaatttcctaagggtttaaaccctgttttcactaacattttctactttttcctttttcagaacaggctattctatttcttagctcataggctttctttttaaagactatatgatcattcactcctttttctctggaagaactgtgtaagttgcttaaaatgcatagcagttagctagaaatatcagtgccatggatgatcaaaaatttgaataactaatttttaaagataaaattctttgcatgattttttttctagggccataccttttggtgcaaccagaatcagaaaatggcctctgttagtaagcttatagaaacctaaaaataataatggaattatattgtaatttgactgcttggaatttgtgtaagtaccatatggcccaaggcactattatagtatcctcactttaaaaaaaaaaacacttggaaccacaatgtgagtaaaatattatagcagaacgctttgtggtagacactgaaaatgttgttgattgatggatagaattaacttctcctcccccaccccagcacacacctgtgaagccaatgatactataaagacataaagaaatcagctactttatatttaatagagagtgaggggagggaaaggagagtgtaggaataagtgaactgggcttatagtcttgaagagttgcctaaaagataatattttctcattgactctgtttttgattaattttacagttatgattgaaaaagaacaaaatgaacttcctttaaaatgaaattaaaatgtgaaacttgctgacttatttttgtagtagaacttgttaacatcatgttaagggtgctttagtatcacagtctgtgatatatcagaaagggcattagagctatctctatgagccaggagtcctaggctttagtatcccatgtctgccgttttctagctgagtctatttaattctcagatcctttgtttcctcagctatcaaatgataagaatgtagtagaccccaaactatgttctgtggaccaagatcactgttttaggagataatcgtaggaatgtaggtataagtatgtaattggccatctaagtttaggaaaatctgtttgctacacacatacacacacacacacacacacacacacacacacacacacctcttagagagtcatatgtaggattatagaggtaaaaagagatgatattaatgctggaatagcgcctgtaaactggggctgtctacagcaaattaggatatatggtcactgtgctcattgtgaacagtagcttgttcgaggctttaagaaaattctggtataaatctgtcttactctgcatctagtagacagcctggcatgtaattgatgttccttaaatatttatcgaattaacccagaattttctaaactaaatttagcatgtaccactatttgttattcttgccaccaccccccattcccctagctcctcacactacctgccaatgtcatcctaaggtacatgtggatacctaggttgtagaaatgctggactacacaattgctgagttactctctggctgtagattatatgatgaggtattttacaatcagcttttgaaggtcaacattgaataatgctcttttaaaaaaattatatcctcagtgtttttccatggaaaaataagtgaaaattcttttaagagttgctgtttggtgaaaagaacaaacatgactttcaaagaaaatgttttactatcaccaaaatctcccaagtgaataagtaccacagaaattacttattgcacctgtatctgccattggctgtgaaaaaggctgcaaaaagtagggctgaaagggaaactttagaaactaatactctgaaagatgttttcctatggattaaatttagtgtctttctgaaagttgggggcaaattcccagatactaatagcatctttgctaagtgtctgattatcttctatcccctaggaggaaagagtggtccatgttgctgtaactactactatgagtgcttatgctgtattgtttttaaagagtaaaacctttaagtactaatagttgtcttttctcattcacaggagcagaaaggtgcagttgtttattctcttagccttttttttttcctgtatttcccacaaatctagaaataattattggagttaatatgaaagataaataggcttttctttttactttttaatttttttctttaaatcataaaaaaccttgggatttagaaaaatgtcaaaatcgacaaataaagatgaatcattggaatgagactcttccttggttctactagctagttatataaccttatttaagtcatttatgcttcttggagctcagttttctcaccaacaaggtgataaaagggttaatttagaatgatcctttgacatttcataattgtacaattaatatgtacgatcaggaagtcctaggcaggcagagttgttttctgatttccaaagattaagcccctgatgaaaaatctggaacaaatagagaattttcattattgtgttcatttgctaataatagctttattgagatataattcactctgaaaaagtatacaattaagtggtttttactatattcacagagttgtgcaacaataaccactcactaattacagaatattttataactcccaaaagaaatcctgtaaccattagtgatcacttcccactacctcctccccacaactcctggaaaccactatatgctttttgtctccatgcctattctggacatttcatataaatggaaccatacaacatgtgacctattgtatgtggcttctttcacttagcaaaatattttgagagttcatgcatgttgtaacacgtatgaatacttcattcctttttattactaaataataatccatcatatgaatatac

SEQ ID NO: 185702 - DNA, 4964 bp, Homo sapiens
  Payload ID: 16571
  Gene Symbol: SPATA6
  Gene Name: spermatogenesis associated 6
  ENST ID: ENST00000396199
  CDS Start-End: 201-1625
tgccatgacaacgagtctgcgccccgcgctcagctgcttctccggcggaacccaggctggaccgcgggccccggcctgggggccactgctgccaccgccgccgccacctcgtctcctccccgtccccgcccagccccaggtctccccgcctcactcgggcccgtggccggggtcactccccgccgcccctccccgcacggatgccgaaggtgaaggcgctgcagtgcgccctggcgctggagatcagctcagtaacttgcccaggagtcgtgcttaaagacaaagaggacatctatcttagcatctgtgtgtttggccaatacaaaaagacacaatgtgtcccagccacttttcccctggtcttcaatgccagaatggtgtttgaaaaggtgttcccggacgcagtagatcctggagatgtggttacacagcttgaattgggtgaaacactgtctacgtatgacgaaaatacacgagatttcatgtttccgggtccaaaccaaatgtctggacaccatgattcaaaccgccaggttaccatgaggaggatttctggccttcgaggaaatgctccaaggctggaattttctacgacttcagtgattactgaatgtctgataagttcaaggaaatgccacactcaggataaatttatttaccatttggctccagttgaaaaatcacatggcagactgcaaaacagaacatcaagatcacaaaagaaaaaatccaagtcacctgagagaagtaaatactgtataaatgcaaaaaactacgaacagcctacaatttcttcaaaatcacactctccatctccctacacaaaaagacgcatgtgtgagctatctgaagacaccaggcggcggctggcccatttaaatctgggaccctatgagttcaaaaaagaaacagataaacctccatttgtgattagacatgttgatcccccaagtcccagggctgatactttattgggatcttctggaagagactgtgaaagagatggatggtcaagggtgcacaatgatcattctcatcttggctgctgccgacccaaggattataaggttatcaggacaccccatgggagagacttcgatgactctttagaaaaatgtgaagagtatttgagcccaaggtcgtgtagtaagccccggcattcagcgaggaccttgctagtccattcagcaccctcaacaatgccaaagcattctccaagccctgtgttaaatagagcttctctcagggaaagatttcattctgattggtgttcaccttcaaactgcgatgagatccatgaccgggtaaaaaatgtcttgaaatcacatcaggctcatcaaagacatttatatgatgagagagacctagagaaagatgatgaactggaactgaaaagaagtcttttatgtagagactctgcctatgacagtgaccccgagtatagctcatgtcagcagccacgtggcactttccatttggatgacggtgaatactggtccaacagggcagcctcttataagggaaaatcccaccgacccatctttgagaacagcatggacaagatgtacaggaacttatacaaaaaggcctgtagttctgcttcacatacacaggaaagcttctgagaccatccatgataaacctcattagtgtccgtgtcaatttctcaatgaaaatgtttgatgtgatcaatatctgtattcctttttttaaaaaaaatgggattataactaagtacaatagttatacttgaataagttcattacttcaaatggtaaattatcataggcaagccttttaaaataattattacagaagagtctgctgtgttacaaacattagagctctgtcacacaatcacaacttccaatatgtgacaaggatattctgttacatgtacacctcatattccatctgcaaatccaagaatagttcctttctagaaatgttttttttgccttactcaccttgcaattttcttctcatctacttaactggttatcttgcctgtgtaagatttaattaatattgactaccttttcttggtgatgaacaaaatgatatcctatacagaaatgaatttcctaagggtttaaaccctgttttcactaacattttctactttttcctttttcagaacaggctattctatttcttagctcataggctttctttttaaagactatatgatcattcactcctttttctctggaagaactgtgtaagttgcttaaaatgcatagcagttagctagaaatatcagtgccatggatgatcaaaaatttgaataactaatttttaaagataaaattctttgcatgattttttttctagggccataccttttggtgcaaccagaatcagaaaatggcctctgttagtaagcttatagaaacctaaaaataataatggaattatattgtaatttgactgcttggaatttgtgtaagtaccatatggcccaaggcactattatagtatcctcactttaaaaaaaaaaacacttggaaccacaatgtgagtaaaatattatagcagaacgctttgtggtagacactgaaaatgttgttgattgatggatagaattaacttctcctcccccaccccagcacacacctgtgaagccaatgatactataaagacataaagaaatcagctactttatatttaatagagagtgaggggagggaaaggagagtgtaggaataagtgaactgggcttatagtcttgaagagttgcctaaaagataatattttctcattgactctgtttttgattaattttacagttatgattgaaaaagaacaaaatgaacttcctttaaaatgaaattaaaatgtgaaacttgctgacttatttttgtagtagaacttgttaacatcatgttaagggtgctttagtatcacagtctgtgatatatcagaaagggcattagagctatctctatgagccaggagtcctaggctttagtatcccatgtctgccgttttctagctgagtctatttaattctcagatcctttgtttcctcagctatcaaatgataagaatgtagtagaccccaaactatgttctgtggaccaagatcactgttttaggagataatcgtaggaatgtaggtataagtatgtaattggccatctaagtttaggaaaatctgtttgctacacacatacacacacacacacacacacacacacacacacacacacctcttagagagtcatatgtaggattatagaggtaaaaagagatgatattaatgctggaatagcgcctgtaaactggggctgtctacagcaaattaggatatatggtcactgtgctcattgtgaacagtagcttgttcgaggctttaagaaaattctggtataaatctgtcttactctgcatctagtagacagcctggcatgtaattgatgttccttaaatatttatcgaattaacccagaattttctaaactaaatttagcatgtaccactatttgttattcttgccaccaccccccattcccctagctcctcacactacctgccaatgtcatcctaaggtacatgtggatacctaggttgtagaaatgctggactacacaattgctgagttactctctggctgtagattatatgatgaggtattttacaatcagcttttgaaggtcaacattgaataatgctcttttaaaaaaattatatcctcagtgtttttccatggaaaaataagtgaaaattcttttaagagttgctgtttggtgaaaagaacaaacatgactttcaaagaaaatgttttactatcaccaaaatctcccaagtgaataagtaccacagaaattacttattgcacctgtatctgccattggctgtgaaaaaggctgcaaaaagtagggctgaaagggaaactttagaaactaatactctgaaagatgttttcctatggattaaatttagtgtctttctgaaagttgggggcaaattcccagatactaatagcatctttgctaagtgtctgattatcttctatcccctaggaggaaagagtggtccatgttgctgtaactactactatgagtgcttatgctgtattgtttttaaagagtaaaacctttaagtactaatagttgtcttttctcattcacaggagcagaaaggtgcagttgtttattctcttagccttttttttttcctgtatttcccacaaatctagaaataattattggagttaatatgaaagataaataggcttttctttttactttttaatttttttctttaaatcataaaaaaccttgggatttagaaaaatgtcaaaatcgacaaataaagatgaatcattggaatgagactcttccttggttctactagctagttatataaccttatttaagtcatttatgcttcttggagctcagttttctcaccaacaaggtgataaaagggttaatttagaatgatcctttgacatttcataattgtacaattaatatgtacgatcaggaagtcctaggcaggcagagttgttttctgatttccaaagattaagcccctgatgaaaaatctggaacaaatagagaattttcattattgtgttcatttgctaataatagctttattgagatataattcactctgaaaaagtatacaattaagtggtttttactatattcacagagttgtgcaacaataaccactcactaattacagaatattttataactcccaaaagaaatcctgtaaccattagtgatcacttcccactacctcctccccacaactcctggaaaccactatatgctttttgtctccatgcctattctggacatttcatataaatggaaccatacaacatgtgacctattgtatgtggcttctttcacttagcaaaatattttgagagttcatgcatgttgtaacacgtatgaatacttcattcctttttattactaaataataatccatcatatgaatat

SEQ ID NO: 185703 - DNA, 599 bp, Homo sapiens
  Payload ID: 16571
  Gene Symbol: SPATA6
  Gene Name: spermatogenesis associated 6
  ENST ID: ENST00000487543
  CDS Start-End: 78-338
ccccgcccagccccaggtctccccgcctcactcgggcccgtggccggggtcactccccgccgcccctccccgcacggatgccgaaggtgaaggcgctgcagtgcgccctggcgctggagatcagctcagtaacttgcccaggagtcgtgcttaaagacaaagaggacatctatcttagcatctgtgtgtttggccaatacaaaaagacacaatgtgtcccagccacttttcccctggtcttcaatgccagaatggtgtttgaaaaggtgttcccggacgcagtagatcctggagatgtggttacacagcttgaatggtatctttcttgtagtgggtgaaacactgtctacgtatgacgaaaatacacgagatttcatgtttccgggtccaaaccaaatgtctggacaccatgattcaaaccgccaggttaccatgaggaggatttctggccttcgaggaaatgctccaaggctggaattttctacgacttcagtgattactgaatgtctgataagttcaaggaaatgccacactcaggataaatttatttaccatttggctccagttgaaaaatcacatggcagactgcaaaacagaac

SEQ ID NO: 185704 - DNA, 1218 bp, Homo sapiens
  Payload ID: 16571
  Gene Symbol: SPATA6
  Gene Name: spermatogenesis associated 6
  ENST ID: ENST00000603831
  CDS Start-End: 96-590
gatgtcacagagatgggtgaaatggatatggtagaaaaattctgaattactttttgaaatcattgaacaaggtggagaaggtccagaagcataccatgaactacagaagaaggaaagatggagataaatttatttaccatttggctccagttgaaaaatcacatggcagactgcaaaacagaacatcaagatcacaaaagaaaaaatccaagtcacctgagagaagtaaatactgtataaatgcaaaaaactacgaacagcctacaatttcttcaaaatcacactctccatctccctacacaaaaagacgcatgtgtgagctatctgaagacaccaggcggcggctggcccatttaaatctgggaccctatgagttcaaaaaagaaacagataaacctccatttgtgattagacatgttgatcccccaagtcccagggctgatactttattgggatcttctggaagagactgtgaaagagatggatggtcaagggtgcacaatgaatacaacagaagtgatgtgttactctcagtgcatcacactaggagatcattctcatcttggctgctgccgacccaaggattataaggttatcaggacaccccatgggagagacttcgatgactctttagaaaaatgtgaagagtatttgagcccaaggtcgtgtagtaagccccggcattcagcgaggaccttgctagtccattcagcaccctcaacaatgccaaagcattctccaagccctgtgttaaatagagcttctctcagggaaagatttcattctgattggtgttcaccttcaaactgcgatgagatccatgaccgggtaaaaaatgtcttgaaatcacatcaggctcatcaaagacatttatatgatgagagagacctagagaaagatgatgaactggaactgaaaagaagtcttttatgtagagactctgcctatgacagtgaccccgagtatagctcatgtcagcagccacgtggcactttccatttggatgacggtgaatactggtccaacagggcagcctcttataagggaaaatcccaccgacccatctttgagaacagcatggacaagatgtacaggaacttatacaaaaaggcctgtagttctgcttcacatacacaggaaagcttctgagaccatccatgataaacctcattagtgtccgtgtcaatttctcaatgaaaatgtttgatgtgatcaata

SEQ ID NO: 185705 - DNA, 1295 bp, Homo sapiens
  Payload ID: 16572
  Gene Symbol: SPATA6L
  Gene Name: spermatogenesis associated 6-like
  ENST ID: ENST00000381890
  CDS Start-End: 98-973
atttgctctaggtattcagctaaactaagaaaaattggtccaaggctcggcacaaaaggatcttctcattccagtcctttcgcccacgcagggaacgatgcctctggaggtggtggtggagctgcagatccgggcgatttcttgcccaggagtgttcctgcctggcaaacaagatgtgtacctcggggtctacctcatgaatcagtacctggagaccaacagctttccctctgcgttccccattatgattcaggagagcatgagatttgaaaaggtatttgaaagtgcagtagatcctggagctgtagtagaccttttggaaagcttcctagccaggtttgaattaatacagctagttcctccagtgtgggatgagttggcctactacgaagaaaacacacgagattttcttttcccagagcccaagctgacaccttcgcaccctaggaggtgtagggaggtgctcatgaagacggctctgggttttccaggcattgctcccaaaatagagttttctacaaggacagccatcagagaatgtgtgtttctgcatagaaacagatttcttgaagaaagacatgagtcacggaggcctttatctacatcacatgaaccaatatttcccttaaatactataaagatgaaactaaaggagaataatctcaacagactgcccaaaggcatgcaagcccgggcgccctctcaatattctaccaggcatttcttccaggaccagccagctcagttgaaccttggaaataatttcaaaatctctggaggaagcaagcctccatttgttgttagacacgtggacagtgcaaagccctttggtgagaatatttcagagcatcatttgaggaggtctagaagaaaatctaagttttcagactttccgtttccaacgagaagaggttccatcctggttctcagtccacatggaagaatatccatgagagggtatgcagtcttctgacatcccacagagcacagctgcaccaaaacaaggggaaattaatgaaagcttaaggagaatcatgaagagctcactcactgagacaattgaagcatccttaaagaaatgaacactttttgttgtctgtgttgagtcactgatgtctaatcccctttaaaccaaaccctgtactcagtcttttgtgcccaggtaagagttgttgattaaagtgtttgctgtttgggggctaacattttcttgtcaagctggaaaatttgtgtttttgcatgtttgttttgaacatgaaagagaaagcgctgtagttgggtggcaggtgcttatc

SEQ ID NO: 185706 - DNA, 1854 bp, Homo sapiens
  Payload ID: 16572
  Gene Symbol: SPATA6L
  Gene Name: spermatogenesis associated 6-like
  Uniprot ID: Q8N4H0
  ENST ID: ENST00000406861
  CDS Start-End: 200-697
actccagcttcgagtgtgagagacccgtcccggtgggagggacctgggctgggggggacggtaggggaacaagggcgtgggactggggaagcttctgggaacatttgctctaggtattcagctaaactaagaaaaattggtccaaggctcggcacaaaaggatcttctcattccagtcctttcgcccacgcagggaacgatgcctctggaggtggtggtggagctgcagatccgggcgatttcttgcccaggagtgttcctgcctggcaaacaagatgtgtacctcggggtctacctcatgaatcagtacctggagaccaacagctttccctctgcgttccccattatgattcaggagagcatgagatttgaaaaggtatttgaaagtgcagtagatcctggagctgtagtagaccttttggaaagcttcctagccaggtttgaattaatacagctagttcctccagtgtgggatgagttggcctactacgaagaaaacacacgagattttcttttcccagagcccaagctgacaccttcgcaccctaggaggtgtagggaggtgctcatgaagacggctctgggttttccaggcattgctcccaaaatagagttttctacaaggacagccatcagagaatgtgtgtttctgcatagaaacagatttcttgttgattccaaatcttggctattgtgaatagtgctgcagtaaacatggggccacctttcttttgctgaggctgatgctcggattgtattcatggtccgtctttgggctggggaaacaaagggaagatgttggttcagcaagaacacagaagcttaaagaagaaactgaacagaaatgggacccagacctctggagaagggctgctttcctggatgcttcttcaggaattcgaaggaagaaagacatgagtcacggaggcctttatctacatcacatgaaccaatatttcccttaaatactataaagatgaaactaaaggagaataatctcaacagactgcccaaaggcatgcaagcccgggcgccctctcaatattctaccaggcatttcttccaggaccagccagctcagttgaaccttggaaataatttcaaaatctctggaggaagcaagcctccatttgttgttagacacgtggacagtgcaaagccctttggtgagaatatttcagagcatcatttgaggaggtctagaagaaaatctaagttttcagactttccgtttccaacgagaagagcttcttctcttgacagccttgcagctaacgtaaaggttatcaaagagccagatgaacggattgttttaaggagtgactcatcatcatgtttagattcaagtcagtttggaaagtcttcatccagtaaacaaggggatgctgatttccacgggaaagcttcatttgccacctaccagcattccacctctcctggccccttggatcagccccttctcagagaaaggttccatcctggttctcagtccacatggaagaatatccatgagagggtatgcagtcttctgacatcccacagagcacagctgcaccaaaacaaggaagattctacctctgaagtaaattatatcattgaaagaccaagctaccctctgaagaaatactcactgcatgaacagagatatttttaaggggaaattaatgaaagcttaaggagaatcatgaagagctcactcactgagacaattgaagcatccttaaagaaatgaacactttttgttgtctgtgttgagtcactgatgtctaatcccctttaaaccaaaccctgtactcagtcttttgtgcccaggtaagagttgttgattaaagtgtttgctgtttgggggctaac

SEQ ID NO: 185707 - DNA, 1444 bp, Homo sapiens
  Payload ID: 16572
  Gene Symbol: SPATA6L
  Gene Name: spermatogenesis associated 6-like
  Uniprot ID: Q8N4H0
  ENST ID: ENST00000475086
  CDS Start-End: 239-1243
atagcaggagctgatggaaagaagatcgggattgttagcatttctctatccgtctagcacgccagacagggccagtctctccggctgggggcactgcgtgggcaacagcgaccgtgagggcgcgcgtctgcgctggggcctcgcgcgcgttccacgatgaagactgcgcgtttgagtgtccctggcaacgccacgcttccgccttctggaagcctgcactccagcttcgagtggaacgatgcctctggaggtggtggtggagctgcagatccgggcgatttcttgcccaggagtgttcctgcctggcaaacaagatgtgtacctcggggtctacctcatgaatcagtacctggagaccaacagctttccctctgcgttccccattatgattcaggagagcatgagatttgaaaagggcattgctcccaaaatagagttttctacaaggacagccatcagagaatgtgtgtttctgcatagaaacagatttcttgaagaaagacatgagtcacggaggcctttatctacatcacatgaaccaatatttcccttaaatactataaagatgaaactaaaggagaataatctcaacagactgcccaaaggcatgcaagcccgggcgccctctcaatattctaccaggcatttcttccaggaccagccagctcagttgaaccttggaaataatttcaaaatctctggaggaagcaagcctccatttgttgttagacacgtggacagtgcaaagccctttggtgagaatatttcagagcatcatttgaggaggtctagaagaaaatctaagttttcagactttccgtttccaacgagaagagcttcttctcttgacagccttgcagctaacgtaaaggttatcaaagagccagatgaacggattgttttaaggagtgactcatcatcatgtttagattcaagtcagtttggaaagtcttcatccagtaaacaaggggatgctgatttccacgggaaagcttcatttgccacctaccagcattccacctctcctggccccttggatcagccccttctcagagaaaggttccatcctggttctcagtccacatggaagaatatccatgagagggtatgcagtcttctgacatcccacagagcacagctgcaccaaaacaaggaagattctacctctgaagtaaattatatcattgaaagaccaagctaccctctgaagaaatactcactgcatgaacagagatatttttaaggggaaattaatgaaagcttaaggagaatcatgaagagctcactcactgagacaattgaagcatccttaaagaaatgaacactttttgttgtctgtgttgagtcactgatgtctaatcccctttaaaccaaaccctgtactcagtcttttgtgcccaggtaagagttgttgattaaagtgtttgctgtttgggggctaaca

SEQ ID NO: 185708 - DNA, 1843 bp, Homo sapiens
  Payload ID: 16572
  Gene Symbol: SPATA6L
  Gene Name: spermatogenesis associated 6-like
  Uniprot ID: Q8N4H0
  ENST ID: ENST00000486047
  CDS Start-End: 99-596
gacccgtcccggtgggagggacctgggctgggggggacggtaggggaacaagggcgtgggactggggaagcttctgggaacatttgctctagggaacgatgcctctggaggtggtggtggagctgcagatccgggcgatttcttgcccaggagtgttcctgcctggcaaacaagatgtgtacctcggggtctacctcatgaatcagtacctggagaccaacagctttccctctgcgttccccattatgattcaggagagcatgagatttgaaaaggtatttgaaagtgcagtagatcctggagctgtagtagaccttttggaaagcttcctagccaggtttgaattaatacagctagttcctccagtgtgggatgagttggcctactacgaagaaaacacacgagattttcttttcccagagcccaagctgacaccttcgcaccctaggaggtgtagggaggtgctcatgaagacggctctgggttttccaggcattgctcccaaaatagagttttctacaaggacagccatcagagaatgtgtgtttctgcatagaaacagatttcttgttgattccaaatcttggctattgtgaatagtgctgcagtaaacatggggccacctttcttttgctgaggctgatgctcggattgtattcatggtccgtctttggaagaaagacatgagtcacggaggcctttatctacatcacatgaaccaatatttcccttaaatactataaagatgaaactaaaggagaataatctcaacagactgcccaaaggcatgcaagcccgggcgccctctcaatattctaccaggcatttcttccaggaccagccagctcagttgaaccttggaaataatttcaaaatctctggaggaagcaagcctccatttgttgttagacacgtggacagtgcaaagccctttggtgagaatatttcagagcatcatttgaggaggtctagaagaaaatctaagttttcagactttccgtttccaacgagaagagcttcttctcttgacagccttgcagctaacgtaaaggttatcaaagagccagatgaacggattgttttaaggagtgactcatcatcatgtttagattcaagtcagtttggaaagtcttcatccagtaaacaaggggatgctgatttccacgggaaagcttcatttgccacctaccagcattccacctctcctggccccttggatcagccccttctcagagaaagacatgatttctttgcttacattattttcacaaacaatgaaaatacatttgcatatgtctggagagcaggccagagagcaaaagcagaaacctttatttgccaaacagcactctctagtagggttccatcctggttctcagtccacatggaagaatatccatgagagggtatgcagtcttctgacatcccacagagcacagctgcaccaaaacaaggaagattctacctctgaagtaaattatatcattgaaagaccaagctaccctctgaagaaatactcactgcatgaacagagatatttttaaggggaaattaatgaaagcttaaggagaatcatgaagagctcactcactgagacaattgaagcatccttaaagaaatgaacactttttgttgtctgtgttgagtcactgatgtctaatcccctttaaaccaaaccctgtactcagtcttttgtgcccaggagggaagattcttgagcccctgcaaagcaaacactgcagctggcctactgcctgagtataagccaagcacacttcccatggctcttctaagaatcagggtatgctttaataaagggccttgtacccactggactaaaaaa

SEQ ID NO: 185709 - DNA, 1747 bp, Homo sapiens
  Payload ID: 16572
  Gene Symbol: SPATA6L
  Gene Name: spermatogenesis associated 6-like
  Uniprot ID: Q8N4H0
  ENST ID: ENST00000461761
  CDS Start-End: 174-1352
gtcccggtgggagggacctgggctgggggggacggtaggggaacaagggcgtgggactggggaagcttctgggaacatttgctctaggtattcagctaaactaagaaaaattggtccaaggctcggcacaaaaggatcttctcattccagtcctttcgcccacgcagggaacgatgcctctggaggtggtggtggagctgcagatccgggcgatttcttgcccaggagtgttcctgcctggcaaacaagatgtgtacctcggggtctacctcatgaatcagtacctggagaccaacagctttccctctgcgttccccattatgattcaggagagcatgagatttgaaaaggtatttgaaagtgcagtagatcctggagctgtagtagaccttttggaaatgtgggatgagttggcctactacgaagaaaacacacgagattttcttttcccagagcccaagctgacaccttcgcaccctaggaggtgtagggaggtgctcatgaagacggctctgggttttccaggcattgctcccaaaatagagttttctacaaggacagccatcagagaatgtgtgtttctgcatagaaacagatttcttgaagaaagacatgagtcacggaggcctttatctacatcacatgaaccaatatttcccttaaatactataaagatgaaactaaaggagaataatctcaacagactgcccaaaggcatgcaagcccgggcgccctctcaatattctaccaggcatttcttccaggaccagccagctcagttgaaccttggaaataatttcaaaatctctggaggaagcaagcctccatttgttgttagacacgtggacagtgcaaagccctttggtgagaatatttcagagcatcatttgaggaggtctagaagaaaatctaagttttcagactttccgtttccaacgagaagagcttcttctcttgacagccttgcagctaacgtaaaggttatcaaagagccagatgaacggattgttttaaggagtgactcatcatcatgtttagattcaagtcagtttggaaagtcttcatccagtaaacaaggggatgctgatttccacgggaaagcttcatttgccacctaccagcattccacctctcctggccccttggatcagccccttctcagagaaaggttccatcctggttctcagtccacatggaagaatatccatgagagggtatgcagtcttctgacatcccacagagcacagctgcaccaaaacaaggaagattctacctctgaagtaaattatatcattgaaagaccaagctaccctctgaagaaatactcactgcatgaacagagatatttttaaggggaaattaatgaaagcttaaggagaatcatgaagagctcactcactgagacaattgaagcatccttaaagaaatgaacactttttgttgtctgtgttgagtcactgatgtctaatcccctttaaaccaaaccctgtactcagtcttttgtgcccaggaacggacactcactgaaattggaattttgaactgagataaacatcatacttgttttattgggatgacttccaggaacagaccgtaggcagtggcagagggaagattcttgagcccctgcaaagcaaacactgcagctggcctactgcctgagtataagccaagcacacttcccatggctcttctaagaatcagggtatgctttaataaagggccttgtacccactggactaaaaaa

SEQ ID NO: 185710 - DNA, 2437 bp, Homo sapiens
  Payload ID: 16572
  Gene Symbol: SPATA6L
  Gene Name: spermatogenesis associated 6-like
  ENST ID: ENST00000485616
  CDS Start-End: 81-653
gaagactgcgcgtttgagtgtccctggcaacgccacgcttccgccttctggaagcctgcactccagcttcgagtggaacgatgcctctggaggtggtggtggagctgcagatccgggcgatttcttgcccaggagtgttcctgcctggcaaacaagatgtgtacctcggggtctacctcatgaatcagtacctggagaccaacagctttccctctgcgttccccattatgattcaggagagcatgagatttgaaaaggtatttgaaagtgcagtagatcctggagctgtagtagaccttttggaaatgtgggatgagttggcctactacgaagaaaacacacgagattttcttttcccagagcccaagctgacaccttcgcaccctaggaggtgtagggaggtgctcatgaagacggctctgggttttccaggcattgctcccaaaatagagttttctacaaggacagccatcagagaatgtgtgtttctgcatagaaacagatttcttggctggggaaacaaagggaagatgttggttcagcaagaacacagaagcttaaagaagaaactgaacagaaatgggacccagacctctggagaagggctgctttcctggatgcttcttcaggaattcgaaggaagaaagacatgagtcacggaggcctttatctacatcacatgaaccaatatttcccttaaatactataaagatgaaactaaaggagaataatctcaacagactgcccaaaggcatgcaagcccgggcgccctctcaatattctaccaggcatttcttccaggaccagccagctcagttgaaccttggaaataatttcaaaatctctggaggaagcaagcctccatttgttgttagacacgtgagcctaaaattattttttagagcattttgcaatagtgaggatatggatgagggtggaagaaaggaaggttgagttataacaacaaatgaataatattcaataaaaaggtggacagtgcaaagccctttggtgagaatatttcagagcatcatttgaggaggtctagaagaaaatctaagttttcagactttccgtttccaacgagaagaggttccatcctggttctcagtccacatggaagaatatccatgagagggtatgcagtcttctgacatcccacagagcacagctgcaccaaaacaaggaagattctacctctgaagtaaattatatcattgaaagaccaagctaccctctgaagaaatactcactgcatgaacagagatatttttaaggggaaattaatgaaagcttaaggagaatcatgaagagctcactcactgagacaattgaagcatccttaaagaaatgaacactttttgttgtctgtgttgagtcactgatgtctaatcccctttaaaccaaaccctgtactcagtcttttgtgcccaggttttaagctccatgaaggcaggagacctagctatctgcttgttcacgaatgtatactcagtgcccagcacataggagatgctcagtaaacatgctgattgaatgactaacaggtatttaagtatggctgactgccctggatccctctcccaggctctggccccttggcagcagagtgttgccagaacaaaacttgccagttccagctgctgcccttatgatctgtgtgatcttgaaaaagtggcttaatctgtcttcaacctcctgtttccttatctctaaagatggagttaaggtcccacctacttgatgacttcatagggctgctatgaggattaaataaacaggttcatgatttttaaattccaaaatgtttcttttattccccagagaaaacaaggcaggatatgatcttactttgttaatccagggcatagggaaatctctgcagccttgattagtactccctggatgttcaaagggaaaggaagaggcaaagaggagcatgcaaaatctttctgtgcatgcatcacctatgacatctacttttcttagagacatgaagaactctcttaaaataggtaatatcaccactctaggctatttggtgatgttaacaaaataaactggtccttgagcagaatcagctaaaggtccccttgaagcctctgtcagctggtccacatttgaagttcaaaacatgcatcaagaagcagtgggctctccaggtgcagtggttcatgcctgtaatcccagcactttgggaggctgaggcaagtggatcacttgaggtcaggagttcaagaccagcctggccaacatggtgtaacctcatctctactaaaaatacaaaaattagccggtggtggtggcacacacctatagtcccagctacttgggaggctgaggcaggagaatcgcttgaacccaggaggtggaggttgcaagtgagctgagatcgcaccactgcactccagcctgggcaacacagtgagactctgtc

SEQ ID NO: 185711 - DNA, 1410 bp, Homo sapiens
  Payload ID: 16573
  Gene Symbol: SPATA7
  Gene Name: spermatogenesis associated 7
  Uniprot ID: Q9P0W8
  ENST ID: ENST00000045347
  CDS Start-End: 1-1377
atggatggcagccggagagtcagagcaacctctgtccttcccagatatggtccaccgtgcctatttaaaggacacttgagcaccaaaagtaatgctttttgcactgactcctcttctctcagactaagcactctccagctggtcaagaatcacatggctgttcactataataaaatcctttcagccaaagctgcagtagactgctcggttccagtaagcgtgagtaccagcataaagtatgcagaccaacaacgaagagagaaactcaaaaaggaattagcacaatgtgaaaaagagttcaaattaactaaaactgcaatgcgagccaattataaaaataattccaagtcactttttaataccttacaaaagccctcaggcgaaccgcaaattgaggatgacatgttaaaagaagaaatgaatggattttcatcctttgcaaggtcactagtaccctcttcagagagactacacctaagtctacataaatccagtaaagtcatcacaaatggtcctgagaagaactccagttcctccccgtccagtgtggattatgcagcctccgggccccggaaactgagctctggagccctgtatggcagaaggcccagaagcacattcccaaattcccaccggtttcagttagtcatttcgaaagcacccagtggggatcttttggataaacattctgaactcttttctaacaaacaattgccattcactcctcgcactttaaaaacagaagcaaaatctttcctgtcacagtatcgctattatacacctgccaaaagaaaaaaggattttacagatcaacggatagaagctgaaacccagactgaattaagctttaaatctgagttggggacagctgagactaaaaacatgacagattcagaaatgaacataaagcaggcatctaattgtgtgacatatgatgccaaagaaaaaatagctcctttacctttagaagggcatgactcaacatgggatgagattaaggatgatgctcttcagcattcctcaccaagggcaatgtgtcagtattccctgaagcccccttcaactcgtaaaatctactctgatgaagaagaactgttgtatctgagtttcattgaagatgtaacagatgaaattttgaaacttggtttattttcaaacaggtttttagaacgactgttcgagcgacatataaaacaaaataaacatttggaggaggaaaaaatgcgccacctgctgcatgtcctgaaagtagacttaggctgcacatcggaggaaaactcgttctccagtgtcaaaggcgacaataatcatgacatggagttatcaactcttaaaatcatggaaatgagcattgaggactgccctttggatgtttaatcttcattaataaatacctcaaatggccagtaa

SEQ ID NO: 185712 - DNA, 1891 bp, Homo sapiens
  Payload ID: 16573
  Gene Symbol: SPATA7
  Gene Name: spermatogenesis associated 7
  Uniprot ID: Q9P0W8
  ENST ID: ENST00000356583
  CDS Start-End: 152-1855
cccttagcaacggcctggcaacggtttccctgctgctgcagcccccgtcggctcctcttttccagtcctccactgccggggctgggcccggccgcgggaaggaccgaaggggatacagcgtgtccctgcggcggctgcaagaggactaagcatggatggcagccggagagtcagagcaacctctgtccttcccagatatggtccaccgtgcctatttaaaggacacttgagcaccaaaagtaatgctgcagtagactgctcggttccagtaagcgtgagtaccagcataaagtatgcagaccaacaacgaagagagaaactcaaaaaggaattagcacaatgtgaaaaagagttcaaattaactaaaactgcaatgcgagccaattataaaaataattccaagtcactttttaataccttacaaaagccctcaggcgaaccgcaaattgaggatgacatgttaaaagaagaaatgaatggattttcatcctttgcaaggtcactagtaccctcttcagagagactacacctaagtctacataaatccagtaaagtcatcacaaatggtcctgagaagaactccagttcctccccgtccagtgtggattatgcagcctccgggccccggaaactgagctctggagccctgtatggcagaaggcccagaagcacattcccaaattcccaccggtttcagttagtcatttcgaaagcacccagtggggatcttttggataaacattctgaactcttttctaacaaacaattgccattcactcctcgcactttaaaaacagaagcaaaatctttcctgtcacagtatcgctattatacacctgccaaaagaaaaaaggattttacagatcaacggatagaagctgaaacccagactgaattaagctttaaatctgagttggggacagctgagactaaaaacatgacagattcagaaatgaacataaagcaggcatctaattgtgtgacatatgatgccaaagaaaaaatagctcctttacctttagaagggcatgactcaacatgggatgagattaaggatgatgctcttcagcattcctcaccaagggcaatgtgtcagtattccctgaagcccccttcaactcgtaaaatctactctgatgaagaagaactgttgtatctgagtttcattgaagatgtaacagatgaaattttgaaacttggtttattttcaaacaggtttttagaacgactgttcgagcgacatataaaacaaaataaacatttggaggaggaaaaaatgcgccacctgctgcatgtcctgaaagtagacttaggctgcacatcggaggaaaactcggtaaagcaaaatgatgttgatatgttgaatgtatttgattttgaaaaggctgggaattcagaaccaaatgaattaaaaaatgaaagtgaagtaacaattcagcaggaacgtcaacaataccaaaaggctttggatatgttattgtcggcaccaaaggatgagaacgagatattcccttcaccaactgaatttttcatgcctatttataaatcaaagcattcagaaggggttataattcaacaggtgaatgatgaaacaaatcttgaaacttcaactttggatgaaaatcatccaagtatttcagacagtttaacagatcgggaaacttctgtgaatgtcattgaaggtgatagtgaccctgaaaaggttgagatttcaaatggattatgtggtcttaacacatcaccctcccaatctgttcagttctccagtgtcaaaggcgacaataatcatgacatggagttatcaactcttaaaatcatggaaatgagcattgaggactgccctttggatgtttaatcttcattaataaatacctcaaatggccagtaactc

SEQ ID NO: 185713 - DNA, 2123 bp, Homo sapiens
  Payload ID: 16573
  Gene Symbol: SPATA7
  Gene Name: spermatogenesis associated 7
  Uniprot ID: Q9P0W8
  ENST ID: ENST00000393545
  CDS Start-End: 290-2089
gactggggctcgatgccccttccccgccaggtctctccgtccgcaactgtcctcctagtaccgggtatcccgcaggcggggctgcggaacgcacgtcccctgcgccgtgacgtcacaatagcgactcactggacccagcccttagcaacggcctggcaacggtttccctgctgctgcagcccccgtcggctcctcttttccagtcctccactgccggggctgggcccggccgcgggaaggaccgaaggggatacagcgtgtccctgcggcggctgcaagaggactaagcatggatggcagccggagagtcagagcaacctctgtccttcccagatatggtccaccgtgcctatttaaaggacacttgagcaccaaaagtaatgctttttgcactgactcctcttctctcagactaagcactctccagctggtcaagaatcacatggctgttcactataataaaatcctttcagccaaagctgcagtagactgctcggttccagtaagcgtgagtaccagcataaagtatgcagaccaacaacgaagagagaaactcaaaaaggaattagcacaatgtgaaaaagagttcaaattaactaaaactgcaatgcgagccaattataaaaataattccaagtcactttttaataccttacaaaagccctcaggcgaaccgcaaattgaggatgacatgttaaaagaagaaatgaatggattttcatcctttgcaaggtcactagtaccctcttcagagagactacacctaagtctacataaatccagtaaagtcatcacaaatggtcctgagaagaactccagttcctccccgtccagtgtggattatgcagcctccgggccccggaaactgagctctggagccctgtatggcagaaggcccagaagcacattcccaaattcccaccggtttcagttagtcatttcgaaagcacccagtggggatcttttggataaacattctgaactcttttctaacaaacaattgccattcactcctcgcactttaaaaacagaagcaaaatctttcctgtcacagtatcgctattatacacctgccaaaagaaaaaaggattttacagatcaacggatagaagctgaaacccagactgaattaagctttaaatctgagttggggacagctgagactaaaaacatgacagattcagaaatgaacataaagcaggcatctaattgtgtgacatatgatgccaaagaaaaaatagctcctttacctttagaagggcatgactcaacatgggatgagattaaggatgatgctcttcagcattcctcaccaagggcaatgtgtcagtattccctgaagcccccttcaactcgtaaaatctactctgatgaagaagaactgttgtatctgagtttcattgaagatgtaacagatgaaattttgaaacttggtttattttcaaacaggtttttagaacgactgttcgagcgacatataaaacaaaataaacatttggaggaggaaaaaatgcgccacctgctgcatgtcctgaaagtagacttaggctgcacatcggaggaaaactcggtaaagcaaaatgatgttgatatgttgaatgtatttgattttgaaaaggctgggaattcagaaccaaatgaattaaaaaatgaaagtgaagtaacaattcagcaggaacgtcaacaataccaaaaggctttggatatgttattgtcggcaccaaaggatgagaacgagatattcccttcaccaactgaatttttcatgcctatttataaatcaaagcattcagaaggggttataattcaacaggtgaatgatgaaacaaatcttgaaacttcaactttggatgaaaatcatccaagtatttcagacagtttaacagatcgggaaacttctgtgaatgtcattgaaggtgatagtgaccctgaaaaggttgagatttcaaatggattatgtggtcttaacacatcaccctcccaatctgttcagttctccagtgtcaaaggcgacaataatcatgacatggagttatcaactcttaaaatcatggaaatgagcattgaggactgccctttggatgtttaatcttcattaataaatacctcaaatggccagtaac

SEQ ID NO: 185714 - DNA, 890 bp, Homo sapiens
  Payload ID: 16573
  Gene Symbol: SPATA7
  Gene Name: spermatogenesis associated 7
  ENST ID: ENST00000555534
  CDS Start-End: 171-428
agcgactcactggacccagcccttagcaacggcctggcaacggtttccctgctgctgcagcccccgtcggctcctcttttccagtcctccactgccggggctgggcccggccgcgggaaggaccgaaggggatacagcgtgtccctgcggcggctgcaagaggactaagcatggatggcagccggagagtcagagcaacctctgtccttcccagatatggtccaccgtgcctatttaaaggacacttgagcaccaaaagtaatgctttttgcactgactcctcttctctcagactaagcactctccagctggtcaagaatcacatggctgttcactataataaaatcctttcagccaaagctgcagtagactgctcggttccagtaagcgtgagtaccagcataaagtgtctagaagtacttgtatgaatctgggtgctccagtgttgggtgcaaatatacctaggatagatgcagaccaacaacgaagagagaaactcaaaaaggaattagcacaatgtgaaaaagagttcaaattaactaaaactgcaatgcgagccaattataaaaataattccaagtcactttttaataccttacaaaagccctcaggcgaaccgcaaattgaggatgacatgttaaaagaagaaatgaatggattttcatcctttgcaaggtcactagtaccctcttcagagagactacacctaagtctacataaatccagtaaagtcatcacaaatggtcctgagaagaactccagttcctccccgtccagtgtggattatgcagcctccgggccccggaaactgagctctggagccctgtatggcagaaggcccagaagcacattcccaaattcccaccggtttcagttagtcatttcgaaag

SEQ ID NO: 185715 - DNA, 805 bp, Homo sapiens
  Payload ID: 16573
  Gene Symbol: SPATA7
  Gene Name: spermatogenesis associated 7
  ENST ID: ENST00000553885
  CDS Start-End: 122-805
tgctgctgcagcccccgtcggctcctcttttccagtcctccactgccggggctgggcccggccgcgggaaggaccgaaggggatacagcgtgtccctgcggcggctgcaagaggactaagcatggatggcagccggagagtcagagcaacctctgtccttcccagatatggtccaccgtgcctatttaaaggacacttgagcaccaaaagtaatgctgcagtagactgctcggttccagtaagcgtgagtaccagcataaagtgtatacatgtgccatggtggtttgctgcacccatcaacctgtcatctacattagatgcagaccaacaacgaagagagaaactcaaaaaggaattagcacaatgtgaaaaagagttcaaattaactaaaactgcaatgcgagccaattataaaaataattccaagtcactttttaataccttacaaaagccctcaggcgaaccgcaaattgaggatgacatgttaaaagaagaaatgaatggattttcatcctttgcaaggtcactagtaccctcttcagagagactacacctaagtctacataaatccagtaaagtcatcacaaatggtcctgagaagaactccagttcctccccgtccagtgtggattatgcagcctccgggccccggaaactgagctctggagccctgtatggcagaaggcccagaagcacattcccaaattcccaccggtttcagttagtcatttcgaaagcacccagtggggatcttttggataaacattctgaactcttttctaacaaacaattgccattcactcct

SEQ ID NO: 185716 - DNA, 592 bp, Homo sapiens
  Payload ID: 16573
  Gene Symbol: SPATA7
  Gene Name: spermatogenesis associated 7
  ENST ID: ENST00000555356
  CDS Start-End: 147-287
agcaacggcctggcaacggtttccctgctgctgcagcccccgtcggctcctcttttccagtcctccactgccggggctgggcccggccgcgggaaggaccgaaggggatacagcgtgtccctgcggcggctgcaagaggactaagcatggatggcagccggagaggtaaagggcagctgtcaggggctaccgccgcctcgcccctcgctccaggcggcgctcccagcctcgggtccgggcagctgagtgcaaggccgccccttggggcgcttcctacccctggctgagtcgccagtgttgcctggagctgcccaggcctgcgcaaaggaagagggagagcctgcttgccagcctcgcagtcagagcaacctctgtccttcccagatatggtccaccgtgcctatttaaaggacacttgagcaccaaaagtaatgctgcagtagactgctcggttccagtaagcgtgagtaccagcataaagtgtatttagcactgtaaacttgcctcttaacactgcttttgctgcatcccagaaattttgatgcagaccaacaacgaagagagaaactcaaaaaggaattagcacaatgtg

SEQ ID NO: 185717 - DNA, 758 bp, Homo sapiens
  Payload ID: 16573
  Gene Symbol: SPATA7
  Gene Name: spermatogenesis associated 7
  ENST ID: ENST00000556406
  CDS Start-End: 1-275
gggcaatgtgtcagtattccctgaagcccccttcaactcgtaaaatctactctgatgaagaagaactgttgtatctgagtttcattgaagatgtaacagatgaaattttgaaacttggtttattttcaaacaggtttttagaacgactgttcgagcgacatataaaacaaaataaacatttggaggaggaaaaaatgcgccacctgctgcatgtcctgaaagtagacttaggctgcacatcggaggaaaactcggtcaggattccagatgattaacattaactgttcttcagaggctgagaaaatcacttaagagaaataagtacctacctcttctgctgtcaccattgctataattgcaattccctgttcccataccatctgccaaaaatcttgacaggtattctgtaatggtccctgtgtggcaatataatcccattcgattccactgacagagacctgggattagaaaaggttaaaaaaattgatgtgtgggtataatatacataggtatgtatgcatgcattcatggtagtactaaaaaagtttttttaaaaaagtaaaaagtaaaaaagtagtaaactggattattcagcagaataaggaaagacttttcatcttttcccttgtgaatacaatttgcattactgacatttttataaacttaggtactgtgaatatacataatatctatgcaacctgtttaaccttgctgaatgtcagttctcatttatacaataaagatactgcctaccgtca

SEQ ID NO: 185718 - DNA, 1088 bp, Homo sapiens
  Payload ID: 16573
  Gene Symbol: SPATA7
  Gene Name: spermatogenesis associated 7
  ENST ID: ENST00000555515
  CDS Start-End: 142-387
cggcctggcaacggtttccctgctgctgcagcccccgtcggctcctcttttccagtcctccactgccggggctgggcccggccgcgggaaggaccgaaggggatacagcgtgtccctgcggcggctgcaagaggactaagcatggatggcagccggagagtcagagcaacctctgtccttcccagatatggtccaccgtgcctatttaaaggacacttgagcaccaaaagtaatgctttttgcactgactcctcttctctcagactaagcactctccagctggtcaagaatcacatggctgttcactataataaaatcctttcagccaaagctgcagtagactgctcggttccagtaagcgtgagtaccagcataaagtgtatttagcactgtaaacttgcctcttaacactgcttttgctgcatcccagaaattttggtctagaagtacttgtatgaatctgggtgctccagtgttgggtgcaaatatacctaggatagatgcagaccaacaacgaagagagaaactcaaaaaggaattagcacaatgtgaaaaagagttcaaattaactaaaactgcaatgcgagccaattataaaaataattccaagtcactttttaataccttacaaaagccctcaggcgaaccgcaaattgaggatgacatgttaaaagaagaaatgaatggattttcatcctttgcaaggtcactagtaccctcttcagagagactacacctaagtctacataaatccagtaaagtcatcacaaatggtcctgagaagaactccagttcctccccgtccagtgtggattatgcagcctccgggccccggaaactgagctctggagccctgtatggcagaaggcccagaagcacattcccaaattcccaccggtttcagttagtcatttcgaaagcacccagtggggatcttttggataaacattctgaactcttttctaacaaacaattgccattcactcctcgcactttaaaaacagaagcaaaatctttcctgtcacagtatcgctattatacacctgccaaaagaaaaaaggattttacagatcaacggatagaagctg

SEQ ID NO: 185719 - DNA, 401 bp, Homo sapiens
  Payload ID: 16573
  Gene Symbol: SPATA7
  Gene Name: spermatogenesis associated 7
  ENST ID: ENST00000554802
  CDS Start-End: 1-231
agtttcattgaagatgtaacagatgaaattttgaaacttggtttattttcaaacaggtttttagaacgactgttcgagcgacatataaaacaaaataaacatttggaggaggaaaaaatgcgccacctgctgcatgtcctgaaagtagacttaggctgcacatcggaggaaaactcgattccagatgctgctactactggtccgaaaacaaccccactggaagatgaataaagtggacacaacaaatagcatatgttctactatagaggtggccacatgaagagctctgcaagcccactgtgaaattgatagcaaatctttattcaagtgtattaattgacccacaaatatcctgattaatgaagctggctagtttggcaagatgcattctaactcttaaa

SEQ ID NO: 185720 - DNA, 2301 bp, Homo sapiens
  Payload ID: 16573
  Gene Symbol: SPATA7
  Gene Name: spermatogenesis associated 7
  Uniprot ID: Q9P0W8
  ENST ID: ENST00000556553
  CDS Start-End: 560-2263
aacagttcatagggacagcacccccacaacagagaattatacaaccagcccaaaatgtcaatggacatttgggctgagaagtcttacatgacagaatgcttcctaccctgatctgacgttatttccaaggattcaaaggggacgtggatgccagatgagtccacctcctctccctgctcttcccgcagggacagagcctgccaggtgctggtgactcggatcctgacaggaggtcgctctgcggaagactggcaggatcccagagcaacagactggggctcgatgccccttccccgccaggtctctccgtccgcaactgtcctcctagtaccgggtatcccgcaggcggggctgcggaacgcacgtcccctgcgccgtgacgtcacaatagcgactcactggacccagcccttagcaacggcctggcaacggtttccctgctgctgcagcccccgtcggctcctcttttccagtcctccactgccggggctgggcccggccgcgggaaggaccgaaggggatacagcgtgtccctgcggcggctgcaagaggactaagcatggatggcagccggagagtcagagcaacctctgtccttcccagatatggtccaccgtgcctatttaaaggacacttgagcaccaaaagtaatgctgcagtagactgctcggttccagtaagcgtgagtaccagcataaagtatgcagaccaacaacgaagagagaaactcaaaaaggaattagcacaatgtgaaaaagagttcaaattaactaaaactgcaatgcgagccaattataaaaataattccaagtcactttttaataccttacaaaagccctcaggcgaaccgcaaattgaggatgacatgttaaaagaagaaatgaatggattttcatcctttgcaaggtcactagtaccctcttcagagagactacacctaagtctacataaatccagtaaagtcatcacaaatggtcctgagaagaactccagttcctccccgtccagtgtggattatgcagcctccgggccccggaaactgagctctggagccctgtatggcagaaggcccagaagcacattcccaaattcccaccggtttcagttagtcatttcgaaagcacccagtggggatcttttggataaacattctgaactcttttctaacaaacaattgccattcactcctcgcactttaaaaacagaagcaaaatctttcctgtcacagtatcgctattatacacctgccaaaagaaaaaaggattttacagatcaacggatagaagctgaaacccagactgaattaagctttaaatctgagttggggacagctgagactaaaaacatgacagattcagaaatgaacataaagcaggcatctaattgtgtgacatatgatgccaaagaaaaaatagctcctttacctttagaagggcatgactcaacatgggatgagattaaggatgatgctcttcagcattcctcaccaagggcaatgtgtcagtattccctgaagcccccttcaactcgtaaaatctactctgatgaagaagaactgttgtatctgagtttcattgaagatgtaacagatgaaattttgaaacttggtttattttcaaacaggtttttagaacgactgttcgagcgacatataaaacaaaataaacatttggaggaggaaaaaatgcgccacctgctgcatgtcctgaaagtagacttaggctgcacatcggaggaaaactcggtaaagcaaaatgatgttgatatgttgaatgtatttgattttgaaaaggctgggaattcagaaccaaatgaattaaaaaatgaaagtgaagtaacaattcagcaggaacgtcaacaataccaaaaggctttggatatgttattgtcggcaccaaaggatgagaacgagatattcccttcaccaactgaatttttcatgcctatttataaatcaaagcattcagaaggggttataattcaacaggtgaatgatgaaacaaatcttgaaacttcaactttggatgaaaatcatccaagtatttcagacagtttaacagatcgggaaacttctgtgaatgtcattgaaggtgatagtgaccctgaaaaggttgagatttcaaatggattatgtggtcttaacacatcaccctcccaatctgttcagttctccagtgtcaaaggcgacaataatcatgacatggagttatcaactcttaaaatcatggaaatgagcattgaggactgccctttggatgtttaatcttcattaataaatacctcaaatggccagtaactcaa

SEQ ID NO: 185721 - DNA, 545 bp, Homo sapiens
  Payload ID: 16573
  Gene Symbol: SPATA7
  Gene Name: spermatogenesis associated 7
  ENST ID: ENST00000555715
  CDS Start-End: 147-275
agcaacggcctggcaacggtttccctgctgctgcagcccccgtcggctcctcttttccagtcctccactgccggggctgggcccggccgcgggaaggaccgaaggggatacagcgtgtccctgcggcggctgcaagaggactaagcatggatggcagccggagagtcagagcaacctctgtccttcccagatatggtccaccgtgcctatttaaaggacacttgagcaccaaaagtaatggcgttcttgagattagagaattttggagtctatgatttcaaactattattgtgccctggatgtggacttggctgtctcctgctcccagctgctacagcagcccagctctacttttgccaggaaactaccctgatttaaggcatacctgccttgttaaaatgctttttgcactgactcctcttctctcagactaagcactctccagctggtcaagaatcacatggctgttcactataataaaatcctttcagccaaagctgcagtagactgctcggttccagtaagcgtgagtaccagcataaagt

SEQ ID NO: 185722 - DNA, 651 bp, Homo sapiens
  Payload ID: 16573
  Gene Symbol: SPATA7
  Gene Name: spermatogenesis associated 7
  ENST ID: ENST00000554168
  CDS Start-End: 182-322
gacgtcacaatagcgactcactggacccagcccttagcaacggcctggcaacggtttccctgctgctgcagcccccgtcggctcctcttttccagtcctccactgccggggctgggcccggccgcgggaaggaccgaaggggatacagcgtgtccctgcggcggctgcaagaggactaagcatggatggcagccggagaggtaaagggcagctgtcaggggctaccgccgcctcgcccctcgctccaggcggcgctcccagcctcgggtccgggcagctgagtgcaaggccgccccttggggcgcttcctacccctggctgagtcgccagtgttgcctggagctgcccaggcctgcgcaaaggaagagggagagcctgcttgccagcctcgcagtcagagcaacctctgtccttcccagatatggtccaccgtgcctatttaaaggacacttgagcaccaaaagtaatgctgcagtagactgctcggttccagtaagcgtgagtaccagcataaagtatgcagaccaacaacgaagagagaaactcaaaaaggaattagcacaatgtgaaaaagagttcaaattaactaaaactgcaatgcgagccaattataaaaataattccaagtcactttttaataccttacaaaag

SEQ ID NO: 185723 - DNA, 804 bp, Homo sapiens
  Payload ID: 16573
  Gene Symbol: SPATA7
  Gene Name: spermatogenesis associated 7
  ENST ID: ENST00000557248
  CDS Start-End: 81-341
actgccggggctgggcccggccgcgggaaggaccgaaggggatacagcgtgtccctgcggcggctgcaagaggactaagcatggatggcagccggagagtcagagcaacctctgtccttcccagatatggtccaccgtgcctatttaaaggacacttgagcaccaaaagtaatgctttttgcactgactcctcttctctcagactaagcactctccagctggtcaagaatcacatggctgttcactataataaaatcctttcagccaaagctgcagtagactgctcggttccagtaagcatgcagaccaacaacgaagagagaaactcaaaaaggaattagcacaatgtgaaaaagagttcaaattaactaaaactgcaatgcgagccaattataaaaataattccaagtcactttttaataccttacaaaagccctcaggcgaaccgcaaattgaggatgacatgttaaaagaagaaatgaatggattttcatcctttgcaaggtcactagtaccctcttcagagagactacacctaagtctacataaatccagtaaagtcatcacaaatggtcctgagaagaactccagttcctccccgtccagtgtggattatgcagcctccgggccccggaaactgagctctggagccctgtatggcagaaggcccagaagcacattcccaaattcccaccggtttcagttagtcatttcgaaagcacccagtggggatcttttggataaacattctgaactcttttctaacaaacaattgccattcactcctcgcactttaaaaacaga

SEQ ID NO: 185724 - DNA, 786 bp, Homo sapiens
  Payload ID: 16573
  Gene Symbol: SPATA7
  Gene Name: spermatogenesis associated 7
  ENST ID: ENST00000556870
  CDS Start-End: 176-337
acaatagcgactcactggacccagcccttagcaacggcctggcaacggtttccctgctgctgcagcccccgtcggctcctcttttccagtcctccactgccggggctgggcccggccgcgggaaggaccgaaggggatacagcgtgtccctgcggcggctgcaagaggactaagcatggatggcagccggagagtcagagcaacctctgtccttcccagatatggtccaccgtgcctatttaaaggacacttgagcaccaaaagtaatgctgcagtagactgctcggttccagtaagcgtgagtaccagcataaagtgtctagaagtacttgtatgaatctgggtgctccagtgttgggtgcaaatatacctaggatagatgcagaccaacaacgaagagagaaactcaaaaaggaattagcacaatgtgaaaaagagttcaaattaactaaaactgcaatgcgagccaattataaaaataattccaagtcactttttaataccttacaaaagccctcaggcgaaccgcaaattgaggatgacatgttaaaagaagaaatgaatggattttcatcctttgcaaggtcactagtaccctcttcagagagactacacctaagtctacataaatccagtaaagtcatcacaaatggtcctgagaagaactccagttcctccccgtccagtgtggattatgcagcctccgggccccggaaactgagctctggagccctgtatggcagaaggcccagaagcacattcccaaattcccaccggtttcagtta

SEQ ID NO: 185725 - DNA, 568 bp, Homo sapiens
  Payload ID: 16573
  Gene Symbol: SPATA7
  Gene Name: spermatogenesis associated 7
  ENST ID: ENST00000557724
  CDS Start-End: 147-287
agcaacggcctggcaacggtttccctgctgctgcagcccccgtcggctcctcttttccagtcctccactgccggggctgggcccggccgcgggaaggaccgaaggggatacagcgtgtccctgcggcggctgcaagaggactaagcatggatggcagccggagaggtaaagggcagctgtcaggggctaccgccgcctcgcccctcgctccaggcggcgctcccagcctcgggtccgggcagctgagtgcaaggccgccccttggggcgcttcctacccctggctgagtcgccagtgttgcctggagctgcccaggcctgcgcaaaggaagagggagagcctgcttgccagcctcgcagtcagagcaacctctgtccttcccagatatggtccaccgtgcctatttaaaggacacttgagcaccaaaagtaatgctttttgcactgactcctcttctctcagactaagcactctccagctggtcaagaatcacatggctgttcactataataaaatcctttcagccaaagctgcagtagactgctcggttccagtaagcgtgagtacc

SEQ ID NO: 185726 - DNA, 545 bp, Homo sapiens
  Payload ID: 16573
  Gene Symbol: SPATA7
  Gene Name: spermatogenesis associated 7
  ENST ID: ENST00000555401
  CDS Start-End: 130-545
ggtttccctgctgctgcagcccccgtcggctcctcttttccagtcctccactgccggggctgggcccggccgcgggaaggaccgaaggggatacagcgtgtccctgcggcggctgcaagaggactaagcatggatggcagccggagagctgcagtagactgctcggttccagtaagcgtgagtaccagcataaagtatgcagaccaacaacgaagagagaaactcaaaaaggaattagcacaatgtgaaaaagagttcaaattaactaaaactgcaatgcgagccaattataaaaataattccaagtcactttttaataccttacaaaagccctcaggcgaaccgcaaattgaggatgacatgttaaaagaagaaatgaatggattttcatcctttgcaaggtcactagtaccctcttcagagagactacacctaagtctacataaatccagtaaagtcatcacaaatggtcctgagaagaactccagttcctccccgtccagtgtggattatgcagcctccgggccccggaaactgagctctgg

SEQ ID NO: 185727 - DNA, 761 bp, Homo sapiens
  Payload ID: 16573
  Gene Symbol: SPATA7
  Gene Name: spermatogenesis associated 7
  ENST ID: ENST00000553908
  CDS Start-End: 76-225
cggggctgggcccggccgcgggaaggaccgaaggggatacagcgtgtccctgcggcggctgcaagaggactaagcatggatggcagccggagagtcagagcaacctctgtccttcccagatatggtccaccgtgcctatttaaaggacacttgagcaccaaaagtaatgctgcagtagactgctcggttccagtaagcgtgagtaccagcataaagtgtatttagcactgtaaacttgcctcttaacactgcttttgctgcatcccagaaattttggtctagaagtacttgtatgaatctgggtgctccagtgttgggtgcaaatatacctaggatagatgcagaccaacaacgaagagagaaactcaaaaaggaattagcacaatgtgaaaaagagttcaaattaactaaaactgcaatgcgagccaattataaaaataattccaagtcactttttaataccttacaaaagccctcaggcgaaccgcaaattgaggatgacatgttaaaagaagaaatgaatggattttcatcctttgcaaggtcactagtaccctcttcagagagactacacctaagtctacataaatccagtaaagtcatcacaaatggtcctgagaagaactccagttcctccccgtccagtgtggattatgcagcctccgggccccggaaactgagctctggagccctgtatggcagaaggcccagaagcacattcccaaattcccaccggtttcagttagtcatttcgaaagcac

SEQ ID NO: 185728 - DNA, 1083 bp, Homo sapiens
  Payload ID: 16574
  Gene Symbol: SPATA8
  Gene Name: spermatogenesis associated 8
  Uniprot ID: Q6RVD6
  ENST ID: ENST00000328504
  CDS Start-End: 268-585
agttgcgtccgttggggcttctggggcagcccacagggttccgagcatgtgctggcagttgctctttggagcacccacttcacttctcccatgtagttcctgagtgcaggactctcctgaagaaggggcgtctaaaaggccagcccatgcatcttgttcagaccaggctgctccatctccgctaagcccagggatccacttgtgtgtctttctgggataattgtctttagtggcagcctgggcctcggggaaggaagggcatgaggaatggccccggctgggatgtcaggggcccaggacaactcctgtctctaccaggaaattgccccctcttttcagaggctgccttgtcctagaacctcgtcgcgacatttctcagaagccatgacatgtccctgcggctggaggcctttcaagggtggcccaggaggcctcaagggcccggtgtggcctgcaaaggaagagaacagctgttctcacggaaggatccaaagggttcaaaggcgaagggtgccatctgcttccccactgattcagaagataaacaggagaagtgtcctgtttcacccatattgctggtcctgatttttcaatagtgtccctaccctgaagctcttccattggtcatcatggagttagctaacagcccagggaactggtctcttttcccttttcccttaccacctggaactcacctggaaagggcaatcagctggctctatatcagacgccaccacctggtctttgaagtttctgtcctaccagtgccacagctccctctcccacttctgaactacctccaagagagaccatcctcagcagcctagtatgttatgctagtcctggaatggtgtattctggatgtctactcaaggccaaaccccagtattgcctttcgtttccctattcaaggccaaggctagattctcttcattgtctccatttctctttctccagagctcctatagggcaagacactgtttctcatatatttctggatccttggagcttagctcggagcttggcatacatgcccagcatgaacttttctgaataaaataatttcaaatgctgtatacagga

SEQ ID NO: 185729 - DNA, 406 bp, Homo sapiens
  Payload ID: 16574
  Gene Symbol: SPATA8
  Gene Name: spermatogenesis associated 8
  ENST ID: ENST00000558553
  CDS Start-End: 150-356
ctcccatgtagttcctgagtgcaggactctcctgaagaaggggcgtctaaaaggccagcccatgcatcttgttcagaccaggctgctccatctccgctaagcccagggatccacttaacctcgtcgcgacatttctcagaagccatgacatgtccctgcggctggaggcctttcaagggtggcccaggaggcctcaagggcccggtgtggcctgcaaaggaagagaacagctgttctcacggaaggatccaaagggttcaaaggcgaagggtgccatctgcttccccactgattcagaagataaacaggagaagtgtcctgtttcacccatattgctggtcctgatttttcaatagtgtccctaccctgaagctcttccattggtcatcatggagttagctaacag

SEQ ID NO: 185730 - DNA, 1100 bp, Homo sapiens
  Payload ID: 16575
  Gene Symbol: SPATA9
  Gene Name: spermatogenesis associated 9
  Uniprot ID: Q9BWV2
  ENST ID: ENST00000274432
  CDS Start-End: 143-907
ccagcagtgagctgtgagttctgtccttgctggctttcccaagtggaaggctaccctcatctttcactaatggcagactaggacaagcattacccaggcctgcaagcttgttaaggactaggaacccaagcaagaactcaccatgccaatcaaacctgttgggtggatatgtgggcaggtgttgaagaacttttctggaagaatcgaggggatccagaaagcaatcatggaccttgtagatgagtttaaagatgaatttcccaccatcctaagattatcacagtctaatcagaaaagagaacctgcgcagaaaacatccaaaatcaggatggctattgctttagctaagattaatcgagcaacattaattcgtggattaaacagcatatccagatcctccaaatcagtggccaaacttctgcatcctcagcttgcatgcagacttttagagctaagggacatatctggtcgtctgctgagggaagttaatgcgccgaggcaacccctatataacattcaggtcagaaagggttctttgtttgaaatcatctcctttccagcaaagactgctttaactagcataatatatgcttcatatgcagcactaatttatttggcagtctgtgttaatgctgtgctgaagaaggtaaagaacatcttccaggaagaagaatccataaggcaaaacagagaggagagtgaaaattgtagaaaagccttttctgagcctgtgctttcggagcctatgtttgctgaaggtgaaatcaaagcaaaaccttataggtcattgccggagaagccagacatttcagattaccccaagcttcttgctaataagcagagtaataacatccaagttttacattctgtgtttgaccaatcagctgaaatgaatgagcaaatctgaatacaggtatcactgaacagaacttaagagttatctatttaatggcacatttcatctgacaaaactcagagtctagtttacatattctgaattgctctgctttcttaaaaaaaagagaagggggctactattaaaatgtcattttctagtatttacatgatagagtaaataaaatgaatattgatgtggaata

SEQ ID NO: 185731 - DNA, 1583 bp, Homo sapiens
  Payload ID: 16575
  Gene Symbol: SPATA9
  Gene Name: spermatogenesis associated 9
  Uniprot ID: Q9BWV2
  ENST ID: ENST00000316087
  CDS Start-End: 143-907
ccagcagtgagctgtgagttctgtccttgctggctttcccaagtggaaggctaccctcatctttcactaatggcagactaggacaagcattacccaggcctgcaagcttgttaaggactaggaacccaagcaagaactcaccatgccaatcaaacctgttgggtggatatgtgggcaggtgttgaagaacttttctggaagaatcgaggggatccagaaagcaatcatggaccttgtagatgagtttaaagatgaatttcccaccatcctaagattatcacagtctaatcagaaaagagaacctgcgcagaaaacatccaaaatcaggatggctattgctttagctaagattaatcgagcaacattaattcgtggattaaacagcatatccagatcctccaaatcagtggccaaacttctgcatcctcagcttgcatgcagacttttagagctaagggacatatctggtcgtctgctgagggaagttaatgcgccgaggcaacccctatataacattcaggtcagaaagggttctttgtttgaaatcatctcctttccagcaaagactgctttaactagcataatatatgcttcatatgcagcactaatttatttggcagtctgtgttaatgctgtgctgaagaaggtaaagaacatcttccaggaagaagaatccataaggcaaaacagagaggagagtgaaaattgtagaaaagccttttctgagcctgtgctttcggagcctatgtttgctgaaggtgaaatcaaagcaaaaccttataggtcattgccggagaagccagacatttcagattaccccaagcttcttgctaataagcagagtaataacatccaagttttacattctgtgtttgaccaatcagctgaaatgaatgagcaaatctgaatacaggcattcaaagaacattggctcactgaataggagactttacatctctcatggctgggcagcagctgtgtctggcttccttacttcaagatctgccttgatcacagatcacttaacagtggttaagtttcttattttcaagttcagcaggggcaaactatacacggtcgtccatcaaaatcctggggaagagaataactcatttaatattctgacatgtcaaatgttcttgatagactctgaagagtctgctgcagaagaaccaggttaaaaaaacagtaggtctaaggggttggggtgacaagattctgcatgtctaagaagctcccatgtgacaccaaagttgctggtctatggacaacagtttgaggagcaaggtcttcaagctctcattatggactgaaactggagaaaattctatggaactattatcagctcacacatataaaaactggtcactgagatgacagctgagctgaaatgcccaaaatgcaaatgaactagacatgccaacagcttggggaagagaattccatactgaaagaagagcaaatacaaaagcctgaaggaaagaaaagtcttggtgaatgtgttccagaagactggaacataatatgcaagattggtaaacaggcaggagccaggttgtgcagtgctgtgtatggattttact

SEQ ID NO: 185732 - DNA, 1046 bp, Homo sapiens
  Payload ID: 16575
  Gene Symbol: SPATA9
  Gene Name: spermatogenesis associated 9
  Uniprot ID: Q9BWV2
  ENST ID: ENST00000489917
  CDS Start-End: 157-564
agtaacaaagaattccagcagtgagctgtgagttctgtccttgctggctttcccaagtggaaggctaccctcatctttcactaatggcagactaggacaagcattacccaggcctgcaagcttgttaaggactaggaacccaagcaagaactcaccatgccaatcaaacctgttgggtggatatgtgggcaggtgttgaagaacttttctggaagaatcgaggggatccagaaagcaatcatggaccttgtagatgagtttaaagatgaatttcccaccatcctaagattatcacagtctaatcagaaaagagaacctgcgcagaaaacatccaaaatcaggatggctattgctttagctaagattaatcgagcaacattaattcgtggattaaacagcatatccagatcctccaaatcagtggccaaacttctgcatcctcagcttgcatgcagacttttagagctaagggacatatctggtcgtctgctgagggaagttaatgcgccgaggcaacccctatataacattcaggagaagaaaatggggctccaattgagttaaaccaaaaaagaagatgtattagctcccataaacaacccagagctgttgagattcccgacatggctggatacaggtcagaaagggttctttgtttgaaatcatctcctttccagcaaagactgctttaactagcataatatatgcttcatatgcagcactaatttatttggcagtctgtgttaatgctgtgctgaagaaggtaaagaacatcttccaggaagaagaatccataaggcaaaacagagaggagagtgaaaattgtagaaaagccttttctgagcctgtgctttcggagcctatgtttgctgaaggtgaaatcaaagcaaaaccttataggtcattgccggagaagccagacatttcagattaccccaagcttcttgctaataagcagagtaataacatccaagttttacattctgtgtttgaccaatcagctgaaatgaatgagcaaatctgaatacaggtatcactgaacagaa

SEQ ID NO: 185733 - DNA, 2169 bp, Homo sapiens
  Payload ID: 16575
  Gene Symbol: SPATA9
  Gene Name: spermatogenesis associated 9
  Uniprot ID: Q9BWV2
  ENST ID: ENST00000477715
  CDS Start-End: 157-693
agtaacaaagaattccagcagtgagctgtgagttctgtccttgctggctttcccaagtggaaggctaccctcatctttcactaatggcagactaggacaagcattacccaggcctgcaagcttgttaaggactaggaacccaagcaagaactcaccatgccaatcaaacctgttgggtggatatgtgggcaggtgttgaagaacttttctggaagaatcgaggggatccagaaagcaatcatggaccttgtagatgagtttaaagatgaatttcccaccatcctaagattatcacagtctaatcaggtcagaaagggttctttgtttgaaatcatctcctttccagcaaagactgctttaactagcataatatatgcttcatatgcagcactaatttatttggcagtctgtgttaatgctgtgctgaagaaggtaaagaacatcttccaggaagaagaatccataaggcaaaacagagaggagagtgaaaattgtagaaaagccttttctgagcctgtgctttcggagcctatgtttgctgaaggtgaaatcaaagcaaaaccttataggtcattgccggagaagccagacatttcagattaccccaagcttcttgctaataagcagagtaataacatccaagttttacattctgtgtttgaccaatcagctgaaatgaatgagcaaatctgaatacaggcattcaaagaacattggctcactgaataggagactttacatctctcatggctgggcagcagctgtgtctggcttccttacttcaagatctgccttgatcacagatcacttaacagtggttaagtttcttattttcaagttcagcaggggcaaactatacacggtcgtccatcaaaatcctggggaagagaataactcatttaatattctgacatgtcaaatgttcttgatagactctgaagagtctgctgcagaagaaccaggttaaaaaaacagtaggtctaaggggttggggtgacaagattctgcatgtctaagaagctcccatgtgacaccaaagttgctggtctatggacaacagtttgaggagcaaggtcttcaagctctcattatggactgaaactggagaaaattctatggaactattatcagctcacacatataaaaactggtcactgagatgacagctgagctgaaatgcccaaaatgcaaatgaactagacatgccaacagcttggggaagagaattccatactgaaagaagagcaaatacaaaagcctgaaggaaagaaaagtcttggtgaatgtgttccagaagactggaacataatatgcaagattggtaaacaggcaggagccaggttgtgcagtgctgtgtatggattttactctaagagcaaaggaaagccactgaagagtataaagcaggaaagtgtgaattgatttctttttgaaagaatgctcccggctctgtggagaatggattatagcaaaacaacaatggatgcccagaaatcagaaagctaggggtccatgaaaaaggtggtggcttgccgcagggggttgatgctgtaggggataaaaagtaataacaacagtagcagtagtagctacaattatattgtgttaactatgtgccaggcactattcaaaggctacatttatttattaactcctttaatcctccatgttactaaaaaggtattattttaattttatagtacagagaagttgggttgatgaacttgaatgaagatgctacagaaaaataaataaagatgactcccaagttttaggtttgtgcagctaggtgaactgtagtgccaaagactgtgaggagaaaggccaagaaatgaatggtatttttgcagaatggaaaatcaagagctatatatattttacacatattgagtttaaggtatctcagagacatccaagtagagatgtcaagtcaacaaccagatatatgagactaaagtcgagaatttctagagagaaaaactggggagtttccaggtcatagaattctatggactcacttggagaggaagtgtagataaggaagaaggtctaagacaattcctgaaacacttcaacatttagaggtcaggtggaagagaggttgtagagaggcaagatcagtagagtgtccaatctattgctaatcaaatgaaattcattcacagcttt

SEQ ID NO: 185734 - DNA, 455 bp, Homo sapiens
  Payload ID: 16576
  Gene Symbol: SPATS1
  Gene Name: spermatogenesis associated, serine-rich 1
  ENST ID: ENST00000515220
  CDS Start-End: 102-455
tctgtgggagaagcaggcggctgcggtgtcccttttgccctaggctctcggttctcaggcctcggcgtgcggcgtgcgttcggcagttcagttgccagttgatgagtccatccatgctcactggaaacagtccacggggctgccgtctcccctccatctcaagcacgacctgcggcagacagctggagaaggttccagaaaaaagggactctggcatgaccgaggtggagaggacctacagtgctaattgcagtgattttctggaatctaagggatgttttgccaacacaacaccctctggcaaaagtgtcagttcctcatcttctgtggaaacaggcccaagtgtcagtgagcctcctggcctccccagagtgtctgcttacgtagacaccactgctgacttggatcggaaactctccttctcacattctgatcactcctctgaaatgtcgttg

SEQ ID NO: 185735 - DNA, 1354 bp, Homo sapiens
  Payload ID: 16576
  Gene Symbol: SPATS1
  Gene Name: spermatogenesis associated, serine-rich 1
  Uniprot ID: Q496A3
  ENST ID: ENST00000288390
  CDS Start-End: 348-1250
agttgccagttggttcgttggtccgtggaggcctctgagcacagacccgggcctcccctggggaagggggtgggaagaccccgaggtggaaaagaaggagcaccttgagctggatgggggctgcagcgagcctggttcgggctgggggcggactcgctggggctcccagggcttccaaaccacgaaacgcccaggtggagggagtaaggctcccgtttagaggccagtcctgccctcctgactttcggtggcttgtggaatttgtttgttttgactgatacctttcttacgagggactttctttgtctctgggttgcttctaatatttaaaatcatcatgggcacagatgagtccatccatgctcactggaaacagtccacggggctgccgtctcccctccatctcaagcacgacctgcggcagacagctggagaaggttccagaaaaaagggactctggcatgaccgaggtggagaggacctacagtgctaattgcagtgattttctggaatctaagggatgttttgccaacacaacaccctctggcaaaagtgtcagttcctcatcttctgtggaaacaggcccaagtgtcagtgagcctcctggcctccccagagtgtctgcttacgtagacaccactgctgacttggatcggaaactctccttctcacattctgatcactcctctgaaatgtcgttgcctgaagtccaaaaggataaatatcctgaggaattcagcctgcttaagttgcagacgaaagatgggcatcgtcctgagtggacattttacccaaggtttagcagcaacatccacacctaccacgtcggaaagcagtgcttctttaatggagtcttcctcggcaacaagaggtctctatcagagaggacggtggacaagtgctttgggagaaagaaatacgatattgatcccaggaatggaatcccaaagttaactccaggcgacaatccatatatgtacccagaacagagtaaaggcttccacaaagcaggatcaatgctcccaccagtgaatttttcaatagtgccttatgaaaagaaatttgatacatttattccacttgagcctcttccacaaattcccaacttgcctttctgggtgaaggagaaggccaacagtttgaaaaatgagatacaagaggttgaggagcttgacaactggcagccagcagtgcccttaatgcacatgctacacctttctggtgctttggactttccaagacaatcctgagcataaacaggcccacaaaacatgtgctgactgcactctggcgacccttttccagttgatgttttttgtcatgtgactgttctaaatccagtgtttgaccctta

SEQ ID NO: 185736 - DNA, 1254 bp, Homo sapiens
  Payload ID: 16576
  Gene Symbol: SPATS1
  Gene Name: spermatogenesis associated, serine-rich 1
  ENST ID: ENST00000506468
  CDS Start-End: 157-372
caggtggagggagtaaggctcccgtttagaggccagtcctgccctcctgactttcggtggcttgtggaatttgtttgttttgactgatacctttcttacgagggactttctttgtctctgggttgcttctaatatttaaaatcatcatgggcacagatgagtccatccatgctcactggaaacagtccacggggctgccgtctcccctccatctcaagcacgacctgcggcagacagctggagaaggttccagaaaaaagggactctggcatgaccgaggtggagaggacctacaagagcaccaccaaagcagagagtctcataaattacctcactggatctcacagcagtggagaagtatattacctatgagtaaagggagccagagatttgacctgcccagtgcttgggttaataaaagggatgttttgccaacacaacaccctctggcaaaagtgtcagttcctcatcttctgtggaaacaggcccaagtgtcagtgagcctcctggcctccccagagtgtctgcttacgtagacaccactgctgacttggatcggaaactctccttctcacattctgatcactcctctgaaatgtcgttgcctgaagtccaaaaggataaatatcctgaggaattcagcctgcttaagttgcagacgaaagatgggcatcgtcctgagtggacattttacccaaggtttagcagcaacatccacacctaccacgtcggaaagcagtgcttctttaatggagtcttcctcggcaacaagaggtctctatcagagaggacggtggacaagtgctttgggagaaagaaatacgatattgatcccaggaatggaatcccaaagttaactccaggcgacaatccatatatgtacccagaacagagtaaaggcttccacaaagcaggatcaatgctcccaccagtgaatttttcaatagtgccttatgaaaagaaatttgatacatttattccacttgagcctcttccacaaattcccaacttgcctttctgggtgaaggagaaggccaacagtttgaaaaatgagatacaagaggttgaggagcttgacaactggcagccagcagtgcccttaatgcacatgctacacctttctggtgctttggactttccaagacaatcctgagcataaacaggcccacaaaacatgtgctgactgcactctggcgacccttttccagttgatgttttttgtcatgtgactgttctaaatccagtgtttgaccc

SEQ ID NO: 185737 - DNA, 1107 bp, Homo sapiens
  Payload ID: 16576
  Gene Symbol: SPATS1
  Gene Name: spermatogenesis associated, serine-rich 1
  Uniprot ID: Q496A3
  ENST ID: ENST00000323108
  CDS Start-End: 102-1004
tctgtgggagaagcaggcggctgcggtgtcccttttgccctaggctctcggttctcaggcctcggcgtgcggcgtgcgttcggcagttcagttgccagttgatgagtccatccatgctcactggaaacagtccacggggctgccgtctcccctccatctcaagcacgacctgcggcagacagctggagaaggttccagaaaaaagggactctggcatgaccgaggtggagaggacctacagtgctaattgcagtgattttctggaatctaagggatgttttgccaacacaacaccctctggcaaaagtgtcagttcctcatcttctgtggaaacaggcccaagtgtcagtgagcctcctggcctccccagagtgtctgcttacgtagacaccactgctgacttggatcggaaactctccttctcacattctgatcactcctctgaaatgtcgttgcctgaagtccaaaaggataaatatcctgaggaattcagcctgcttaagttgcagacgaaagatgggcatcgtcctgagtggacattttacccaaggtttagcagcaacatccacacctaccacgtcggaaagcagtgcttctttaatggagtcttcctcggcaacaagaggtctctatcagagaggacggtggacaagtgctttgggagaaagaaatacgatattgatcccaggaatggaatcccaaagttaactccaggcgacaatccatatatgtacccagaacagagtaaaggcttccacaaagcaggatcaatgctcccaccagtgaatttttcaatagtgccttatgaaaagaaatttgatacatttattccacttgagcctcttccacaaattcccaacttgcctttctgggtgaaggagaaggccaacagtttgaaaaatgagatacaagaggttgaggagcttgacaactggcagccagcagtgcccttaatgcacatgctacacctttctggtgctttggactttccaagacaatcctgagcataaacaggcccacaaaacatgtgctgactgcactctggcgacccttttccagttgatgttttttgtcatgtgactgttctaaatccagtgtttgaccctt

SEQ ID NO: 185738 - DNA, 3158 bp, Homo sapiens
  Payload ID: 16577
  Gene Symbol: SPATS2
  Gene Name: spermatogenesis associated, serine-rich 2
  Uniprot ID: Q86XZ4
  ENST ID: ENST00000321898
  CDS Start-End: 357-1994
gtggctctagaaggggaggtggaggatctcctttcctcttctcagacccgggagcgtccgggacgcggagcccggagctggggcgacgaggcgattgcgggggcctgggctagaatctccctggaaaaggagacatgaatgtctgcaatgatacttcctgacaagaagttgatacaagaaaaggaaaggagattaacagctagtgagcagaatttcgaacagcaggatttcgtattttttgcttccaactgcacacttccgttgcccacttttaaatcagagatacctacactcaaaacccagacaaggcaaaaggatacttttcttgtatattttttgagatcgaagaaacgacaatgtccaggaaacagaaccagaaggattcatcaggattcatttttgatttgcagtccaataccgtactggcccagggaggagcttttgagaacatgaaagagaagataaatgcggtacgtgcaatagttcctaataagagcaacaatgaaattatcctggttttgcagcactttgataactgtgtggacaaaacagtacaagcattcatggaaggtagtgccagtgaagtactcaaagaatggacagtaacaggcaagaaaaagaacaaaaagaagaaaaacaaaccgaaacctgccgcagaaccaagtaacggcatcccagattccagtaaatcagtttccattcaagaggaacagtctgcgccttcctcagagaaaggtggtatgaatggctaccatgtcaatggtgccatcaatgacactgagtctgtggactcactcagtgaaggtttggagacactttcaatagatgccagagaattggaggatcccgagtctgccatgctagatacgctggatagaacaggatccatgctgcagaatggtgtctctgattttgagaccaagtctttgactatgcactctattcacaattctcaacaacccaggaatgctgccaaatctctctcaagacctaccacagaaactcagttttcaaatatggggatggaagatgttcccctcgccaccagtaaaaagctaagttccaatattgaaaaatctgtaaaagacctccagcgctgcacagtgtctcttgcacggtatcgagttgtagttaaagaagagatggatgcctccattaagaaaatgaaacaagcctttgctgaattggagagctgtttaatggatcgagaagtggcgttgcttgctgaaatggacaaagtgaaagctgaagcaatggaaattttgctcagccgacaaaagaaggctgaacttctaaagaagatgactcatgtggctgttcaaatgtcagagcagcaattggttgagctcagagctgatatcaagcactttgttagtgaacgtaaatatgatgaggatctgggacgagtagcccggttcacctgtgatgtagagaccctaaagaagagcattgattcatttggacaagtgtctcatccaaagaacagctattcgaccagatcccgatgtagctcagttacatctgtgtccttgagtagcccaagtgatgcctctgctgcttcctcttccacctgtgcctctcctcccagccttacaagtgctaacaagaaaaactttgcaccgggagagactcctgcagccatagcaaactccagtggccagccctaccagccacttcgggaggtattgccagggaacagacgaggaggacagggctataggccacaaggccaaaagtccaatgaccccatgaaccaagggcggcatgacagtatgggtcgttacagaaacagctcgtggtattcatctggttccaggtatcagagtgctccatctcaggcaccaggaaacaccattgaaagaggccagactcactctgcagggaccaatggaactggagtcagcatggagcccagccctcccacgccttcattcaaaaaggggctcccccagcgcaaacccaggacctctcagactgaagccgtgaactcttgagagaaaatccagttggcctctctcctctatccacacaattcaacttgataactggactttaggaaacttacagttagatgtaataacaaaaagaagtttatgcgtatcactttttgtgccattctaagtatttttggtttcttgtctccttatttcctctttaccatttttggaggggaagctattttttttccttgatctttcccagtgatatggattgaatctggttggtcatttccaccaggaatcagaggcagctgttaccaggtttcggccttccagttgatccctccactgtccaggctgtctcaggaggaggtgaatcagagctagtctgtcacctttccaatctaagccgaagccacaggtgcctgacaggttcccttctaacaactatttgaccaagagaggcaatcagggggttgtatactgcactggattcgccagagaagggaaaatttaattagtgaaaaggaaagaacactaggaaacatttgagaacctgcctctatcccagaatgtgctggagatttgacactcaaatcagtgtttagtcttctgcttggcaccatagcttaacctgcagtttcttcaaaatgcccaatgccttgtttcctattaccttagattgcaaaccagtctagggaagtctatgagaaagtagcatttaattaaagtttaaaaaaaaaaaggttgggcgttgtggctcatgcctgtaatcccagcactttgggaggctgaggcgggtggatcactaggtcaggagttcaagaccagcctggccaacatggtgaaaccctgtctgtactaaaaatacaaaaattagctgagcatggtggcgtgtgcctgtaatctcagctactcaggaggctgaggcaggagaatcgcttgaacccaggaggcggaggctgcagtgagctgagattgtgccactgcactccagcctgggagacagagcaagactcagtctcaaaaaaaaaaaaaaaagcatttttctgttttaatgtttggagacttttttttttgttctctccctttcctgaaccctattctgatcctgaaccaaatttatagcaatataattagtgttaatctaaggcattactcatcaaaaaaattgctgcagtctttacagttgaataaataaaaacaactgcataaata

SEQ ID NO: 185739 - DNA, 643 bp, Homo sapiens
  Payload ID: 16577
  Gene Symbol: SPATS2
  Gene Name: spermatogenesis associated, serine-rich 2
  ENST ID: ENST00000549298
  CDS Start-End: 535-643
gcccaggagagaagtggggaggcggcggtgggggcggggcggcgtccggctctgagagagctgggggaggagcgcggcggcgacggcggcggtggctctagaaggggaggtggaggatctcctttcctcttctcagacccgggagcgtccgggacgcggagcccggagctggggcgacgaggcgattgcgggggcctgggctagttatttgcagtgacttaaaatttggaggcaaattttccttaagaggatatcaagttccagtatcttcagatgttgataagccgttagaatctccctggaaaaggagacatgaatgtctgcaatgatacttcctgacaagaagttgatacaagaaaaggaaaggagattaacagctagtgagcagaatttcgaacagcaggatttcgtattttttgcttccaactgcacacttccgttgcccacttttaaatcagagatacctacactcaaaacccagacaaggcaaaaggatacttttcttgtatattttttgagatcgaagaaacgacaatgtccaggaaacagaaccagaaggattcatcaggattcatttttgatttgcagtccaataccgtactggcccagggaggagcttttgagaacatgaaagagaaggtaa

SEQ ID NO: 185740 - DNA, 546 bp, Homo sapiens
  Payload ID: 16577
  Gene Symbol: SPATS2
  Gene Name: spermatogenesis associated, serine-rich 2
  ENST ID: ENST00000548654
  CDS Start-End: 522-546
aaccgatgccgccgggtacgagctgtgctgcacgcggacgcgagctcgcgtcccacccgttttccccttccatctactttgtccccaaccctctccccgagtctcttcctttccccgctgaggtcactagtgaactctgcttccaagtactcctgcaaagtacaccacaagcctgtctatattctcaagccatccgcttcagttcatatgaccacacttgcatgtcagcaacagaagagaacacacatcatacagcatttacagcagtggacaaagagaatctccctggaaaaggagacatgaatgtctgcaatgatacttcctgacaagaagttgatacaagaaaaggaaaggagattaacagctagtgagcagaatttcgaacagcaggatttcgtattttttgcttccaactgcacacttccgttgcccacttttaaatcagagatacctacactcaaaacccagacaaggcaaaaggatacttttcttgtatattttttgagatcgaagaaacgacaatgtccaggaaacagaaccagaagg

SEQ ID NO: 185741 - DNA, 570 bp, Homo sapiens
  Payload ID: 16577
  Gene Symbol: SPATS2
  Gene Name: spermatogenesis associated, serine-rich 2
  ENST ID: ENST00000549538
  CDS Start-End: 371-570
tccgtcagttcagctcgggccctccgttcccggcgcgcgccgggtccctaaccgatgccgccggctgctggctaccaatattctactttctgtctctatgaatgtgactaccctggttacctcatataatctccctggaaaaggagacatgaatgtctgcaatgatacttcctgacaagaagttgatacaagaaaaggaaaggagattaacagctagtgagcagaatttcgaacagcaggatttcgtattttttgcttccaactgcacacttccgttgcccacttttaaatcagagatacctacactcaaaacccagacaaggcaaaaggatacttttcttgtatattttttgagatcgaagaaacgacaatgtccaggaaacagaaccagaaggattcatcaggattcatttttgatttgcagtccaataccgtactggcccagggaggagcttttgagaacatgaaagagaagataaatgcggtacgtgcaatagttcctaataagagcaacaatgaaattatcctggttttgcagcactttgataactgtgtggacaaaacagtaca

SEQ ID NO: 185742 - DNA, 527 bp, Homo sapiens
  Payload ID: 16577
  Gene Symbol: SPATS2
  Gene Name: spermatogenesis associated, serine-rich 2
  ENST ID: ENST00000550643
  CDS Start-End: 424-527
aaccgatgccgccgggtacgagctgtgctgcacgcggacgcgagctcgcgtcccacccgttttccccttccatctactttgtccccaaccctctccccgagtctcttcctttccccgctgctggctaccaatattctactttctgtctctatgaatgtgactaccctggttacctcatataatctccctggaaaaggagacatgaatgtctgcaatgatacttcctgacaagaagttgatacaagaaaaggaaaggagattaacagctagtgagcagaatttcgaacagcaggatttcgtattttttgcttccaactgcacacttccgttgcccacttttaaatcagagatacctacactcaaaacccagacaaggcaaaaggatacttttcttgtatattttttgagatcgaagaaacgacaatgtccaggaaacagaaccagaaggattcatcaggattcatttttgatttgcagtccaataccgtactggcccagggaggagcttttgagaacatgaaagagaa

SEQ ID NO: 185743 - DNA, 2993 bp, Homo sapiens
  Payload ID: 16577
  Gene Symbol: SPATS2
  Gene Name: spermatogenesis associated, serine-rich 2
  Uniprot ID: Q86XZ4
  ENST ID: ENST00000552918
  CDS Start-End: 385-2022
ctcttctcagacccgggagcgtccgggacgcggagcccggagctggggcgacgaggcgattgcgggggcctgggctagctgctggctaccaatattctactttctgtctctatgaatgtgactaccctggttacctcatataatctccctggaaaaggagacatgaatgtctgcaatgatacttcctgacaagaagttgatacaagaaaaggaaaggagattaacagctagtgagcagaatttcgaacagcaggatttcgtattttttgcttccaactgcacacttccgttgcccacttttaaatcagagatacctacactcaaaacccagacaaggcaaaaggatacttttcttgtatattttttgagatcgaagaaacgacaatgtccaggaaacagaaccagaaggattcatcaggattcatttttgatttgcagtccaataccgtactggcccagggaggagcttttgagaacatgaaagagaagataaatgcggtacgtgcaatagttcctaataagagcaacaatgaaattatcctggttttgcagcactttgataactgtgtggacaaaacagtacaagcattcatggaaggtagtgccagtgaagtactcaaagaatggacagtaacaggcaagaaaaagaacaaaaagaagaaaaacaaaccgaaacctgccgcagaaccaagtaacggcatcccagattccagtaaatcagtttccattcaagaggaacagtctgcgccttcctcagagaaaggtggtatgaatggctaccatgtcaatggtgccatcaatgacactgagtctgtggactcactcagtgaaggtttggagacactttcaatagatgccagagaattggaggatcccgagtctgccatgctagatacgctggatagaacaggatccatgctgcagaatggtgtctctgattttgagaccaagtctttgactatgcactctattcacaattctcaacaacccaggaatgctgccaaatctctctcaagacctaccacagaaactcagttttcaaatatggggatggaagatgttcccctcgccaccagtaaaaagctaagttccaatattgaaaaatctgtaaaagacctccagcgctgcacagtgtctcttgcacggtatcgagttgtagttaaagaagagatggatgcctccattaagaaaatgaaacaagcctttgctgaattggagagctgtttaatggatcgagaagtggcgttgcttgctgaaatggacaaagtgaaagctgaagcaatggaaattttgctcagccgacaaaagaaggctgaacttctaaagaagatgactcatgtggctgttcaaatgtcagagcagcaattggttgagctcagagctgatatcaagcactttgttagtgaacgtaaatatgatgaggatctgggacgagtagcccggttcacctgtgatgtagagaccctaaagaagagcattgattcatttggacaagtgtctcatccaaagaacagctattcgaccagatcccgatgtagctcagttacatctgtgtccttgagtagcccaagtgatgcctctgctgcttcctcttccacctgtgcctctcctcccagccttacaagtgctaacaagaaaaactttgcaccgggagagactcctgcagccatagcaaactccagtggccagccctaccagccacttcgggaggtattgccagggaacagacgaggaggacagggctataggccacaaggccaaaagtccaatgaccccatgaaccaagggcggcatgacagtatgggtcgttacagaaacagctcgtggtattcatctggttccaggtatcagagtgctccatctcaggcaccaggaaacaccattgaaagaggccagactcactctgcagggaccaatggaactggagtcagcatggagcccagccctcccacgccttcattcaaaaaggggctcccccagcgcaaacccaggacctctcagactgaagccgtgaactcttgagagaaaatccagttggcctctctcctctatccacacaattcaacttgataactggactttaggaaacttacagttagatgtaataacaaaaagaagtttatgcgtatcactttttgtgccattctaagtatttttggtttcttgtctccttatttcctctttaccatttttggaggggaagctattttttttccttgatctttcccagtgatatggattgaatctggttggtcatttccaccaggaatcagaggcagctgttaccaggtttcggccttccagttgatccctccactgtccaggctgtctcaggaggaggtgaatcagagctagtctgtcacctttccaatctaagccgaagccacaggtgcctgacaggttcccttctaacaactatttgaccaagagaggcaatcagggggttgtatactgcactggattcgccagagaagggaaaatttaattagtgaaaaggaaagaacactaggaaacatttgagaacctgcctctatcccagaatgtgctggagatttgacactcaaatcagtgtttagtcttctgcttggcaccatagcttaacctgcagtttcttcaaaatgcccaatgccttgtttcctattaccttagattgcaaaccagtctagggaagtctatgagaaagtagcatttaattaaagtttaaaaaaaaaaaggttgggcgttgtggctcatgcctgtaatcccagcactttgggaggctgaggcgggtggatcactaggtcaggagttcaagaccagcctggccaacatggtgaaaccctgtctgtactaaaaatacaaaaattagctgagcatggtggcgtgtgcctgtaatctcagctactcaggaggctgaggcaggagaatcgcttgaacccaggaggcggaggctgcagtgagctgagattgtgccactgcactccagcctgggagacagagcaagactcagtctc

SEQ ID NO: 185744 - DNA, 465 bp, Homo sapiens
  Payload ID: 16577
  Gene Symbol: SPATS2
  Gene Name: spermatogenesis associated, serine-rich 2
  ENST ID: ENST00000552171
  CDS Start-End: 435-465
cggagctggggcgacgaggcgattgcgggggcctgggctagctgctggctaccaatattctactttctgtctctatgaatgtgactaccctggttacctcatatttatttgcagtgacttaaaatttggaggcaaattttccttaagaggatatcaagttccagtatcttcagatgttgataagccgttagaatctccctggaaaaggagacatgaatgtctgcaatgatacttcctgacaagaagttgatacaagaaaaggaaaggagattaacagctagtgagcagaatttcgaacagcaggatttcgtattttttgcttccaactgcacacttccgttgcccacttttaaatcagagatacctacactcaaaacccagacaaggcaaaaggatacttttcttgtatattttttgagatcgaagaaacgacaatgtccaggaaacagaaccagaaggattcat

SEQ ID NO: 185745 - DNA, 3320 bp, Homo sapiens
  Payload ID: 16577
  Gene Symbol: SPATS2
  Gene Name: spermatogenesis associated, serine-rich 2
  Uniprot ID: Q86XZ4
  ENST ID: ENST00000553127
  CDS Start-End: 514-2151
gacggcggcggtggctctagaaggggaggtggaggatctcctttcctcttctcagacccgggagcgtccgggacgcggagcccggagctggggcgacgaggcgattgcgggggcctgggctagctgctggctaccaatattctactttctgtctctatgaatgtgactaccctggttacctcatatggaataaggagggagactgatttggaaacatctgtgaggagcaaagaggacacttactcacccccaggtccagtggtatgagagaatctccctggaaaaggagacatgaatgtctgcaatgatacttcctgacaagaagttgatacaagaaaaggaaaggagattaacagctagtgagcagaatttcgaacagcaggatttcgtattttttgcttccaactgcacacttccgttgcccacttttaaatcagagatacctacactcaaaacccagacaaggcaaaaggatacttttcttgtatattttttgagatcgaagaaacgacaatgtccaggaaacagaaccagaaggattcatcaggattcatttttgatttgcagtccaataccgtactggcccagggaggagcttttgagaacatgaaagagaagataaatgcggtacgtgcaatagttcctaataagagcaacaatgaaattatcctggttttgcagcactttgataactgtgtggacaaaacagtacaagcattcatggaaggtagtgccagtgaagtactcaaagaatggacagtaacaggcaagaaaaagaacaaaaagaagaaaaacaaaccgaaacctgccgcagaaccaagtaacggcatcccagattccagtaaatcagtttccattcaagaggaacagtctgcgccttcctcagagaaaggtggtatgaatggctaccatgtcaatggtgccatcaatgacactgagtctgtggactcactcagtgaaggtttggagacactttcaatagatgccagagaattggaggatcccgagtctgccatgctagatacgctggatagaacaggatccatgctgcagaatggtgtctctgattttgagaccaagtctttgactatgcactctattcacaattctcaacaacccaggaatgctgccaaatctctctcaagacctaccacagaaactcagttttcaaatatggggatggaagatgttcccctcgccaccagtaaaaagctaagttccaatattgaaaaatctgtaaaagacctccagcgctgcacagtgtctcttgcacggtatcgagttgtagttaaagaagagatggatgcctccattaagaaaatgaaacaagcctttgctgaattggagagctgtttaatggatcgagaagtggcgttgcttgctgaaatggacaaagtgaaagctgaagcaatggaaattttgctcagccgacaaaagaaggctgaacttctaaagaagatgactcatgtggctgttcaaatgtcagagcagcaattggttgagctcagagctgatatcaagcactttgttagtgaacgtaaatatgatgaggatctgggacgagtagcccggttcacctgtgatgtagagaccctaaagaagagcattgattcatttggacaagtgtctcatccaaagaacagctattcgaccagatcccgatgtagctcagttacatctgtgtccttgagtagcccaagtgatgcctctgctgcttcctcttccacctgtgcctctcctcccagccttacaagtgctaacaagaaaaactttgcaccgggagagactcctgcagccatagcaaactccagtggccagccctaccagccacttcgggaggtattgccagggaacagacgaggaggacagggctataggccacaaggccaaaagtccaatgaccccatgaaccaagggcggcatgacagtatgggtcgttacagaaacagctcgtggtattcatctggttccaggtatcagagtgctccatctcaggcaccaggaaacaccattgaaagaggccagactcactctgcagggaccaatggaactggagtcagcatggagcccagccctcccacgccttcattcaaaaaggggctcccccagcgcaaacccaggacctctcagactgaagccgtgaactcttgagagaaaatccagttggcctctctcctctatccacacaattcaacttgataactggactttaggaaacttacagttagatgtaataacaaaaagaagtttatgcgtatcactttttgtgccattctaagtatttttggtttcttgtctccttatttcctctttaccatttttggaggggaagctattttttttccttgatctttcccagtgatatggattgaatctggttggtcatttccaccaggaatcagaggcagctgttaccaggtttcggccttccagttgatccctccactgtccaggctgtctcaggaggaggtgaatcagagctagtctgtcacctttccaatctaagccgaagccacaggtgcctgacaggttcccttctaacaactatttgaccaagagaggcaatcagggggttgtatactgcactggattcgccagagaagggaaaatttaattagtgaaaaggaaagaacactaggaaacatttgagaacctgcctctatcccagaatgtgctggagatttgacactcaaatcagtgtttagtcttctgcttggcaccatagcttaacctgcagtttcttcaaaatgcccaatgccttgtttcctattaccttagattgcaaaccagtctagggaagtctatgagaaagtagcatttaattaaagtttaaaaaaaaaaaggttgggcgttgtggctcatgcctgtaatcccagcactttgggaggctgaggcgggtggatcactaggtcaggagttcaagaccagcctggccaacatggtgaaaccctgtctgtactaaaaatacaaaaattagctgagcatggtggcgtgtgcctgtaatctcagctactcaggaggctgaggcaggagaatcgcttgaacccaggaggcggaggctgcagtgagctgagattgtgccactgcactccagcctgggagacagagcaagactcagtctcaaaaaaaaaaaaaaaagcatttttctgttttaatgtttggagacttttttttttgttctctccctttcctgaaccctattctgatcctgaaccaaatttatagcaatataattagtgttaatctaaggcattactcatcaaaaaaattgctgcagtctttacagttgaataaataaaaacaactgcataaatatgccc

SEQ ID NO: 185746 - DNA, 2781 bp, Homo sapiens
  Payload ID: 16577
  Gene Symbol: SPATS2
  Gene Name: spermatogenesis associated, serine-rich 2
  ENST ID: ENST00000549412
  CDS Start-End: 990-1877
aaccgatgccgccgggtacgagctgtgctgcacgcggacgcgagctcgcgtcccacccgttttccccttccatctactttgtccccaaccctctccccgagtctcttcctttccccggtaattcccagtctccggtggcgcgcgagcctgcggacggtgcgagacgcgagggaccgggccccgagaagagcggtaacccgactggtcggagcccgcctctcgccgccccgcgcctctccccgatcttctcggtctccggtgcgcgggccgtctcgccgctcgagccgcgctcgcgcacccgttggctgccacagcctcgagcttggcgcgccggattcgcgccggcgcgagtacgcgccctgagctctggctggctggctggcgcgcacgcgcccgagagggctccggggcggggcgagccgctgcctgggcgagggtcggggtgatctgctggatctccggcagcatcctgcagtccggcccaggagagaagtggggaggcggcggtgggggcggggcggcgtccggctctgagagagctgggggaggagcgcggcggcgacggcggcggtggctctagaaggggaggtggaggatctcctttcctcttctcagacccgggagcgtccgggacgcggagcccggagctggggcgacgaggcgattgcgggggcctgggctagctgctggctaccaatattctactttctgtctctatgaatgtgactaccctggttacctcatataatctccctggaaaaggagacatgaatgtctgcaatgatacttcctgacaagaagttgatacaagaaaaggaaaggagattaacagctagtgagcagaatttcgaacagcaggatttcgtattttttgcttccaactgcacacttccgttgcccacttttaaatcagagatacctacactcaaaacccagacaaggcaaaaggatacttttcttgtatattttttgagatcgaagaaacgacaatgtccaggaaacagaaccagaaggattcatcaggattcatttttgatttgcagtccaataccgtactggcccagggaggagcttttgagaacatgaaagagaagataaatgcggtacgtgcaatagttcctaataagagcaacaatgaaattatcctggttttgcagcactttgataactgtgtggacaaaacagtacaagcattcatggaaggtagtgccagtgaagtactcaaagaatggacagtaacaggcaagaaaaagaacaaaaagaagaaaaacaaaccgaaacctgccgcagaaccaagtaacggcatcccagattccagtaaatcagtttccattcaagaggaacagtctgcgccttcctcagagaaaggtggtatgaatggctaccatgtcaatggtgccatcaatgacactgagtctgtggactcactcagtgaaggtttggagacactttcaatagatgccagagaattggaggatcccgagtctgccatgctagatacgctggatagaacaggatccatgctgcagaatggtgtctctgattttgagaccaagtctttgactatgcactctattcacaattctcaacaacccaggaatgctgccaaatctctctcaagacctaccacagaaactcagttttcaaatatggggatggaagatgttcccctcgccaccagtaaaaagctaagttccaatattgaaaaatctgtaaaagacctccagcgctgcacagtgtctcttgcacggtatcgagttgtagttaaagaagagatggatgcctccattaagaaaatgaaacaagcctttgctgaattggagagctggtattccaatgctgctagagttcttggagcaaaatattgccaagtttaatggatcgagaagtggcgttgcttgctgaaatggacaaagtgaaagctgaagcaatggaaattttgctcagccgacaaaagaaggctgaacttctaaagaagatgactcatgtggctgttcaaatgtcagagcagcaattggttgagctcagagctgatatcaagcactttgttagtgaacgtaaatatgatgaggatctgggacgagtagcccggttcacctgtgatgtagagaccctaaagaagagcattgattcatttggacaagtgtctcatccaaagaacagctattcgaccagatcccgatgtagctcagttacatctgtgtccttgagtagcccaagtgatgcctctgctgcttcctcttccacctgtgcctctcctcccagccttacaagtgctaacaagaaaaactttgcaccgggagagactcctgcagccatagcaaactccagtggccagccctaccagccacttcgggaggtattgccagggaacagacgaggaggacagggctataggccacaaggccaaaagtccaatgaccccatgaaccaagggcggcatgacagtatgggtcgttacagaaacagctcgtggtattcatctggttccaggtatcagagtgctccatctcaggcaccaggaaacaccattgaaagaggccagactcactctgcagggaccaatggaactggagtcagcatggagcccagccctcccacgccttcattcaaaaaggggctcccccagcgcaaacccaggacctctcagactgaagccgtgaactcttgagagaaaatccagttggcctctctcctctatccacacaattcaacttgataactggactttaggaaacttacagttagatgtaataacaaaaagaagtttatgcgtatcac

SEQ ID NO: 185747 - DNA, 720 bp, Homo sapiens
  Payload ID: 16577
  Gene Symbol: SPATS2
  Gene Name: spermatogenesis associated, serine-rich 2
  ENST ID: ENST00000551540
  CDS Start-End: 497-720
gaggatctcctttcctcttctcagacccgggagcgtccgggacgcggagcccggagctggggcgacgaggcgattgcgggggcctgggctagctgaggtcactagtgaactctgcttccaagtactcctgcaaagtacaccacaagcctgtctatattctcaagccatccgcttcagttcatatgaccacacttgcatgtcagcaacagaagagaacacacatcatacagcatttacagcagtggacaaagagaatctccctggaaaaggagacatgaatgtctgcaatgatacttcctgacaagaagttgatacaagaaaaggaaaggagattaacagctagtgagcagaatttcgaacagcaggatttcgtattttttgcttccaactgcacacttccgttgcccacttttaaatcagagatacctacactcaaaacccagacaaggcaaaaggatacttttcttgtatattttttgagatcgaagaaacgacaatgtccaggaaacagaaccagaaggattcatcaggattcatttttgatttgcagtccaataccgtactggcccagggaggagcttttgagaacatgaaagagaagataaatgcggtacgtgcaatagttcctaataagagcaacaatgaaattatcctggttttgcagcactttgataactgtgtggacaaaacagtacaagcattcatggaaggtagtgccag

SEQ ID NO: 185748 - DNA, 558 bp, Homo sapiens
  Payload ID: 16577
  Gene Symbol: SPATS2
  Gene Name: spermatogenesis associated, serine-rich 2
  ENST ID: ENST00000548710
  CDS Start-End: 357-558
gatgccgccgggtacgagctgtgctgcacgcggacgcgagctcgcgtcccacccgttttccccttccatctactttgtccccaaccctctccccgagtctcttcctttccccgaatctccctggaaaaggagacatgaatgtctgcaatgatacttcctgacaagaagttgatacaagaaaaggaaaggagattaacagctagtgagcagaatttcgaacagcaggatttcgtattttttgcttccaactgcacacttccgttgcccacttttaaatcagagatacctacactcaaaacccagacaaggcaaaaggatacttttcttgtatattttttgagatcgaagaaacgacaatgtccaggaaacagaaccagaaggattcatcaggattcatttttgatttgcagtccaataccgtactggcccagggaggagcttttgagaacatgaaagagaagataaatgcggtacgtgcaatagttcctaataagagcaacaatgaaattatcctggttttgcagcactttgataactgtgtggacaaaacagtacaag

SEQ ID NO: 185749 - DNA, 675 bp, Homo sapiens
  Payload ID: 16577
  Gene Symbol: SPATS2
  Gene Name: spermatogenesis associated, serine-rich 2
  ENST ID: ENST00000550997
  CDS Start-End: 381-675
gcgctctctcaggaggcagagcgaccgcgcggtccggaggccccagcgtttcccgtcgttggcgactctgaaattgccttttggaacaaaacttgggtcgggaaggaggcgaaggggaaagcggtgtgaagtcctcgaatctccctggaaaaggagacatgaatgtctgcaatgatacttcctgacaagaagttgatacaagaaaaggaaaggagattaacagctagtgagcagaatttcgaacagcaggatttcgtattttttgcttccaactgcacacttccgttgcccacttttaaatcagagatacctacactcaaaacccagacaaggcaaaaggatacttttcttgtatattttttgagatcgaagaaacgacaatgtccaggaaacagaaccagaaggattcatcaggattcatttttgatttgcagtccaataccgtactggcccagggaggagcttttgagaacatgaaagagaagataaatgcggtacgtgcaatagttcctaataagagcaacaatgaaattatcctggttttgcagcactttgataactgtgtggacaaaacagtacaagcattcatggaaggtagtgccagtgaagtactcaaagaatggacagtaacaggcaagaaaaagaacaaaaagaagaaaaacaaaccgaaacctg

SEQ ID NO: 185750 - DNA, 701 bp, Homo sapiens
  Payload ID: 16577
  Gene Symbol: SPATS2
  Gene Name: spermatogenesis associated, serine-rich 2
  ENST ID: ENST00000549045
  CDS Start-End: 135-326
caggatttcgtattttttgcttccaactgcacacttccgttgcccacttttaaatcagagatacctacactcaaaacccagacaaggcaaaaggatacttttcttgtatattttttgagatcgaagaaacgacaatgtccaggaaacagaaccagaaggattcatcaggattcatttttgatttgcagtccaataccgtactggcccagggaggagcttttgagaacatgaaagagaaggctggagtgcagtggcgtgatctcagctcactgcacacctccgcctcccgggttcaagtgattctcctgcctcaacctcccgtgtagctggggatacagataaatgcggtacgtgcaatagttcctaataagagcaacaatgaaattatcctggttttgcagcactttgataactgtgtggacaaaacagtacaagcattcatggaaggtagtgccagtgaagtactcaaagaatggacagtaacaggcaagaaaaagaacaaaaagaagaaaaacaaaccgaaacctgccgcagaaccaagtaacggcatcccagattccagtaaatcagtttccattcaagaggaacagtctgcgccttcctcagagaaaggtggtatgaatggctaccatgtcaatggtgccatcaatgacactgagtctgtggactcactcagtgaaggtttggagacactttcaata

SEQ ID NO: 185751 - DNA, 552 bp, Homo sapiens
  Payload ID: 16577
  Gene Symbol: SPATS2
  Gene Name: spermatogenesis associated, serine-rich 2
  ENST ID: ENST00000548377
  CDS Start-End: 528-552
cgttttccccttccatctactttgtccccaaccctctccccgagtctcttcctttccccgacccgggagcgtccgggacgcggagcccggagctggggcgacgaggcgattgcgggggcctgggctagctgctggctaccaatattctactttctgtctctatgaatgtgactaccctggttacctcatatagatggagtctcactatggtgcctactctgattttgaactcctggcttcaagcaatcctcccaccttggccttccaaagtgctgggattacagaatctccctggaaaaggagacatgaatgtctgcaatgatacttcctgacaagaagttgatacaagaaaaggaaaggagattaacagctagtgagcagaatttcgaacagcaggatttcgtattttttgcttccaactgcacacttccgttgcccacttttaaatcagagatacctacactcaaaacccagacaaggcaaaaggatacttttcttgtatattttttgagatcgaagaaacgacaatgtccaggaaacagaaccagaagg

SEQ ID NO: 185752 - DNA, 1810 bp, Homo sapiens
  Payload ID: 16577
  Gene Symbol: SPATS2
  Gene Name: spermatogenesis associated, serine-rich 2
  ENST ID: ENST00000547865
  CDS Start-End: 435-662
cggagctggggcgacgaggcgattgcgggggcctgggctagctgctggctaccaatattctactttctgtctctatgaatgtgactaccctggttacctcatatttatttgcagtgacttaaaatttggaggcaaattttccttaagaggatatcaagttccagtatcttcagatgttgataagccgttagaatctccctggaaaaggagacatgaatgtctgcaatgatacttcctgacaagaagttgatacaagaaaaggaaaggagattaacagctagtgagcagaatttcgaacagcaggatttcgtattttttgcttccaactgcacacttccgttgcccacttttaaatcagagatacctacactcaaaacccagacaaggcaaaaggatacttttcttgtatattttttgagatcgaagaaacgacaatgtccaggaaacagaaccagaagggaaggagagcgcgagtgaacaaggaaggaactggagggcatgagtgctggaaccggctggctgcttcagtaccagcaggggtgaactctgtgtgggccccgtggcagcatccaggctgtggggtgcctgtgacccccgaagctccagagggcatgttacagtgctcttctggctctgccatttgtggacggcttaagtgttaacagctcagtgggccctttccccccgtgtgtggggtggctgccctctgccagcaagggcaaagggccagtgtgacagccttttgtatctgcactcgtggctcctgagctcttgtctggtgtccaggaaaaatgaggtcacacgaatgaattgaaggatggtaaatgcgggagattttattgctgatgaaagtggcttttagcaggaaggggagctgaaaaggggttggtggggtgcgggtagataatctttccctgaagtccagctgtctccagctagttttttctccaaagttacaccatcaagctgtccctctaaagtcaacccacttctctccgacatcctgacgtccagctagttctcctctctgccagctgagtctggggtctttataggcacagaatggggcagggtggggccatgggtggtttaggaaaaggcaacaaacaggaaaacagagatataagttctcacattgggccaaggtttcaggcattttggcttgagggtggcgttttaaccggtgacccacccttttctgcctagaatttctctgcctcctgtccccatcagttgcttttttctaattactataaaatgaatttaaatattaactataaaagaatttaaattttagactacaacataggccgggtctggtggctcacgcctataatcccagcactttgggaggccgaggtgggtgggtcacaaggtcaggagattgagaccatgctggctaacacagtgaaaccccgtctctactaaaaatacaaaaaaaaaaaaaattagccgggcgtggtggcgggtgcctgtagtcccagctactcaggaggctgaggcaggagaatggtgtgaacccaggaggcggagcttgcagtgagcagagatcatgccactgcactccagcctgggcaacagagagagactctgtctcaaaaaaaaaaaaaaaaaaaatagactacaacatagacactaagtgcttaccagttttggttgaacttagcctagatttacacttagttggaaacaaagtaaagcttatgtgttgttgggactttctctgaaacaaatctatgcatgtaattcatttgcatgtctgatatttggtcccatgacatataaaatattacaacatttcatttattca

SEQ ID NO: 185753 - DNA, 570 bp, Homo sapiens
  Payload ID: 16577
  Gene Symbol: SPATS2
  Gene Name: spermatogenesis associated, serine-rich 2
  ENST ID: ENST00000549179
  CDS Start-End: 555-570
gtgctgcacgcggacgcgagctcgcgtcccacccgttttccccttccatctactttgtccccaaccctctccccgagtctcttcctttccccgacccgggagcgtccgggacgcggagcccggagctggggcgacgaggcgattgcgggggcctgggctagctgctggctaccaatattctactttctgtctctatgaatgtgactaccctggttacctcatatttatttgcagtgacttaaaatttggaggcaaattttccttaagaggatatcaagttccagtatcttcagatgttgataagccgttagaatctccctggaaaaggagacatgaatgtctgcaatgatacttcctgacaagaagttgatacaagaaaaggaaaggagattaacagctagtgagcagaatttcgaacagcaggatttcgtattttttgcttccaactgcacacttccgttgcccacttttaaatcagagatacctacactcaaaacccagacaaggcaaaaggatacttttcttgtatattttttgagatcgaagaaacgacaatgtccaggaaacaga

SEQ ID NO: 185754 - DNA, 505 bp, Homo sapiens
  Payload ID: 16577
  Gene Symbol: SPATS2
  Gene Name: spermatogenesis associated, serine-rich 2
  ENST ID: ENST00000548777
  CDS Start-End: 407-505
agacccgggagcgtccgggacgcggagcccggagctggggcgacgaggcgattgcgggggcctgggctagagatggagtctcactatggtgcctactctgattttgaactcctggcttcaagcaatcctcccaccttggccttccaaagtgctgggattacagaatctccctggaaaaggagacatgaatgtctgcaatgatacttcctgacaagaagttgatacaagaaaaggaaaggagattaacagctagtgagcagaatttcgaacagcaggatttcgtattttttgcttccaactgcacacttccgttgcccacttttaaatcagagatacctacactcaaaacccagacaaggcaaaaggatacttttcttgtatattttttgagatcgaagaaacgacaatgtccaggaaacagaaccagaaggattcatcaggattcatttttgatttgcagtccaataccgtactggcccagggaggagcttttgagaacatgaaa

SEQ ID NO: 185755 - DNA, 6156 bp, Homo sapiens
  Payload ID: 16578
  Gene Symbol: SPATS2L
  Gene Name: spermatogenesis associated, serine-rich 2-like
  Uniprot ID: Q9NUQ6
  ENST ID: ENST00000358677
  CDS Start-End: 248-1924
gcagaaacccacggctgaagcccacgatgcccatgtgtaacttggttattacacacacgtttggagcccagtgtgcagacccgcagcgcagaggaggcggcggaacaccccgggttggtcgggtttccaagggctgacccgagctccagcactttttccgcgcctgatttttcagagctcttcagaaaccaggctgctttcaggaacattgctgtggattcccagggcctattccactagaagcaagatggctgaactcaatactcatgtgaatgtcaaggaaaagatctatgcagttagatcagttgttcccaacaaaagcaataatgaaatagtcctggtgctccaacagtttgattttaatgtggataaagccgtgcaagcctttgtggatggcagtgcaattcaagttctaaaagaatggaatatgacaggaaaaaagaagaacaataaaagaaaaagaagcaagtccaagcagcatcaaggcaacaaagatgctaaagacaaggtggagaggcctgaggcagggcccctgcagccgcagccaccacagattcaaaacggccccatgaatggctgcgagaaggacagctcgtccacagattctgctaacgaaaaaccagcccttatccctcgtgagaaaaagatctcgatacttgaggaaccttcaaaggcacttcgtggggtcacagaaggcaacagactactgcaacagaaactatccttagatgggaaccccaaacctatacatggaacaacagagaggtcagatggcctacagtggtcagctgagcagccttgtaacccaagcaagcctaaggcaaaaacatctcctgttaagtccaatacccctgcagctcatcttgaaataaagccagatgagttggcaaagaaaagaggcccaaatattgagaaatcagtgaaggatttgcaacgctgcaccgtttctctaactagatatcgcgtcatgattaaggaagaagtggatagttccgtgaagaagatcaaagctgcctttgctgaattacacaactgcatcattgacaaagaagtttcattaatggcagaaatggataaagttaaagaagaagccatggaaatcctgactgctcgtcagaagaaagcagaagaactaaagagactcactgaccttgccagtcagatggcagagatgcagctggccgaactcagggcagaaattaagcactttgtcagcgagcgtaaatatgacgaggagctcgggaaagctgcccggttttcctgtgacatcgaacagctgaaggcccaaatcatgctctgcggagaaattacacatccaaagaacaactattcctcaagaactccctgcagctccctgctgcctctgctgaatgcgcacgcagcaacctctgggaaacagagtaacttttcccgaaaatcatccactcacaataagccctctgaaggcaaagcggcaaaccccaaaatggtgagcagtctccccagcaccgccgacccctctcaccagaccatgccggccaacaagcagaatggatcttctaaccaaagacggagatttaatccacagtatcataacaacaggctaaatgggcctgccaagtcgcagggcagtgggaatgaagccgagccactgggaaagggcaacagccgccacgaacacagaagacagccgcacaacggcttccggcccaaaaacaaaggcggtgccaaaaatcaagaggcttccttggggatgaagacccccgaggccccggcccattctgaaaagccccggcgaaggcagcacgctgcagacacctcggaggccaggcccttccggggtagtgtcggtagggtttcacagtgcaatctctgccccacgagaatagaagtttccacagatgcagcagttctctcagtcccggctgtgacgttggtggcctgagctaggaggaaaaagagcagttttcactcagttttggttccctgcccgaggtgctgacccaattcgctgccaaaagagtgtcaatcagaatatacaaatcccgtatggttgtgtcatcctctcttaatcatttttactaattctaataatcagctctagcttgcttcataattttcatggctttgcttgatctgttgatgctttctctcatcaagactttgcagcattttagccaggcagtatttactcattattaggaaaatcaagatgtggctgaagatcagaggctcagttagcaacctgtgttgtagcagtgatgtcagtccattgattgtctttagagagttaatgttacaaaaaagaattcttaataatcagacaaacatgatctgctgaggacacatgcgcttttgtagaatttaacatctggtgtttttctgaaaaaatatatatacatatattgctttatttgaaacaaattaaaatatgctgcatttgacacctggctagtttcttttattgatacccacctagttattgaatgtactgtttagtgctttcaaaaaaaactttagagactagaggttgtggtgcaaagctgtgtacaataaatactgtttctgttgagacaagtactctttcaggaaaatatatatatgccctttcaattagattacacaaatagatggatatgcaccctgatcatcttagacacaccatgtggcagttgggcagttggaaacattggttgcaagtactacaaacctcagctgagcctagcttcaacaataagaatttattggttcagtgagtgaaaagtccagttggtccaatttgatcaggatttcagctcccatctcttttttttttttcttttttctttttctttttttgagacagtcttgctttgtcacccaggtggagtgcaatggcatgatctcggctcactgcaacctccgcctcctgggttcaagccattctcctgcccggccttccgagtagctgggattacaggcatgtgccaccacgccctgctaatttttatattattagtacagacaggatttcaccatgttgtccaggctggtctcaaacccctgacctcaggtgatccacctgctttggcctccgaaactgccggaattacaggcatgagccaccgtacccggccagctcccatctcttaattatcttagctctcctttcctccttgggttgacattgcattcagaattgtggcaaagggccaccatgctcttaagactcaagtctattttccacactgtccagaggagagaagttatcctagtagcttctacacagagcaagtgtctttctcagaaatcccagcaaaggtcttgcataccattgctggtaggcctgtctcttaaaccaatcatgaaaggggggagagaagtgaatgggatgaactaatttgcatagactaattagagcccacccctggagcctgggtgtggccatcttcccagagttcctgagctagatggagaaggggtacttctcagaaagggaaaatggatacccaatggcccaaacccaaaatagccccagttcccctaactttgactacagggcagtccagtttgggtgccgcttccgttgcactcacatgtcctacatatctgttgactactcacaagtgcaaatgcttattctcaactcaacattaacattttttctggcaacccaggttcactggttctcttccacagagcggccctgagcagctgagcctgcaagccacgcaagcatctgtttcttcttttgccaagtacaggaggatgtttgctctctctgtagagagctttctgaggtctctgggtgtacccagagatttaatagaaattcttaacgttaagtcacattccaggaaggaaggaagagttgttcgttcaaataagaaagataaatgttcggcactgtaggccctgtttaccccatctgaggccctgaattcatatattacaagacggaaggattttgcacagttttttatgtagcaagattttgctcaccactgaaaaatgtcagtgtaaatgtgaccgctttaaagatgagtcaagtaattcttggaacagggaaaaaaatgaatttgccaggtcaggagttcacctgcctttgtcagagttgaacccaaccactcttgacctcgactcactcccttagggttaagaaagcccaaacacattcctgagcacagagcaaacactcccatgtcactgaaaagaaacaaaagaatgctaaaaagtgctcagacctgatcacattttttccaatattttttcctttttttttttttttttgagacagggtcttgctctatcacctaggctggagtgcatgtttttgagacagggtcttgctctatcacctaggctggagtgcatgatcatggctcactatagccttgaactcctgggctcaagccatcctcagcctcccaagttgcgaggactacaggtgtgcaccacaacgtcccagctactttttaaatttttagtagaaacgaggtctcactatggtgcccagactggtctcgaactccggagctcaagtgatcttcctgctttggcctcccaaagtgttagaattacaggcatgagccacctcgcctggctggtttttgcctttcttatagaccctgggcatgtaagcatttattagtttgcatttttgaaacagtaatttcaatattttagtgccaatgtcaggccgcttaaacactgtattacatatcttcatctgtctggtggaactattggtgtgatcctagagaactgagtcctattctgccattcatttaaagtgttttaaactctaatctctctacttaatgcacagtagtcagattattctcttaaacatttgcctagtagaggttaaaatagtttaatccttatgaagatggaataacttcaaactcacattgtggcacttagatcttccaccaagacttcatccgtgaaatccacacctccctgttgggttcccaattacattccaaatttacatttcttttgagaatctctgcatactccagctctgtcctgttgatcctattctagaagtgcttaatgcagcaagacacagaaagttaaacgcaaattgctgcaaaattcaccctcagtggaggactagaaacacaacatgtccaatttaaagctcagttcacaagcagttcaattctgctggcatcagaaaaggagattctaattaaacattcttagggaaggacatcaaatgaggttaatgggaaacgttaccagattaaaagcagttttttgacaaagtaacagatttggaaattctgactctctgaaagccttgatttgaacctcaaacttgatttcaccatgagaagtggggatcaagggcctgcgcagttcttttcctaaatcgattcggtgctccccaccccgacgcaggcacaggtccgcaaccagatagggagatgcctgaatttcaggctacctttgacaaagctttcttcctccctccctccctttgcacgctgcatcccacgctgcctgcttaaagcgccctcatgtgtctacagatggtaaaacgtttatttctcaacagacattccagtgatagcatccaatgacctatgtaacggcacccttttttgctgtacgcgttttttgagatggagtctcgctctgtcgcccaggctggagtgcagtggcgcggtctcggctcactgcaagctccgcctcccgggttcacgccattctcctgcctcagcctcccgagtagctgggactacaggcacccgccaccacacctggctaattttttgtatttttagtagatacagggtttcaccgtgttagccaggatggttttgatctcctgacctcgtgatccacccccctcggcctcccaaagtgctgggattacaggggtgagccactgcgcccggccccagtcacttgttcttaagtttcttaagcaaactataaaatagcaaaagaccaaaaaaaaaggaaaaaaagcagttcgcctaatacattgttccagcatttccttgaaagtactgagccatctcaattgctctgattttgtgagaaaattatgaagagttgcaaagtcccagtgattctcttgttacttagctaagaatttgaaatgtaatttaaatactattctttacaatccattataaggattttaaaatctttttgcttctttaataaattctaacaaag

SEQ ID NO: 185756 - DNA, 2119 bp, Homo sapiens
  Payload ID: 16578
  Gene Symbol: SPATS2L
  Gene Name: spermatogenesis associated, serine-rich 2-like
  Uniprot ID: Q9NUQ6
  ENST ID: ENST00000360760
  CDS Start-End: 151-1620
acaaaacccgagagaggcgtgagcagcgctgtgtttgcgagcgggagcgaggggcgccggctggggtgtgtgctcctgagctcttcagaaaccaggctgctttcaggaacattgctgtggattcccagggcctattccactagaagcaagatggctgaactcaatactcatgtgaatgtcaaggaaaagatctatgcagttagatcagttgttcccaacaaaagcaataatgaaatagtcctggtgctccaacagtttgattttaatgtggataaagccgtgcaagcctttgtggatggcagtgcaattcaagttctaaaagaatggaatatgacaggaaaaaagaagaacaataaaagaaaaagaagcaagtccaagcagcatcaaggcaacaaagatgctaaagacaaggtggagaggcctgaggcagggcccctgcagccgcagccaccacagattcaaaacggccccatgaatggctgcgagaaggacagctcgtccacagattctgctaacgaaaaaccagcccttatccctcgtgagaaaaagatctcgatacttgaggaaccttcaaaggcacttcgtggggtcacaggcccaaatattgagaaatcagtgaaggatttgcaacgctgcaccgtttctctaactagatatcgcgtcatgattaaggaagaagtggatagttccgtgaagaagatcaaagctgcctttgctgaattacacaactgcatcattgacaaagaagtttcattaatggcagaaatggataaagttaaagaagaagccatggaaatcctgactgctcgtcagaagaaagcagaagaactaaagagactcactgaccttgccagtcagatggcagagatgcagctggccgaactcagggcagaaattaagcactttgtcagcgagcgtaaatatgacgaggagctcgggaaagctgcccggttttcctgtgacatcgaacagctgaaggcccaaatcatgctctgcggagaaattacacatccaaagaacaactattcctcaagaactccctgcagctccctgctgcctctgctgaatgcgcacgcagcaacctctgggaaacagagtaacttttcccgaaaatcatccactcacaataagccctctgaaggcaaagcggcaaaccccaaaatggtgagcagtctccccagcaccgccgacccctctcaccagaccatgccggccaacaagcagaatggatcttctaaccaaagacggagatttaatccacagtatcataacaacaggctaaatgggcctgccaagtcgcagggcagtgggaatgaagccgagccactgggaaagggcaacagccgccacgaacacagaagacagccgcacaacggcttccggcccaaaaacaaaggcggtgccaaaaatcaagaggcttccttggggatgaagacccccgaggccccggcccattctgaaaagccccggcgaaggcagcacgctgcagacacctcggaggccaggcccttccggggtagtgtcggtagggtttcacagtgcaatctctgccccacgagaatagaagtttccacagatgcagcagttctctcagtcccggctgtgacgttggtggcctgagctaggaggaaaaagagcagttttcactcagttttggttccctgcccgaggtgctgacccaattcgctgccaaaagagtgtcaatcagaatatacaaatcccgtatggttgtgtcatcctctcttaatcatttttactaattctaataatcagctctagcttgcttcataattttcatggctttgcttgatctgttgatgctttctctcatcaagactttgcagcattttagccaggcagtatttactcattattaggaaaatcaagatgtggctgaagatcagaggctcagttagcaacctgtgttgtagcagtgatgtcagtccattgattgtctttagagagttaatgttacaaaaaagaattcttaataatcagacaaacatgatctgctgaggacacatgcgcttttgtagaatttaacatctggtgtttttctgaaaaaatatatatacatatattgctttatttgaaacaaattaaaatatgctgcatttga

SEQ ID NO: 185757 - DNA, 1979 bp, Homo sapiens
  Payload ID: 16578
  Gene Symbol: SPATS2L
  Gene Name: spermatogenesis associated, serine-rich 2-like
  Uniprot ID: Q9NUQ6
  ENST ID: ENST00000409151
  CDS Start-End: 101-1801
tttcttctgtagctgagcacttgctgggagggagtgccaaacatctcagtgtttgtgtttttagatgcactaaccaacaatagcaagcttttctccaagcatggcctattccactagaagcaagatggctgaactcaatactcatgtgaatgtcaaggaaaagatctatgcagttagatcagttgttcccaacaaaagcaataatgaaatagtcctggtgctccaacagtttgattttaatgtggataaagccgtgcaagcctttgtggatggcagtgcaattcaagttctaaaagaatggaatatgacaggaaaaaagaagaacaataaaagaaaaagaagcaagtccaagcagcatcaaggcaacaaagatgctaaagacaaggtggagaggcctgaggcagggcccctgcagccgcagccaccacagattcaaaacggccccatgaatggctgcgagaaggacagctcgtccacagattctgctaacgaaaaaccagcccttatccctcgtgagaaaaagatctcgatacttgaggaaccttcaaaggcacttcgtggggtcacagaaggcaacagactactgcaacagaaactatccttagatgggaaccccaaacctatacatggaacaacagagaggtcagatggcctacagtggtcagctgagcagccttgtaacccaagcaagcctaaggcaaaaacatctcctgttaagtccaatacccctgcagctcatcttgaaataaagccagatgagttggcaaagaaaagaggcccaaatattgagaaatcagtgaaggatttgcaacgctgcaccgtttctctaactagatatcgcgtcatgattaaggaagaagtggatagttccgtgaagaagatcaaagctgcctttgctgaattacacaactgcatcattgacaaagaagtttcattaatggcagaaatggataaagttaaagaagaagccatggaaatcctgactgctcgtcagaagaaagcagaagaactaaagagactcactgaccttgccagtcagatggcagagatgcagctggccgaactcagggcagaaattaagcactttgtcagcgagcgtaaatatgacgaggagctcgggaaagctgcccggttttcctgtgacatcgaacagctgaaggcccaaatcatgctctgcggagaaattacacatccaaagaacaactattcctcaagaactccctgcagctccctgctgcctctgctgaatgcgcacgcagcaacctctgggaaacagagtaacttttcccgaaaatcatccactcacaataagccctctgaaggcaaagcggcaaaccccaaaatggtgagcagtctccccagcaccgccgacccctctcaccagaccatgccggccaacaagcagaatggatcttctaaccaaagacggagatttaatccacagtatcataacaacaggctaaatgggcctgccaagtcgcagggcagtgggaatgaagccgagccactgggaaagggcaacagccgccacgaacacagaagacagccgcacaacggcttccggcccaaaaacaaaggcggtgccaaaaatcaagaggcttccttggggatgaagacccccgaggccccggcccattctgaaaagccccggcgaaggcagcacgctgcagacacctcggaggccaggcccttccggggtagtgtcggtagggtttcacagtgcaatctctgccccacgagaatagaagtttccacagatgcagcagttctctcagtcccggctgtgacgttggtggcctgagctaggaggaaaaagagcagttttcactcagttttggttccctgcccgaggtgctgacccaattcgctgccaaaagagtgtcaatcagaatatacaaatcccgtatggttgtgtcatcctctcttaatcatttttactaattctaataatcagctctagcttgcttcataattttcat

SEQ ID NO: 185758 - DNA, 2648 bp, Homo sapiens
  Payload ID: 16578
  Gene Symbol: SPATS2L
  Gene Name: spermatogenesis associated, serine-rich 2-like
  Uniprot ID: Q9NUQ6
  ENST ID: ENST00000409718
  CDS Start-End: 473-2149
actgcctctggaagaagagtgttatctaaagtgcttccatcatgaataatgattgagaaactgcttttactctcccgactactgtactcccaggcagaaacccacggctgaagcccacgatgcccatgtgtaacttggttattacacacacgtttggagcccagtgtgcagacccgcagcgcagaggaggcggcggaacaccccgggttggtcgggtttccaagggctgacccgagctccagcactttttccgcgcctgatttttcaggtcattttcgaatgggctatctttgcttacattttgagcttggatcctctccagaaagcattactaccttctaaaaggaaaaacatctcgtatttgcagacagtgctgagggagcaaagttcattttctcggagctcttcagaaaccaggctgctttcaggaacattgctgtggattcccagggcctattccactagaagcaagatggctgaactcaatactcatgtgaatgtcaaggaaaagatctatgcagttagatcagttgttcccaacaaaagcaataatgaaatagtcctggtgctccaacagtttgattttaatgtggataaagccgtgcaagcctttgtggatggcagtgcaattcaagttctaaaagaatggaatatgacaggaaaaaagaagaacaataaaagaaaaagaagcaagtccaagcagcatcaaggcaacaaagatgctaaagacaaggtggagaggcctgaggcagggcccctgcagccgcagccaccacagattcaaaacggccccatgaatggctgcgagaaggacagctcgtccacagattctgctaacgaaaaaccagcccttatccctcgtgagaaaaagatctcgatacttgaggaaccttcaaaggcacttcgtggggtcacagaaggcaacagactactgcaacagaaactatccttagatgggaaccccaaacctatacatggaacaacagagaggtcagatggcctacagtggtcagctgagcagccttgtaacccaagcaagcctaaggcaaaaacatctcctgttaagtccaatacccctgcagctcatcttgaaataaagccagatgagttggcaaagaaaagaggcccaaatattgagaaatcagtgaaggatttgcaacgctgcaccgtttctctaactagatatcgcgtcatgattaaggaagaagtggatagttccgtgaagaagatcaaagctgcctttgctgaattacacaactgcatcattgacaaagaagtttcattaatggcagaaatggataaagttaaagaagaagccatggaaatcctgactgctcgtcagaagaaagcagaagaactaaagagactcactgaccttgccagtcagatggcagagatgcagctggccgaactcagggcagaaattaagcactttgtcagcgagcgtaaatatgacgaggagctcgggaaagctgcccggttttcctgtgacatcgaacagctgaaggcccaaatcatgctctgcggagaaattacacatccaaagaacaactattcctcaagaactccctgcagctccctgctgcctctgctgaatgcgcacgcagcaacctctgggaaacagagtaacttttcccgaaaatcatccactcacaataagccctctgaaggcaaagcggcaaaccccaaaatggtgagcagtctccccagcaccgccgacccctctcaccagaccatgccggccaacaagcagaatggatcttctaaccaaagacggagatttaatccacagtatcataacaacaggctaaatgggcctgccaagtcgcagggcagtgggaatgaagccgagccactgggaaagggcaacagccgccacgaacacagaagacagccgcacaacggcttccggcccaaaaacaaaggcggtgccaaaaatcaagaggcttccttggggatgaagacccccgaggccccggcccattctgaaaagccccggcgaaggcagcacgctgcagacacctcggaggccaggcccttccggggtagtgtcggtagggtttcacagtgcaatctctgccccacgagaatagaagtttccacagatgcagcagttctctcagtcccggctgtgacgttggtggcctgagctaggaggaaaaagagcagttttcactcagttttggttccctgcccgaggtgctgacccaattcgctgccaaaagagtgtcaatcagaatatacaaatcccgtatggttgtgtcatcctctcttaatcatttttactaattctaataatcagctctagcttgcttcataattttcatggctttgcttgatctgttgatgctttctctcatcaagactttgcagcattttagccaggcagtatttactcattattaggaaaatcaagatgtggctgaagatcagaggctcagttagcaacctgtgttgtagcagtgatgtcagtccattgattgtctttagagagttaatgttacaaaaaagaattcttaataatcagacaaacatgatctgctgaggacacatgcgcttttgtagaatttaacatctggtgtttttctgaaaaaatatatatacatatattgctttatttgaaacaaattaaaatatgctgcatttga

SEQ ID NO: 185759 - DNA, 2320 bp, Homo sapiens
  Payload ID: 16578
  Gene Symbol: SPATS2L
  Gene Name: spermatogenesis associated, serine-rich 2-like
  ENST ID: ENST00000409385
  CDS Start-End: 326-1822
aggtcattttcgaatgggctatctttgcttacattttgagcttggatcctctccagaaagcattactaccttctaaaaggaaaaacatctcgtatttgcagacagtgctgagggagcaaagttcattttctcggagctcttcagaaaccaggctgctttcaggaacattgctgtggattcccagatctatgcagttagatcagttgttcccaacaaaagcaataatgaaatagtcctggtgctccaacagtttgattttaatgtggataaagccgtgcaagcctttgtggatggcagtgcaattcaagttctaaaagaatggaatatgacaggaaaaaagaagaacaataaaagaaaaagaagcaagtccaagcagcatcaaggcaacaaagatgctaaagacaaggtggagaggcctgaggcagggcccctgcagccgcagccaccacagattcaaaacggccccatgaatggctgcgagaaggacagctcgtccacagattctgctaacgaaaaaccagcccttatccctcgtgagaaaaagatctcgatacttgaggaaccttcaaaggcacttcgtggggtcacagaaggcaacagactactgcaacagaaactatccttagatgggaaccccaaacctatacatggaacaacagagaggtcagatggcctacagtggtcagctgagcagccttgtaacccaagcaagcctaaggcaaaaacatctcctgttaagtccaatacccctgcagctcatcttgaaataaagccagatgagttggcaaagaaaagaggcccaaatattgagaaatcagtgaaggatttgcaacgctgcaccgtttctctaactagatatcgcgtcatgattaaggaagaagtggatagttccgtgaagaagatcaaagctgcctttgctgaattacacaactgcatcattgacaaagaagtttcattaatggcagaaatggataaagttaaagaagaagccatggaaatcctgactgctcgtcagaagaaagcagaagaactaaagagactcactgaccttgccagtcagatggcagagatgcagctggccgaactcagggcagaaattaagcactttgtcagcgagcgtaaatatgacgaggagctcgggaaagctgcccggttttcctgtgacatcgaacagctgaaggcccaaatcatgctctgcggagaaattacacatccaaagaacaactattcctcaagaactccctgcagctccctgctgcctctgctgaatgcgcacgcagcaacctctgggaaacagagtaacttttcccgaaaatcatccactcacaataagccctctgaaggcaaagcggcaaaccccaaaatggtgagcagtctccccagcaccgccgacccctctcaccagaccatgccggccaacaagcagaatggatcttctaaccaaagacggagatttaatccacagtatcataacaacaggctaaatgggcctgccaagtcgcagggcagtgggaatgaagccgagccactgggaaagggcaacagccgccacgaacacagaagacagccgcacaacggcttccggcccaaaaacaaaggcggtgccaaaaatcaagaggcttccttggggatgaagacccccgaggccccggcccattctgaaaagccccggcgaaggcagcacgctgcagacacctcggaggccaggcccttccggggtagtgtcggtagggtttcacagtgcaatctctgccccacgagaatagaagtttccacagatgcagcagttctctcagtcccggctgtgacgttggtggcctgagctaggaggaaaaagagcagttttcactcagttttggttccctgcccgaggtgctgacccaattcgctgccaaaagagtgtcaatcagaatatacaaatcccgtatggttgtgtcatcctctcttaatcatttttactaattctaataatcagctctagcttgcttcataattttcatggctttgcttgatctgttgatgctttctctcatcaagactttgcagcattttagccaggcagtatttactcattattaggaaaatcaagatgtggctgaagatcagaggctcagttagcaacctgtgttgtagcagtgatgtcagtccattgattgtctttagagagttaatgttacaaaaaagaattcttaataatcagacaaacatgatctgctgaggacacatgcgcttttgtagaatttaacatctggtgtttttctgaaaaaatatatatacatatattgctttatttgaaacaaattaaaatatgctgcatttg

SEQ ID NO: 185760 - DNA, 920 bp, Homo sapiens
  Payload ID: 16578
  Gene Symbol: SPATS2L
  Gene Name: spermatogenesis associated, serine-rich 2-like
  ENST ID: ENST00000409397
  CDS Start-End: 124-920
cccgggccccggctccggcccgggacggaggagccggcgctcgacacagagagctcttcagaaaccaggctgctttcaggaacattgctgtggattcccagggcctattccactagaagcaagatggctgaactcaatactcatgtgaatgtcaaggaaaagatctatgcagttagatcagttgttcccaacaaaagcaataatgaaatagtcctggtgctccaacagtttgattttaatgtggataaagccgtgcaagcctttgtggatggcagtgcaattcaagttctaaaagaatggaatatgacaggaaaaaagaagaacaataaaagaaaaagaagcaagtccaagcagcatcaaggcaacaaagatgctaaagacaaggtggagaggcctgaggcagggcccctgcagccgcagccaccacagattcaaaacggccccatgaatggctgcgagaaggacagctcgtccacagattctgctaacgaaaaaccagcccttatccctcgtgagaaaaagatctcgatacttgaggaaccttcaaaggcacttcgtggggtcacaggcccaaatattgagaaatcagtgaaggatttgcaacgctgcaccgtttctctaactagatatcgcgtcatgattaaggaagaagtggatagttccgtgaagaagatcaaagctgcctttgctgaattacacaactgcatcattgacaaagaagtttcattaatggcagaaatggataaagttaaagaagaagccatggaaatcctgactgctcgtcagaagaaagcagaagaactaaagagactcactgaccttgccagtcagatggcagagatgcagctggccgaactcagggcagaaattaagcactttgtcagcgagcgtaaatatgacgaggagctcgggaaagctgc

SEQ ID NO: 185761 - DNA, 2463 bp, Homo sapiens
  Payload ID: 16578
  Gene Symbol: SPATS2L
  Gene Name: spermatogenesis associated, serine-rich 2-like
  Uniprot ID: Q9NUQ6
  ENST ID: ENST00000409140
  CDS Start-End: 288-1964
ggaatccagtccgggggccgagctggctgcgccctccgctgcaagcgccggcagcgcggggcgagctccggacggcgcgcggcccaggcagcggctcccgctcggcccgccctccgagccgcaggggccgccaccgccgcggcgcctcccctggcgaccgcgcccccgggccccggctccggcccgggacggaggagccggcgctcgacacagagagctcttcagaaaccaggctgctttcaggaacattgctgtggattcccagggcctattccactagaagcaagatggctgaactcaatactcatgtgaatgtcaaggaaaagatctatgcagttagatcagttgttcccaacaaaagcaataatgaaatagtcctggtgctccaacagtttgattttaatgtggataaagccgtgcaagcctttgtggatggcagtgcaattcaagttctaaaagaatggaatatgacaggaaaaaagaagaacaataaaagaaaaagaagcaagtccaagcagcatcaaggcaacaaagatgctaaagacaaggtggagaggcctgaggcagggcccctgcagccgcagccaccacagattcaaaacggccccatgaatggctgcgagaaggacagctcgtccacagattctgctaacgaaaaaccagcccttatccctcgtgagaaaaagatctcgatacttgaggaaccttcaaaggcacttcgtggggtcacagaaggcaacagactactgcaacagaaactatccttagatgggaaccccaaacctatacatggaacaacagagaggtcagatggcctacagtggtcagctgagcagccttgtaacccaagcaagcctaaggcaaaaacatctcctgttaagtccaatacccctgcagctcatcttgaaataaagccagatgagttggcaaagaaaagaggcccaaatattgagaaatcagtgaaggatttgcaacgctgcaccgtttctctaactagatatcgcgtcatgattaaggaagaagtggatagttccgtgaagaagatcaaagctgcctttgctgaattacacaactgcatcattgacaaagaagtttcattaatggcagaaatggataaagttaaagaagaagccatggaaatcctgactgctcgtcagaagaaagcagaagaactaaagagactcactgaccttgccagtcagatggcagagatgcagctggccgaactcagggcagaaattaagcactttgtcagcgagcgtaaatatgacgaggagctcgggaaagctgcccggttttcctgtgacatcgaacagctgaaggcccaaatcatgctctgcggagaaattacacatccaaagaacaactattcctcaagaactccctgcagctccctgctgcctctgctgaatgcgcacgcagcaacctctgggaaacagagtaacttttcccgaaaatcatccactcacaataagccctctgaaggcaaagcggcaaaccccaaaatggtgagcagtctccccagcaccgccgacccctctcaccagaccatgccggccaacaagcagaatggatcttctaaccaaagacggagatttaatccacagtatcataacaacaggctaaatgggcctgccaagtcgcagggcagtgggaatgaagccgagccactgggaaagggcaacagccgccacgaacacagaagacagccgcacaacggcttccggcccaaaaacaaaggcggtgccaaaaatcaagaggcttccttggggatgaagacccccgaggccccggcccattctgaaaagccccggcgaaggcagcacgctgcagacacctcggaggccaggcccttccggggtagtgtcggtagggtttcacagtgcaatctctgccccacgagaatagaagtttccacagatgcagcagttctctcagtcccggctgtgacgttggtggcctgagctaggaggaaaaagagcagttttcactcagttttggttccctgcccgaggtgctgacccaattcgctgccaaaagagtgtcaatcagaatatacaaatcccgtatggttgtgtcatcctctcttaatcatttttactaattctaataatcagctctagcttgcttcataattttcatggctttgcttgatctgttgatgctttctctcatcaagactttgcagcattttagccaggcagtatttactcattattaggaaaatcaagatgtggctgaagatcagaggctcagttagcaacctgtgttgtagcagtgatgtcagtccattgattgtctttagagagttaatgttacaaaaaagaattcttaataatcagacaaacatgatctgctgaggacacatgcgcttttgtagaatttaacatctggtgtttttctgaaaaaatatatatacatatattgctttatttgaaacaaattaaaatatgctgcatttga

SEQ ID NO: 185762 - DNA, 2698 bp, Homo sapiens
  Payload ID: 16578
  Gene Symbol: SPATS2L
  Gene Name: spermatogenesis associated, serine-rich 2-like
  Uniprot ID: Q9NUQ6
  ENST ID: ENST00000409988
  CDS Start-End: 524-2200
gatttttcaggtcattttcgaatgggctatctttgcttacattttgagcttggatcctctccagaaagcattactaccttctaaaaggaaaaacatctcgtatttgcagacagtgctgagggagcaaagttcattttctcgggtaggagaagatgattctcttgcaacacgtgcggattgtgacaaaatctttcattaacaaggggagtttcggtgaagtggaggtttggggaaaggcgaggaagtcggtctggagcaagcaagcaaagtgcggaagctgtactgggattcttctagaaagtggggtgggaaaggagctagggagggcgtgtggagggacgagatctgtgtcagaacgtgcgtgtgagcggatacaaaacccgagagaggcgtgagcagcgctgtgtttgcgagcgggagcgaggggcgccggctggggtgtgtgctcctgagctcttcagaaaccaggctgctttcaggaacattgctgtggattcccagggcctattccactagaagcaagatggctgaactcaatactcatgtgaatgtcaaggaaaagatctatgcagttagatcagttgttcccaacaaaagcaataatgaaatagtcctggtgctccaacagtttgattttaatgtggataaagccgtgcaagcctttgtggatggcagtgcaattcaagttctaaaagaatggaatatgacaggaaaaaagaagaacaataaaagaaaaagaagcaagtccaagcagcatcaaggcaacaaagatgctaaagacaaggtggagaggcctgaggcagggcccctgcagccgcagccaccacagattcaaaacggccccatgaatggctgcgagaaggacagctcgtccacagattctgctaacgaaaaaccagcccttatccctcgtgagaaaaagatctcgatacttgaggaaccttcaaaggcacttcgtggggtcacagaaggcaacagactactgcaacagaaactatccttagatgggaaccccaaacctatacatggaacaacagagaggtcagatggcctacagtggtcagctgagcagccttgtaacccaagcaagcctaaggcaaaaacatctcctgttaagtccaatacccctgcagctcatcttgaaataaagccagatgagttggcaaagaaaagaggcccaaatattgagaaatcagtgaaggatttgcaacgctgcaccgtttctctaactagatatcgcgtcatgattaaggaagaagtggatagttccgtgaagaagatcaaagctgcctttgctgaattacacaactgcatcattgacaaagaagtttcattaatggcagaaatggataaagttaaagaagaagccatggaaatcctgactgctcgtcagaagaaagcagaagaactaaagagactcactgaccttgccagtcagatggcagagatgcagctggccgaactcagggcagaaattaagcactttgtcagcgagcgtaaatatgacgaggagctcgggaaagctgcccggttttcctgtgacatcgaacagctgaaggcccaaatcatgctctgcggagaaattacacatccaaagaacaactattcctcaagaactccctgcagctccctgctgcctctgctgaatgcgcacgcagcaacctctgggaaacagagtaacttttcccgaaaatcatccactcacaataagccctctgaaggcaaagcggcaaaccccaaaatggtgagcagtctccccagcaccgccgacccctctcaccagaccatgccggccaacaagcagaatggatcttctaaccaaagacggagatttaatccacagtatcataacaacaggctaaatgggcctgccaagtcgcagggcagtgggaatgaagccgagccactgggaaagggcaacagccgccacgaacacagaagacagccgcacaacggcttccggcccaaaaacaaaggcggtgccaaaaatcaagaggcttccttggggatgaagacccccgaggccccggcccattctgaaaagccccggcgaaggcagcacgctgcagacacctcggaggccaggcccttccggggtagtgtcggtagggtttcacagtgcaatctctgccccacgagaatagaagtttccacagatgcagcagttctctcagtcccggctgtgacgttggtggcctgagctaggaggaaaaagagcagttttcactcagttttggttccctgcccgaggtgctgacccaattcgctgccaaaagagtgtcaatcagaatatacaaatcccgtatggttgtgtcatcctctcttaatcatttttactaattctaataatcagctctagcttgcttcataattttcatggctttgcttgatctgttgatgctttctctcatcaagactttgcagcattttagccaggcagtatttactcattattaggaaaatcaagatgtggctgaagatcagaggctcagttagcaacctgtgttgtagcagtgatgtcagtccattgattgtctttagagagttaatgttacaaaaaagaattcttaataatcagacaaacatgatctgctgaggacacatgcgcttttgtagaatttaacatctggtgtttttctgaaaaaatatatatacatatattgctttatttgaaacaaattaaaatatgctgcatttg

SEQ ID NO: 185763 - DNA, 2460 bp, Homo sapiens
  Payload ID: 16578
  Gene Symbol: SPATS2L
  Gene Name: spermatogenesis associated, serine-rich 2-like
  ENST ID: ENST00000409755
  CDS Start-End: 535-1962
ggaatccagtccgggggccgagctggctgcgccctccgctgcaagcgccggcagcgcggggcgagctccggacggcgcgcggcccaggcagcggctcccgctcggcccgccctccgagccgcaggggccgccaccgccgcggcgcctcccctggcgaccgcgcccccgggccccggctccggcccgggacggaggagccggcgctcgacacagagagctcttcagaaaccaggctgctttcaggaacattgctgtggattcccagggcctattccactagaagcaagatggctgaactcaatactcatgtgaatgtcaaggaaaagatctatgcagttagatcagttgttcccaacaaaagcaataatgaaatagtcctggtgctccaacagtttgattttaatgtggataaagccgtgcaagcctttgtggatggcagtgcaattcaagttctaaaagaatggaatatgacaggaaaaaagaagaacaataaaagaaaaagaagcaagtccaagcagcatcaaggcaacaaagatgctaaagacaaggtggagaggcctgaggcagggcccccagccgcagccaccacagattcaaaacggccccatgaatggctgcgagaaggacagctcgtccacagattctgctaacgaaaaaccagcccttatccctcgtgagaaaaagatctcgatacttgaggaaccttcaaaggcacttcgtggggtcacagaaggcaacagactactgcaacagaaactatccttagatgggaaccccaaacctatacatggaacaacagagaggtcagatggcctacagtggtcagctgagcagccttgtaacccaagcaagcctaaggcaaaaacatctcctgttaagtccaatacccctgcagctcatcttgaaataaagccagatgagttggcaaagaaaagaggcccaaatattgagaaatcagtgaaggatttgcaacgctgcaccgtttctctaactagatatcgcgtcatgattaaggaagaagtggatagttccgtgaagaagatcaaagctgcctttgctgaattacacaactgcatcattgacaaagaagtttcattaatggcagaaatggataaagttaaagaagaagccatggaaatcctgactgctcgtcagaagaaagcagaagaactaaagagactcactgaccttgccagtcagatggcagagatgcagctggccgaactcagggcagaaattaagcactttgtcagcgagcgtaaatatgacgaggagctcgggaaagctgcccggttttcctgtgacatcgaacagctgaaggcccaaatcatgctctgcggagaaattacacatccaaagaacaactattcctcaagaactccctgcagctccctgctgcctctgctgaatgcgcacgcagcaacctctgggaaacagagtaacttttcccgaaaatcatccactcacaataagccctctgaaggcaaagcggcaaaccccaaaatggtgagcagtctccccagcaccgccgacccctctcaccagaccatgccggccaacaagcagaatggatcttctaaccaaagacggagatttaatccacagtatcataacaacaggctaaatgggcctgccaagtcgcagggcagtgggaatgaagccgagccactgggaaagggcaacagccgccacgaacacagaagacagccgcacaacggcttccggcccaaaaacaaaggcggtgccaaaaatcaagaggcttccttggggatgaagacccccgaggccccggcccattctgaaaagccccggcgaaggcagcacgctgcagacacctcggaggccaggcccttccggggtagtgtcggtagggtttcacagtgcaatctctgccccacgagaatagaagtttccacagatgcagcagttctctcagtcccggctgtgacgttggtggcctgagctaggaggaaaaagagcagttttcactcagttttggttccctgcccgaggtgctgacccaattcgctgccaaaagagtgtcaatcagaatatacaaatcccgtatggttgtgtcatcctctcttaatcatttttactaattctaataatcagctctagcttgcttcataattttcatggctttgcttgatctgttgatgctttctctcatcaagactttgcagcattttagccaggcagtatttactcattattaggaaaatcaagatgtggctgaagatcagaggctcagttagcaacctgtgttgtagcagtgatgtcagtccattgattgtctttagagagttaatgttacaaaaaagaattcttaataatcagacaaacatgatctgctgaggacacatgcgcttttgtagaatttaacatctggtgtttttctgaaaaaatatatatacatatattgctttatttgaaacaaattaaaatatgctgcatttg

SEQ ID NO: 185764 - DNA, 835 bp, Homo sapiens
  Payload ID: 16578
  Gene Symbol: SPATS2L
  Gene Name: spermatogenesis associated, serine-rich 2-like
  ENST ID: ENST00000457757
  CDS Start-End: 272-835
gtgtttgcgagcgggagcgaggggcgccggctggggtgtgtgctcctgagctcttcagaaaccaggctgctttcaggaacattgctgtggattcccagttcaagcaaagtgatgtaatacccaagaacaggaaagtaaacctaagagcattaatgggtttcagagaaacgaaagtgaaactttattactgcctacacaatcaaacaggagggagaaaggagacaagcaagtcagaaagcgatttgatagggcctattccactagaagcaagatggctgaactcaatactcatgtgaatgtcaaggaaaagatctatgcagttagatcagttgttcccaacaaaagcaataatgaaatagtcctggtgctccaacagtttgattttaatgtggataaagccgtgcaagcctttgtggatggcagtgcaattcaagttctaaaagaatggaatatgacaggaaaaaagaagaacaataaaagaaaaagaagcaagtccaagcagcatcaaggcaacaaagatgctaaagacaaggtggagaggcctgaggcagggcccctgcagccgcagccaccacagattcaaaacggccccatgaatggctgcgagaaggacagctcgtccacagattctgctaacgaaaaaccagcccttatccctcgtgagaaaaagatctcgatacttgaggaaccttcaaaggcacttcgtggggtcacagaaggcaacagactactgcaacagaaactatccttagatgggaaccccaaacctatacatggaacaacagagaggtcagatggcctacagtggtcagctgagcagccttgtaacccaagc

SEQ ID NO: 185765 - DNA, 637 bp, Homo sapiens
  Payload ID: 16578
  Gene Symbol: SPATS2L
  Gene Name: spermatogenesis associated, serine-rich 2-like
  ENST ID: ENST00000453663
  CDS Start-End: 57-637
gagcgaggggcgccggctggggtgtgtgctcctgggcctattccactagaagcaagatggctgaactcaatactcatgtgaatgtcaaggaaaagatctatgcagttagatcagttgttcccaacaaaagcaataatgaaatagtcctggtgctccaacagtttgattttaatgtggataaagccgtgcaagcctttgtggatggcagtgcaattcaagttctaaaagaatggaatatgacaggaaaaaagaagaacaataaaagaaaaagaagcaagtccaagcagcatcaaggcaacaaagatgctaaagacaaggtggagaggcctgaggcagggcccctgcagccgcagccaccacagattcaaaacggccccatgaatggctgcgagaaggacagctcgtccacagattctgctaacgaaaaaccagcccttatccctcgtgagaaaaagatctcgatacttgaggaaccttcaaaggcacttcgtggggtcacaggcccaaatattgagaaatcagtgaaggatttgcaacgctgcaccgtttctctaactagatatcgcgtcatgattaaggaagaagtggatagttccgtgaagaagatcaaagctgcctttgctgaattacacaactg

SEQ ID NO: 185766 - DNA, 2250 bp, Homo sapiens
  Payload ID: 16578
  Gene Symbol: SPATS2L
  Gene Name: spermatogenesis associated, serine-rich 2-like
  Uniprot ID: Q9NUQ6
  ENST ID: ENST00000451764
  CDS Start-End: 503-2179
tttggggaaaggcgaggaagtcggtctggagcaagcaagcaaagtgcggaagctgtactgggattcttctagaaagtggggtgggaaaggagctagggagggcgtgtggagggacgagatctgtgtcagaacgtgcgtgtgagcggatacaaaacccgagagaggcgtgagcagcgctgtgtttgcgagcgggagcgaggggcgccggctggggtgtgtgctcctgggagccccctaatgaaagtcttcagtaaatagtttttctgcatgcactgattttcctgaggccattgtggagagagttatctgtgggcttgagaagctgctctgccacaccagtaaggatcagggaaagaaaatacttaggccacaccgttgcagtctttgattgcatgccagtctgaagcattttatggacccgttttgccatagctcttcagaaaccaggctgctttcaggaacattgctgtggattcccagggcctattccactagaagcaagatggctgaactcaatactcatgtgaatgtcaaggaaaagatctatgcagttagatcagttgttcccaacaaaagcaataatgaaatagtcctggtgctccaacagtttgattttaatgtggataaagccgtgcaagcctttgtggatggcagtgcaattcaagttctaaaagaatggaatatgacaggaaaaaagaagaacaataaaagaaaaagaagcaagtccaagcagcatcaaggcaacaaagatgctaaagacaaggtggagaggcctgaggcagggcccctgcagccgcagccaccacagattcaaaacggccccatgaatggctgcgagaaggacagctcgtccacagattctgctaacgaaaaaccagcccttatccctcgtgagaaaaagatctcgatacttgaggaaccttcaaaggcacttcgtggggtcacagaaggcaacagactactgcaacagaaactatccttagatgggaaccccaaacctatacatggaacaacagagaggtcagatggcctacagtggtcagctgagcagccttgtaacccaagcaagcctaaggcaaaaacatctcctgttaagtccaatacccctgcagctcatcttgaaataaagccagatgagttggcaaagaaaagaggcccaaatattgagaaatcagtgaaggatttgcaacgctgcaccgtttctctaactagatatcgcgtcatgattaaggaagaagtggatagttccgtgaagaagatcaaagctgcctttgctgaattacacaactgcatcattgacaaagaagtttcattaatggcagaaatggataaagttaaagaagaagccatggaaatcctgactgctcgtcagaagaaagcagaagaactaaagagactcactgaccttgccagtcagatggcagagatgcagctggccgaactcagggcagaaattaagcactttgtcagcgagcgtaaatatgacgaggagctcgggaaagctgcccggttttcctgtgacatcgaacagctgaaggcccaaatcatgctctgcggagaaattacacatccaaagaacaactattcctcaagaactccctgcagctccctgctgcctctgctgaatgcgcacgcagcaacctctgggaaacagagtaacttttcccgaaaatcatccactcacaataagccctctgaaggcaaagcggcaaaccccaaaatggtgagcagtctccccagcaccgccgacccctctcaccagaccatgccggccaacaagcagaatggatcttctaaccaaagacggagatttaatccacagtatcataacaacaggctaaatgggcctgccaagtcgcagggcagtgggaatgaagccgagccactgggaaagggcaacagccgccacgaacacagaagacagccgcacaacggcttccggcccaaaaacaaaggcggtgccaaaaatcaagaggcttccttggggatgaagacccccgaggccccggcccattctgaaaagccccggcgaaggcagcacgctgcagacacctcggaggccaggcccttccggggtagtgtcggtagggtttcacagtgcaatctctgccccacgagaatagaagtttccacagatgcagcagttctctcagtcccggctgtgacgttggtggcctgagctaggaggaaaaagagcagttttcactcagttttggttccctgcccgaggtgctgacccaattcgctgcc

SEQ ID NO: 185767 - DNA, 771 bp, Homo sapiens
  Payload ID: 16578
  Gene Symbol: SPATS2L
  Gene Name: spermatogenesis associated, serine-rich 2-like
  ENST ID: ENST00000423749
  CDS Start-End: 353-771
tgtgtttgcgagcgggagcgaggggcgccggctggggtgtgtgctcctgagctcttcagaaaccaggctgctttcaggaacattgctgtggattcccaggtgaccaaggccaccaaccccctgctgattactcagccacgcccaagatcctgctactaccctggtttctggctccacattcgtcactattgagatgacttactggtcacagtaaaagcaagttgataaaggtggccagtgggggaacagagcttatgtgcctcctgagaaagccagtcgctggaaactggactgagagccctgatttggagcacgaggaaaccttaaaaaggcctattccactagaagcaagatggctgaactcaatactcatgtgaatgtcaaggaaaagatctatgcagttagatcagttgttcccaacaaaagcaataatgaaatagtcctggtgctccaacagtttgattttaatgtggataaagccgtgcaagcctttgtggatggcagtgcaattcaagttctaaaagaatggaatatgacaggaaaaaagaagaacaataaaagaaaaagaagcaagtccaagcagcatcaaggcaacaaagatgctaaagacaaggtggagaggcctgaggcagggcccctgcagccgcagccaccacagattcaaaacggccccatgaatggctgcgagaaggacagctcgtccacagattctgctaacgaaaaaccagcccttatccctcgtgagaaaaagatctcgatacttgaggaacc

SEQ ID NO: 185768 - DNA, 541 bp, Homo sapiens
  Payload ID: 16578
  Gene Symbol: SPATS2L
  Gene Name: spermatogenesis associated, serine-rich 2-like
  ENST ID: ENST00000428692
  CDS Start-End: 503-541
gtgtttgcgagcgggagcgaggggcgccggctggggtgtgtgctcctgagctcttcagaaaccaggctgctttcaggaacattgctgtggattcccaggtgaccaaggccaccaaccccctgctgattactcagccacgcccaagatcctgctactaccctggtttctggctccacattcgtcactattgagatgacttactggtcacagtaaaagcaagttgataaaggtggccagtgggggaacagagcttatgtgcctcctgagaaagccagtcgctggaaactggactgagagccctgatttggagcacgaggaaaccttaaaaattcaagcaaagtgatgtaatacccaagaacaggaaagtaaacctaagagcattaatgggtttcagagaaacgaaagtgaaactttattactgcctacacaatcaaacaggagggagaaaggagacaagcaagtcagaaagcgatttgatagggcctattccactagaagcaagatggctgaactcaatactcatgtgaatgtcaaggaaaag

SEQ ID NO: 185769 - DNA, 600 bp, Homo sapiens
  Payload ID: 16578
  Gene Symbol: SPATS2L
  Gene Name: spermatogenesis associated, serine-rich 2-like
  ENST ID: ENST00000421573
  CDS Start-End: 138-600
agagctataccttccctaagataagaaggatgaagagctggcattcactaacaggaccctgaaggcaaaaacactgggcagtttcacaaaaagggaacaagtagtctctctgaagggcctattccactagaagcaagatggctgaactcaatactcatgtgaatgtcaaggaaaagatctatgcagttagatcagttgttcccaacaaaagcaataatgaaatagtcctggtgctccaacagtttgattttaatgtggataaagccgtgcaagcctttgtggatggcagtgcaattcaagttctaaaagaatggaatatgacaggaaaaaagaagaacaataaaagaaaaagaagcaagtccaagcagcatcaaggcaacaaagatgctaaagacaaggtggagaggcctgaggcagggcccctgcagccgcagccaccacagattcaaaacggccccatgaatggctgcgagaaggacagctcgtccacagattctgctaacgaaaaaccagcccttatccctcgtgagaaaaagatctcgatacttgaggaaccttcaaaggcacttcgtggggtcacagaaggcaacagactactgc

SEQ ID NO: 185770 - DNA, 605 bp, Homo sapiens
  Payload ID: 16578
  Gene Symbol: SPATS2L
  Gene Name: spermatogenesis associated, serine-rich 2-like
  ENST ID: ENST00000444012
  CDS Start-End: 535-605
attttctcgggtaggagaagatgattctcttgcaacacgtgcggattgtgacaaaatctttcattaacaaggggagtttcggtgaagtggaggtttggggaaaggcgaggaagtcggtctggagcaagcaagcaaagtgcggaagctgtactgggattcttctagaaagtggggtgggaaaggagctagggagggcgtgtggagggacgagatctgtgtcagaacgtgcgtgtgagcggatacaaaacccgagagaggcgtgagcagcgctgtgtttgcgagcgggagcgaggggcgccggctggggtgtgtgctcctgagctcttcagaaaccaggctgctttcaggaacattgctgtggattcccagctttcagacaacacatgactaagacagaatgagaccactctagttgcctcatgggaaactcgggaaaagactgcaaaaacaacattgtttctccctttggaattctggagttataaggcagaggtcccccatcttcccgaactggcctattccactagaagcaagatggctgaactcaatactcatgtgaatgtcaaggaaaagatctatgcagttagatcagttgttcccaacaa

SEQ ID NO: 185771 - DNA, 695 bp, Homo sapiens
  Payload ID: 16578
  Gene Symbol: SPATS2L
  Gene Name: spermatogenesis associated, serine-rich 2-like
  ENST ID: ENST00000366118
  CDS Start-End: 1-353
gcccaaatattgagaaatcagtgaaggatttgcaacgctgcaccgtttctctaactagatatcgcgtcatgattaaggaagaagtggatagttccgtgaagaagatcaaagctgcctttgctgaattacacaactgcatcattgacaaagaagtttcattaatggcagaaatggataaagttaaagaagaagccaagtctcaccctgtcacccaggctggagtgcagtggcacaatctctgctcactgcaagctccacctcccaggttcacaccattctcctgcctcagcctcctgagtagctgggattacaggcgcccaccaccacgcccagctaattttttgggtttttagtagagatggggtttcaccatgttagccaggatggtctcaatctcctgaccttgtgatccgcccagctcagcctcccaaagtgctgggattataggcttgagccaccgcgcccggcctaaacagttttcttaaaatactccagttctgttcatgaacttcgtcaaatacactgacacctgccaacttaaaaccgcaaaagaaaatcaattccatatattaaattgaaaatcacaaatcagattgcttaatgtaccaaattctctgtttaaataatgaacacgctcaaattatcttgatcattgcaaaacttaatcctaaatttaacataaaatattaacattc

SEQ ID NO: 185772 - DNA, 584 bp, Homo sapiens
  Payload ID: 16578
  Gene Symbol: SPATS2L
  Gene Name: spermatogenesis associated, serine-rich 2-like
  ENST ID: ENST00000439084
  CDS Start-End: 303-584
gcatttcactctactgcctctggaagaagagtgttatctaaagtgcttccatcatgaataatgattgagaaactgcttttactctcccgactactgtactcccaggcagaaacccacggctgaagcccacgatgcccatgtgtaacttggttattacacacacgtttggagcccagtgtgcagacccgcagcgcagaggaggcggcggaacaccccgggttggtcgggtttccaagggctgacccgagctccagcactttttccgcgcctgatttttcagggcctattccactagaagcaagatggctgaactcaatactcatgtgaatgtcaaggaaaagatctatgcagttagatcagttgttcccaacaaaagcaataatgaaatagtcctggtgctccaacagtttgattttaatgtggataaagccgtgcaagcctttgtggatggcagtgcaattcaagttctaaaagaatggaatatgacaggaaaaaagaagaacaataaaagaaaaagaagcaagtccaagcagcatcaaggcaacaaagatgctaaagacaaggtggagaggcctgaggcaggg

SEQ ID NO: 185773 - DNA, 561 bp, Homo sapiens
  Payload ID: 16578
  Gene Symbol: SPATS2L
  Gene Name: spermatogenesis associated, serine-rich 2-like
  ENST ID: ENST00000439395
  CDS Start-End: 216-561
aaagttcattttctcgggtaggagaagatgattctcttgcaacacgtgcggattgtgacaaaatctttcattaacaaggggagtttcggtgaagtggaggtttggggaaaggcgaggaagtcggtctggagcaagcaagcaaaagctcttcagaaaccaggctgctttcaggaacattgctgtggattcccagggcctattccactagaagcaagatggctgaactcaatactcatgtgaatgtcaaggaaaagatctatgcagttagatcagttgttcccaacaaaagcaataatgaaatagtcctggtgctccaacagtttgattttaatgtggataaagccgtgcaagcctttgtggatggcagtgcaattcaagttctaaaagaatggaatatgacaggaaaaaagaagaacaataaaagaaaaagaagcaagtccaagcagcatcaaggcaacaaagatgctaaagacaaggtggagaggcctgaggcagggcccctgcagccgcagccaccacagattcaaaacggccccatgaatggctgcgagaaggacagct

SEQ ID NO: 185774 - DNA, 678 bp, Homo sapiens
  Payload ID: 16578
  Gene Symbol: SPATS2L
  Gene Name: spermatogenesis associated, serine-rich 2-like
  ENST ID: ENST00000449647
  CDS Start-End: 158-678
gacttactggtcacagtaaaagcaagttgataaaggtggccagtgggggaacagagcttatgtgcctcctgagaaagccagtcgctggaaactggactgagagccctgatttggagcacgaggaaaccttaaaaaggcctattccactagaagcaagatggctgaactcaatactcatgtgaatgtcaaggaaaagatctatgcagttagatcagttgttcccaacaaaagcaataatgaaatagtcctggtgctccaacagtttgattttaatgtggataaagccgtgcaagcctttgtggatggcagtgcaattcaagttctaaaagaatggaatatgacaggaaaaaagaagaacaataaaagaaaaagaagcaagtccaagcagcatcaaggcaacaaagatgctaaagacaaggtggagaggcctgaggcagggcccctgcagccgcagccaccacagattcaaaacggccccatgaatggctgcgagaaggacagctcgtccacagattctgctaacgaaaaaccagcccttatccctcgtgagaaaaagatctcgatacttgaggaaccttcaaaggcacttcgtggggtcacaggcccaaatattgagaaatcagtgaaggatttgcaacgctgcaccgtttctctaactagatatcgcgtcatgattaa

SEQ ID NO: 185775 - DNA, 887 bp, Homo sapiens
  Payload ID: 16578
  Gene Symbol: SPATS2L
  Gene Name: spermatogenesis associated, serine-rich 2-like
  ENST ID: ENST00000438761
  CDS Start-End: 174-887
gtgagaatatgtattccccaatttgagaatctgggttgggcgccatggtgctgatcgaggattggcagcccctttcctaatatctgttgagatagaacagctcctaaagttggaccatggaaaggaaaagcactttaaagaatcagactcatagcaattgatccctgcaaaacatggctggtggacagaccaatatgatctatgcagttagatcagttgttcccaacaaaagcaataatgaaatagtcctggtgctccaacagtttgattttaatgtggataaagccgtgcaagcctttgtggatggcagtgcaattcaagttctaaaagaatggaatatgacaggaaaaaagaagaacaataaaagaaaaagaagcaagtccaagcagcatcaaggcaacaaagatgctaaagacaaggtggagaggcctgaggcagggcccctgcagccgcagccaccacagattcaaaacggccccatgaatggctgcgagaaggacagctcgtccacagattctgctaacgaaaaaccagcccttatccctcgtgagaaaaagatctcgatacttgaggaaccttcaaaggcacttcgtggggtcacaggcccaaatattgagaaatcagtgaaggatttgcaacgctgcaccgtttctctaactagatatcgcgtcatgattaaggaagaagtggatagttccgtgaagaagatcaaagctgcctttgctgaattacacaactgcatcattgacaaagaagtttcattaatggcagaaatggataaagttaaagaagaagccatggaaatcctgactgctcgtcagaagaaagcagaagaactaaagagactcactgaccttgccagtcagatggcagagatgcagctggcc

SEQ ID NO: 185776 - DNA, 6115 bp, Homo sapiens
  Payload ID: 16578
  Gene Symbol: SPATS2L
  Gene Name: spermatogenesis associated, serine-rich 2-like
  Uniprot ID: Q9NUQ6
  ENST ID: ENST00000619961
  CDS Start-End: 124-1890
attgtggagagagttatctgtgggcttgagaagctgctctgccacaccagtaaggatcagggaaagaaaatacttaggccacaccgttgcagtctttgattgcatgccagtctgaagcattttatggacccgttttgccatagctcttcagaaaccaggctgctttcaggaacattgctgtggattcccagggcctattccactagaagcaagatggctgaactcaatactcatgtgaatgtcaaggaaaagatctatgcagttagatcagttgttcccaacaaaagcaataatgaaatagtcctggtgctccaacagtttgattttaatgtggataaagccgtgcaagcctttgtggatggcagtgcaattcaagttctaaaagaatggaatatgacaggaaaaaagaagaacaataaaagaaaaagaagcaagtccaagcagcatcaaggcaacaaagatgctaaagacaaggtggagaggcctgaggcagggcccctgcagccgcagccaccacagattcaaaacggccccatgaatggctgcgagaaggacagctcgtccacagattctgctaacgaaaaaccagcccttatccctcgtgagaaaaagatctcgatacttgaggaaccttcaaaggcacttcgtggggtcacagaaggcaacagactactgcaacagaaactatccttagatgggaaccccaaacctatacatggaacaacagagaggtcagatggcctacagtggtcagctgagcagccttgtaacccaagcaagcctaaggcaaaaacatctcctgttaagtccaatacccctgcagctcatcttgaaataaagccagatgagttggcaaagaaaagaggcccaaatattgagaaatcagtgaaggatttgcaacgctgcaccgtttctctaactagatatcgcgtcatgattaaggaagaagtggatagttccgtgaagaagatcaaagctgcctttgctgaattacacaactgcatcattgacaaagaagtttcattaatggcagaaatggataaagttaaagaagaagccatggaaatcctgactgctcgtcagaagaaagcagaagaactaaagagactcactgaccttgccagtcagatggcagagatgcagctggccgaactcagggcagaaattaagcactttgtcagcgagcgtaaatatgacgaggagctcgggaaagctgcccggttttcctgtgacatcgaacagctgaaggcccaaatcatgctctgcggagaaattacacatccaaagaacaactattcctcaagaactccctgcagctccctgctgcctctgctgaatgcgcacgcagcaacctctgggaaacagagtaacttttcccgaaaatcatccactcacaataagccctctgaaggcaaagcggcaaaccccaaaatggtgagcagtctccccagcaccgccgacccctctcaccagaccatgccggccaacaagcagaatggatcttctaaccaaagacggagatttaatccacagtatcataacaacaggctaaatgggcctgccaagtcgcagggcagtgggaatgaagccgagccactgggaaagggcaacagccgccacgaacacagaagacagccgcacaacggcttccggcccaaaaacaaaggcggtgccaaaaatcaagaggcttccttggggatgaagacccccgaggccccggcccattctgaaaagccccggcgaaggcagcacgctgcagacacctcggaggccaggcccttccggggtagtgtcggtagggtttcacagtgcaatctctgccccacgagaatagaagtttccacagatgcagcagttctctcagtcccggctgtgacgttggtggcctgagctaggaggaaaaagagcagttttcactcagttttggttccctgcccgaggtgctgacccaattcgctgccaaaagagtgtcaatcagaatatacaaatcccgtatggttgtgtcatcctctcttaatcatttttactaattctaataatcagctctagcttgcttcataattttcatggctttgcttgatctgttgatgctttctctcatcaagactttgcagcattttagccaggcagtatttactcattattaggaaaatcaagatgtggctgaagatcagaggctcagttagcaacctgtgttgtagcagtgatgtcagtccattgattgtctttagagagttaatgttacaaaaaagaattcttaataatcagacaaacatgatctgctgaggacacatgcgcttttgtagaatttaacatctggtgtttttctgaaaaaatatatatacatatattgctttatttgaaacaaattaaaatatgctgcatttgacacctggctagtttcttttattgatacccacctagttattgaatgtactgtttagtgctttcaaaaaaaactttagagactagaggttgtggtgcaaagctgtgtacaataaatactgtttctgttgagacaagtactctttcaggaaaatatatatatgccctttcaattagattacacaaatagatggatatgcaccctgatcatcttagacacaccatgtggcagttgggcagttggaaacattggttgcaagtactacaaacctcagctgagcctagcttcaacaataagaatttattggttcagtgagtgaaaagtccagttggtccaatttgatcaggatttcagctcccatctcttttttttttttcttttttctttttctttttttgagacagtcttgctttgtcacccaggtggagtgcaatggcatgatctcggctcactgcaacctccgcctcctgggttcaagccattctcctgcccggccttccgagtagctgggattacaggcatgtgccaccacgccctgctaatttttatattattagtacagacaggatttcaccatgttgtccaggctggtctcaaacccctgacctcaggtgatccacctgctttggcctccgaaactgccggaattacaggcatgagccaccgtacccggccagctcccatctcttaattatcttagctctcctttcctccttgggttgacattgcattcagaattgtggcaaagggccaccatgctcttaagactcaagtctattttccacactgtccagaggagagaagttatcctagtagcttctacacagagcaagtgtctttctcagaaatcccagcaaaggtcttgcataccattgctggtaggcctgtctcttaaaccaatcatgaaaggggggagagaagtgaatgggatgaactaatttgcatagactaattagagcccacccctggagcctgggtgtggccatcttcccagagttcctgagctagatggagaaggggtacttctcagaaagggaaaatggatacccaatggcccaaacccaaaatagccccagttcccctaactttgactacagggcagtccagtttgggtgccgcttccgttgcactcacatgtcctacatatctgttgactactcacaagtgcaaatgcttattctcaactcaacattaacattttttctggcaacccaggttcactggttctcttccacagagcggccctgagcagctgagcctgcaagccacgcaagcatctgtttcttcttttgccaagtacaggaggatgtttgctctctctgtagagagctttctgaggtctctgggtgtacccagagatttaatagaaattcttaacgttaagtcacattccaggaaggaaggaagagttgttcgttcaaataagaaagataaatgttcggcactgtaggccctgtttaccccatctgaggccctgaattcatatattacaagacggaaggattttgcacagttttttatgtagcaagattttgctcaccactgaaaaatgtcagtgtaaatgtgaccgctttaaagatgagtcaagtaattcttggaacagggaaaaaaatgaatttgccaggtcaggagttcacctgcctttgtcagagttgaacccaaccactcttgacctcgactcactcccttagggttaagaaagcccaaacacattcctgagcacagagcaaacactcccatgtcactgaaaagaaacaaaagaatgctaaaaagtgctcagacctgatcacattttttccaatattttttcctttttttttttttttttgagacagggtcttgctctatcacctaggctggagtgcatgtttttgagacagggtcttgctctatcacctaggctggagtgcatgatcatggctcactatagccttgaactcctgggctcaagccatcctcagcctcccaagttgcgaggactacaggtgtgcaccacaacgtcccagctactttttaaatttttagtagaaacgaggtctcactatggtgcccagactggtctcgaactccggagctcaagtgatcttcctgctttggcctcccaaagtgttagaattacaggcatgagccacctcgcctggctggtttttgcctttcttatagaccctgggcatgtaagcatttattagtttgcatttttgaaacagtaatttcaatattttagtgccaatgtcaggccgcttaaacactgtattacatatcttcatctgtctggtggaactattggtgtgatcctagagaactgagtcctattctgccattcatttaaagtgttttaaactctaatctctctacttaatgcacagtagtcagattattctcttaaacatttgcctagtagaggttaaaatagtttaatccttatgaagatggaataacttcaaactcacattgtggcacttagatcttccaccaagacttcatccgtgaaatccacacctccctgttgggttcccaattacattccaaatttacatttcttttgagaatctctgcatactccagctctgtcctgttgatcctattctagaagtgcttaatgcagcaagacacagaaagttaaacgcaaattgctgcaaaattcaccctcagtggaggactagaaacacaacatgtccaatttaaagctcagttcacaagcagttcaattctgctggcatcagaaaaggagattctaattaaacattcttagggaaggacatcaaatgaggttaatgggaaacgttaccagattaaaagcagttttttgacaaagtaacagatttggaaattctgactctctgaaagccttgatttgaacctcaaacttgatttcaccatgagaagtggggatcaagggcctgcgcagttcttttcctaaatcgattcggtgctccccaccccgacgcaggcacaggtccgcaaccagatagggagatgcctgaatttcaggctacctttgacaaagctttcttcctccctccctccctttgcacgctgcatcccacgctgcctgcttaaagcgccctcatgtgtctacagatggtaaaacgtttatttctcaacagacattccagtgatagcatccaatgacctatgtaacggcacccttttttgctgtacgcgttttttgagatggagtctcgctctgtcgcccaggctggagtgcagtggcgcggtctcggctcactgcaagctccgcctcccgggttcacgccattctcctgcctcagcctcccgagtagctgggactacaggcacccgccaccacacctggctaattttttgtatttttagtagatacagggtttcaccgtgttagccaggatggttttgatctcctgacctcgtgatccacccccctcggcctcccaaagtgctgggattacaggggtgagccactgcgcccggccccagtcacttgttcttaagtttcttaagcaaactataaaatagcaaaagaccaaaaaaaaaggaaaaaaagcagttcgcctaatacattgttccagcatttccttgaaagtactgagccatctcaattgctctgattttgtgagaaaattatgaagagttgcaaagtcccagtgattctcttgttacttagctaagaatttgaaatgtaatttaaatactattctttacaatccattataaggattttaaaatctttttgcttctttaataaattct

SEQ ID NO: 185777 - DNA, 1868 bp, Homo sapiens
  Payload ID: 16579
  Gene Symbol: SPZ1
  Gene Name: spermatogenic leucine zipper 1
  Uniprot ID: Q9BXG8
  ENST ID: ENST00000296739
  CDS Start-End: 242-1534
aaacaccgggtgcctagaggagaagagatggagccccagccttggtcccctttcccacccttcctccccacaaggctgtctgagatgccaccttccacctaaacatcatctcccaaattttaatccttaactttggtctctgacttctgcttgattccacagtctccacccacatttgcacaaaggaccatcacctgtccttcctggaatctctaaagttttctgctttccttctgtcctgatggccagctctgctaagtcagctgagatgcccaccatctccaaaaccgttaaccctactcctgatcctcatcaagaatatctggaccctaggattaccattgccttattcgaaattggatcacattccccttcctcctggggctctctccctttcctaaagaatagcagccatcaagttacagaacaacagactgcacagaagtttaacaatctcttaaaagaaattaaagatattcttaaaaatatggcaggttttgaagagaagatcacagaagcaaaagaactttttgaggaaaccaatattactgaggatgtgtcagcccacaaagaaaatatcagaggacttgacaaaatcaatgaaatgttatcaacaaacctgcctgttagtttagccccagagaaagaagacaatgaaaagaaacaggagatgatattggaaaccaatattactgaggatgtgtcagcccacaaagaaaatatcagaggacttgacaaaatcaatgaaatgttatcaacaaacctgcctgttagtttagccccagagaaagaagacaatgaaaagaaacagcagatgataatggaaaaccagaactctgagaacaccgcacaagtttttgcaagagatttggtaaatcgtttagaagaaaaaaaagtccttaacgaaactcaacaaagtcaggaaaaagcaaaaaacagacttaatgttcaagaagaaactatgaaaattaggaacaacatggagcagttactacaggaagcagaacactggagtaaacaacatactgagctcagtaaactgataaaatcctatcagaaatctcagaaagacataagtgaaactcttggaaataatggagtcggtttccaaacccagccaaataatgaagtgtcggctaagcatgagctggaggaacaggtgaagaaactgagccatgacacctattcattgcagttgatggcagctttgctagagaatgaatgccaaatcttacagcagagagtagagattctcaaggaactccatcatcagaaacagggaactctgcaagagaagccaattcagataaactataaacaggacaagaaaaatcagaagccatcagaagcaaagaaagtagaaatgtataagcagaacaagcaagcaatgaagggtacattttggaaaaaagacagatcctgtagaagcctggatgtttgtcttaataagaaagcttgcaatacccagttcaatattcatgttgcaagaaaagctcttaggggaaaaatgaggtcagctagcagcctaagatagaaaataccaaaagcagatgaaaaggtgaatccttaaaaaactacatctgttacctccaacttgtcagtcatgatcaatcatcaaaccttgggcagatctgctggttcaaccaagaaagagctatagaataaggagattgacacttatattactcattacttcagcagttatgtaagtctggtctttaatgaccattgtgtctacatcaagttcataacttttcacctttacaatctgcttgttttttttgtaattattagatagacagcctagagtgagaagttaaaggtccaattaagtaaagatctaaataaaaaccagaatacaagggaaa

SEQ ID NO: 185778 - DNA, 859 bp, Homo sapiens
  Payload ID: 16579
  Gene Symbol: SPZ1
  Gene Name: spermatogenic leucine zipper 1
  ENST ID: ENST00000511881
  CDS Start-End: 157-859
atgaaaggatggggacctcaccagagaggactggtctcagcaatgtccttaagtggtcaaaacatgctgcggttgagtctccacccacatttgcacaaaggaccatcacctgtccttcctggaatctctaaagttttctgctttccttctgtcctgatggccagctctgctaagtcagctgagatgcccaccatctccaaaaccgttaaccctactcctgatcctcatcaagaatatctggaccctaggattaccattgccttattcgaaattggatcacattccccttcctcctggggctctctccctttcctaaagaatagcagccatcaagttacagaacaacagactgcacagaagtttaacaatctcttaaaagaaattaaagatattcttaaaaatatggcaggttttgaagagaagatcacagaagcaaaagaactttttgaggaaaccaatattactgaggatgtgtcagcccacaaagaaaatatcagaggacttgacaaaatcaatgaaatgttatcaacaaacctgcctgttagtttagccccagagaaagaagacaatgaaaagaaacaggagatgatattggaaaccaatattactgaggatgtgtcagcccacaaagaaaatatcagaggacttgacaaaatcaatgaaatgttatcaacaaacctgcctgttagtttagccccagagaaagaagacaatgaaaagaaacagcagatgataatggaaaaccagaactctgagaacaccgcacaagtttttgcaagagatttggtaaatcgtttagaagaaaaaaaagtccttaacgaaactcaacaaagtcaggaaaaagcaaaaaacagactta

SEQ ID NO: 185779 - DNA, 1266 bp, Homo sapiens
  Payload ID: 16580
  Gene Symbol: SRM
  Gene Name: spermidine synthase
  Uniprot ID: P19623
  ENST ID: ENST00000376957
  CDS Start-End: 82-990
ggcggagctggtcccgttgtgctgcggcgccgcgcggcctgcagtcccgggcccgcgccccgcgccgcccgcccgcccgccatggagcccggccccgacggccccgccgcctccggccccgccgccatccgcgagggctggttccgcgagacctgcagcctgtggcccggccaggccctgtcactgcaggtggagcagctgctccaccaccggcgctcgcgctaccaggacatcctcgtcttccgcagtaagacctatggcaacgtgctggtgttggacggtgtcatccagtgcacggagagagacgagttctcctaccaggagatgatcgccaacctgcctctctgcagccaccccaacccgcgaaaggtgctgatcatcgggggcggagatggaggtgtcctgcgggaggtggtgaagcacccctccgtggagtccgtggtccagtgtgagatcgacgaggatgtcatccaagtctccaagaagttcctgccaggcatggccattggctactctagctcgaagctgaccctacatgtgggtgacggttttgagttcatgaaacagaatcaggatgccttcgacgtgatcatcactgactcctcagaccccatgggccccgccgaaagtctcttcaaggagtcctattaccagctcatgaagacagccctcaaggaagatggtgtcctctgctgccagggcgagtgccagtggctgcacctggacctcatcaaggagatgcggcagttctgccagtccctgttccccgtggtggcctatgcctactgcaccatccccacctaccccagcggccagatcggcttcatgctgtgcagcaagaacccgagcacgaacttccaggagccggtgcagccgctgacacagcagcaggtggcgcagatgcagctgaagtactacaactccgacgtgcaccgcgccgcctttgtgctgcccgagtttgcccgcaaggccctgaatgatgtgagctgagcccaggcgccaccactgatgccacccaggacctcggaccttggagcctgcggggtgcctcggcccctccagccccgggccggacctcctgctggctctcgcccaccaaccaagtgttacaagccccagaatgctgcccggcctgccctgctgggcggactgtctgtgtgtctgtctctctggcgttccacctccaagcctataccagctgtgtacagcgccatctctctgccttctgttgcccctcactcaccaaacacgtgtatttatagcaaa

SEQ ID NO: 185780 - DNA, 731 bp, Homo sapiens
  Payload ID: 16580
  Gene Symbol: SRM
  Gene Name: spermidine synthase
  ENST ID: ENST00000459997
  CDS Start-End: 78-359
gagctggtcccgttgtgctgcggcgccgcgcggcctgcagtcccgggcccgcgccccgcgccgcccgcccgcccgccatggagcccggccccgacggccccgccgcctccggccccgccgccatccgcgagggctggttccgcgagacctgcagcctgtggcccggccaggccctgtcactgcaggtggagcagctgctccaccaccggcgctcgcgctaccaggacatcctcgtcttccgcagagaacccaggtccccgactgtcactccgcccgcagtaagacctatggcaacgtgctggtgttggacggtgtcatccagtgcacggagagagacgagttctcctaccaggagatgatcgccaacctgcctctctgcagccaccccaacccgcgaaaggtgctgatcatcgggggcggagatggaggtgtcctgcgggaggtggtgaagcacccctccgtggagtccgtggtccagtgtgagatcgacgaggatgtcatccaagtctccaagaagttcctgccaggcatggccattggctactctagctcgaagctgaccctacatgtgggtgacggttttgagttcatgaaacagaatcaggatgccttcgacgtgatcatcactgactcctcagaccccatgggccccgccgaaagtctcttcaaggagtcctattaccagctcatgaagacagccctcaaggaagatggtgtcctctgctgccagg

SEQ ID NO: 185781 - DNA, 461 bp, Homo sapiens
  Payload ID: 16580
  Gene Symbol: SRM
  Gene Name: spermidine synthase
  ENST ID: ENST00000490101
  CDS Start-End: 1-250
cagcggccagatcggcttcatgctgtgcagcaagaacccgagcacgaacttccaggagccggtgcagccgctgacacagcagcaggtggcgcagatgcagctgaagtactacaactccgacgtgcaccgcgccgcctttgtgctgcccgagtttgcccgcaaggtgggtggcctgcggggctgggtggtgggacccagggacccagagcgccctcctgactggcctcatgtccctccaggccctgaatgatgtgagctgagcccaggcgccaccactgatgccacccaggacctcggaccttggagcctgcggggtgcctcggcccctccagccccgggccggacctcctgctggctctcgcccaccaaccaagtgttacaagccccagaatgctgcccggcctgccctgctgggcggactgtctgtgtgtctgtctctctggcgttccacctccaagcct

SEQ ID NO: 185782 - DNA, 402 bp, Homo sapiens
  Payload ID: 16580
  Gene Symbol: SRM
  Gene Name: spermidine synthase
  ENST ID: ENST00000465788
  CDS Start-End: 1-402
gagatggaggtgtcctgcgggaggtggtgaagcacccctccgtggagtccgtggtccagtgtgagatcgacgaggtgagtgccggcgtagagccaggtttgagtcctggttctcccagcggccagctgtgccctgaaatggctgcacacccccgagcaaggcaggatgtcatccaagtctccaagaagttcctgccaggcatggccattggctactctagctcgaagctgaccctacatgtgggtgacggttttgagttcatgaaacagaatcaggatgccttcgacgtgatcatcactgactcctcagaccccatgggccccgccgaaagtctcttcaaggagtcctattaccagctcatgaagacagccctcaaggaagatggtgtcctctgctgccagg

SEQ ID NO: 185783 - DNA, 611 bp, Homo sapiens
  Payload ID: 16580
  Gene Symbol: SRM
  Gene Name: spermidine synthase
  ENST ID: ENST00000487300
  CDS Start-End: 253-611
gcgggctggacctcgtcctgccctggccccctcgccacccctcacaccgcctccctgggctggggctgggactgcgggctggcctcttgggtgggggagtcggagtctgcgccccgctccacgtgtcagccctcaggacacgtcagagcccgaggagaccccgggtcccaccccggcctccacccggcggcccgcctgccgttcctcgccacgtgtcaccatcgctcctcatccctgggacccctaggcgggatggggagaccctcctcacccagggcggcttggggtacgttttccccaccccagagaacccaggtccccgactgtcactccgcccgcagtaagacctatggcaacgtgctggtgttggacggtgtcatccagtgcacggagagagacgagttctcctaccaggagatgatcgccaacctgcctctctgcagccaccccaacccgcgaaaggtgctgatcatcgggggcggagatggaggtgtcctgcgggaggtggtgaagcacccctccgtggagtccgtggtccagtgtgagatcgacgaggatgtcatccaagtctccaagaagttcctgccaggcatggccattggctactctag

SEQ ID NO: 185784 - DNA, 2192 bp, Homo sapiens
  Payload ID: 16581
  Gene Symbol: SATL1
  Gene Name: spermidine/spermine N1-acetyl transferase-like 1
  Uniprot ID: Q86VE3
  ENST ID: ENST00000395409
  CDS Start-End: 562-2088
atgaaccaatcaggcacgaaccaatcaagtttatcagactcgaaccaagcaggcataaaccagccaagcacaaactcacttggtatgaaccaaatggacatgaaccaagggagtgcaagcctatatgaaatgaaccaagtggacatgaaacaaccaagcatgagccaagctggcatgaggcaatcaggtacaaacctaccagacataaaccaacccgacatgaaacaaccagacacatggcaattaggtaggagccaaccaggcatgctgcaacaagaactgagccaactagtcctgagcaaagcaggcataagccaaccagacccatcgcaaccaggcccaagccaatcaggccccagccaatcacgcatgaggcaaataggcacgaaccaatcaggtatgagccaaccagtgatgcagcaactagacagccagtcaggtgggagccaaccaagcatgagacaagtaggcaccagccaattaggcacaagccaaataggcatgagccaaccaggcacatggcaaacaggactgagccaaccagtcctgaggcaaccaaacatgagtccaccaggcatgtggcaaccaggcgtgcaacaaccaggcatcagccagcaagtcccaagccacccagacatgagtcaaccaggcatgagccagcaagtccccagccaaccaggcataaggcaaccagacactagccaatcatgtaagaaccaaacagacatgagccaaccagacgcaaaccaatcaagtttatcagattccaaccaaacaggtataatccagccaagcccaagcttacttggtatgaaccaaatggacatgaaccaatggagtgcaagcctatatgaaatgaaccaagtggacatgaaacaaccaagcatgagccaagctggcatgaggcaatcaggtacaaacctaccagacataaaccaacctggcatgaaacaaccaggcacatggcaattaggtaggagccaaccaggcatgtggccacaaagcctgagcgaactagtcctgagtgaagcaagcataagccaaccaggtccaccgcaacgagccccaagccaatcaggccccagacaatcaagcacgagccaagcaggcacaaaccaatcaggtataagccaaccagtgatgtggcaactagacatgagacagtcaggtgggagccaaccaagcatgagacaagtaggcaccagccaatcaggcacaagccaaataggcatgagccaaccaggcacatggcaaacaggcctgagccaaccagtcccgaggcaaccaaacaagagtccaccaggcatgtggcaacgaggcatgtggcaaccaggcatgagccagcaagtccccagccaactaggcatgagacaaccaggcactagccaatcaagtaagaaccaaacaggcatgagccatccaggcaggggccaaccaggcatatgggaaccggggccgagtcagccaggcctgagccaacaagacctgaaccaattagtgctgagccaaccaggcctgagtcaaccaggcaggagccaaccaagtgtgagccaaatgggcatgaggcaaacaagcatggattactttcaaataagacatgcagaggctggagactgcccagaaattttgcgactgattaaagaattggctgcctgtgaaaacatgctagatgcaatggagttaacagcagctgatttactcagagatggctttggggacaatccccttttctactgcctgattgcagaagtaaacgatcaacaaaaaccatcaggcaaactgactgttggatttgccatgtactactttacatacgactcatggactggcaaggtactttacctagaggacttttatgtcacacaagcttaccaaggcctaggtattggagctgaaatgctgaagaggctaagtcagatagccatcacaactcaatgtaactgcatgcactttcttgtcgtcatttggaaccaggcttctatcaactactatactagtcgaggggctttagacctttcctctgaggagggctggcatctcttcaggtttaacagagaagaactcctggacatggcatgggaagaatgaaagaggctttgtaacaactcatcccaacacagcctccaacatttgactgtcacctgagtctaacagcagtttgactttgttgtacaatacagcaagtgatcatc

SEQ ID NO: 185785 - DNA, 2224 bp, Homo sapiens
  Payload ID: 16581
  Gene Symbol: SATL1
  Gene Name: spermidine/spermine N1-acetyl transferase-like 1
  Uniprot ID: Q86VE3
  ENST ID: ENST00000509231
  CDS Start-End: 81-1979
cagccatcagccaatcagttgtctgccaacccatcatctgccaccccatccttagtcaacaaagcaggaatcaactgggcatgaaccaatcaggcacgaaccaatcaagtttatcagactcgaaccaagcaggcataaaccagccaagcacaaactcacttggtatgaaccaaatggacatgaaccaagggagtgcaagcctatatgaaatgaaccaagtggacatgaaacaaccaagcatgagccaagctggcatgaggcaatcaggtacaaacctaccagacataaaccaacccgacatgaaacaaccagacacatggcaattaggtaggagccaaccaggcatgctgcaacaagaactgagccaactagtcctgagcaaagcaggcataagccaaccagacccatcgcaaccaggcccaagccaatcaggccccagccaatcacgcatgaggcaaataggcacgaaccaatcaggtatgagccaaccagtgatgcagcaactagacagccagtcaggtgggagccaaccaagcatgagacaagtaggcaccagccaattaggcacaagccaaataggcatgagccaaccaggcacatggcaaacaggactgagccaaccagtcctgaggcaaccaaacatgagtccaccaggcatgtggcaaccaggcgtgcaacaaccaggcatcagccagcaagtcccaagccacccagacatgagtcaaccaggcatgagccagcaagtccccagccaaccaggcataaggcaaccagacactagccaatcatgtaagaaccaaacagacatgagccaaccagacgcaaaccaatcaagtttatcagattccaaccaaacaggtataatccagccaagcccaagcttacttggtatgaaccaaatggacatgaaccaatggagtgcaagcctatatgaaatgaaccaagtggacatgaaacaaccaagcatgagccaagctggcatgaggcaatcaggtacaaacctaccagacataaaccaacctggcatgaaacaaccaggcacatggcaattaggtaggagccaaccaggcatgtggccacaaagcctgagcgaactagtcctgagtgaagcaagcataagccaaccaggtccaccgcaacgagccccaagccaatcaggccccagacaatcaagcacgagccaagcaggcacaaaccaatcaggtataagccaaccagtgatgtggcaactagacatgagacagtcaggtgggagccaaccaagcatgagacaagtaggcaccagccaatcaggcacaagccaaataggcatgagccaaccaggcacatggcaaacaggcctgagccaaccagtcccgaggcaaccaaacaagagtccaccaggcatgtggcaacgaggcatgtggcaaccaggcatgagccagcaagtccccagccaactaggcatgagacaaccaggcactagccaatcaagtaagaaccaaacaggcatgagccatccaggcaggggccaaccaggcatatgggaaccggggccgagtcagccaggcctgagccaacaagacctgaaccaattagtgctgagccaaccaggcctgagtcaaccaggcaggagccaaccaagtgtgagccaaatgggcatgaggcaaacaagcatggattactttcaaataagacatgcagaggctggagactgcccagaaattttgcgactgattaaagaattggctgcctgtgaaaacatgctagatgcaatggagttaacagcagctgatttactcagagatggctttggggacaatccccttttctactgcctgattgcagaagtaaacgatcaacaaaaaccatcaggcaaactgactgttggatttgccatgtactactttacatacgactcatggactggcaaggtactttacctagaggacttttatgtcacacaagcttaccaagatagccatcacaactcaatgtaactgcatgcactttcttgtcgtcatttggaaccaggcttctatcaactactatactagtcgaggggctttagacctttcctctgaggagggctggcatctcttcaggtttaacagagaagaactcctggacatggcatgggaagaatgaaagaggctttgtaacaactcatcccaacacagcctccaacatttgactgtcacctgagtctaacagcagtttgactttgttgtacaatacagcaagt

SEQ ID NO: 185786 - DNA, 801 bp, Homo sapiens
  Payload ID: 16582
  Gene Symbol: SAT1
  Gene Name: spermidine/spermine N1-acetyltransferase 1
  ENST ID: ENST00000379251
  CDS Start-End: 180-632
gcgcagctcttagtcgcgggccgactggtgtttatccgtcactcgccgaggttccttgggtcatggtgccagcctgactgagaagaggacgctcccgggagacgaatgaggaaccacctcctcctactgttcaagtacaggggcctggtccgcaaagggaagaaaagcaaaagacgaaaatggctaaattcgtgatccgcccagccactgccgccgactgcagtgacatactgcggctgatcaaggagctggctaaatatgaatacatggaagaacaagtaatcttaactgaaaaaggtaattcaacagtggcgggacgggggacaagcgttcggtgcctgtcaccttcgccaaggccattaccgcccctgctcccccttcttgcagatctgctagaagatggttttggagagcaccccttttaccactgcctggttgcagaagtgccgaaagagcactggactccggaaggtaacccctcgccctttccagaagccagagagaccaagtgttatgtaagaagtagtgtcggctgtgtagaaccactgactacacaggccgaagttactgagaacttggacagaaaaaatagccagcaagtgttcaaactactgaggaaaaaaaaaaattagatatgctgcacttaagaatactagggcaggttaaaagagctgtttaagtaagtatcagagtgctgtggagactcggaagtgtttaagctgcttaagtaagtataagtgctgtggagacccggaagagttagatataatgtcatttgttgtaattcagtttcataaaatg

SEQ ID NO: 185787 - DNA, 909 bp, Homo sapiens
  Payload ID: 16582
  Gene Symbol: SAT1
  Gene Name: spermidine/spermine N1-acetyltransferase 1
  ENST ID: ENST00000379253
  CDS Start-End: 180-542
gcgcagctcttagtcgcgggccgactggtgtttatccgtcactcgccgaggttccttgggtcatggtgccagcctgactgagaagaggacgctcccgggagacgaatgaggaaccacctcctcctactgttcaagtacaggggcctggtccgcaaagggaagaaaagcaaaagacgaaaatggctaaattcgtgatccgcccagccactgccgccgactgcagtgacatactgcggctgatcaaggagctggctaaatatgaatacatggaagaacaagtaatcttaactgaaaaagatctgctagaagatggttttggagagcaccccttttaccactgcctggttgcagaagtgccgaaagagcactggactccggaaggtaacccctcgccctttccagaagccagagagaccaagtgttatgtaagaagtagtgtcggctgtgtagaaccactgactacacaggccgaagttactgagaacttggacagaaaaaatagccagcaagtgttcaaactactgaggaaaaaaaaaaattagatatgctgcacttaagaatactagggcaggttaaaagagctgtttaagtaagtatcagagtgctgtggagactcggaagtgtttaagctgcttaagtaagtataagtgctgtggagacccggaagagttagatataatgtcatttgttgtaattcagtttcataaaatggttcttgtttgaccctaacgtaacagtttttgtaattgtgttaaatcacatttttttctttaatttgtcccaatcttcaggttacagtctctagcttcgccatgtacatggcccttccgtgtacatggatgggcggggaggtaactaaaagatcctttacacaataaagtagatgatcatgataaatgaggtaaggtc
